United States Patent Application Publication US 2011/0183924 A1 - sequence listing, part 99

SEQ ID NO: 309637 - DNA, 7089 bp, Homo sapiens
ccccgactagcccgacagtccccgactagcccgacagccccagcaggatctgcatcgtcatcgagccggcccagcttctgaagggagatgtcatggtgaaatgctaccacaagaaataccgctcggccacccgtgacgtcattttccgcctgcagtttcacactggggctgtgcagggctacgggctggtgtttgggaaggaggatctggacaatgccagcaaagatgaccgttttcctgactatgggaaggttgaattagtcttctctgccacgcctgagaagattcaagggtccgaacacttgtacaacgaccacggtgtgattgtggactacaacacaacagacccactgatacgctgggactcgtacgagaacctcagtgcagatggagaagtgctacacacgcagggccctgtcgatggcagcctttacgcgaaggtgaggaagaaaagctcctcggatcctggcatcccaggtggcccccaggcaatcccggccaccaacagcccagaccacagtgaccacaccttgtctgtcagcagtgactccggccactctacagcctctgccaggacggataagacggaagagcgcctggccccaggaaccaggaggggcctgagtgcccaggagaaggcagagttggaccagctgctcagtggctttggcctggaagatcctggaagctccctcaaggaaatgactgatgctcgaagcaagtacagtgggacccgccacgtggtgccagcccaggttcacgtgaatggagacgctgctctgaaggatcgggagacagacattctggatgacgagatgccccaccacgacctgcacagtgtggacagccttgggaccctgtcctcctcggaagggcctcagtcggcccacctgggtcccttcacctgccacaagagcagccagaactcactcctatctgacggttttggcagcaacgttggtgaagatccgcagggcaccctcgttccggacctgggccttggcatggacggcccctatgagcgggagcggacttttgggagtcgagagcccaagcagccccagcccctgctgagaaagccctcagtgtccgcccagatgcaggcctatgggcagagcagctactccacacagacctgggtgcgccagcagcagatggttgtagctcaccagtatagcttcgccccagatggggaggcccggctggtgagccgctgccctgcagacaatcctggcctcgtccaggcccagcccagagtgccactcacccccacccgagggaccagcagtagggtggctgtccagaggggtgtaggcagtgggccacatccccctgacacacagcagccctctcccagcaaagcgttcaaacccaggtttccaggagaccaggttgtgaatggagccggcccagagctgagcacaggcccctccccaggctcgcccaccctggacatcgaccagtccatcgagcagctcaacaggctgatcctggagctggatcccaccttcgagcccatccctacccacatgaacgccctcggtagccaggccaatggctctgtgtctccagacagcgtgggaggtgggctccgggcaagcagcaggctgcctgacacaggagagggccccagcagggccaccgggcggcaaggctcctctgctgaacagcccctgggcgggagactcaggaagctgagcctggggcagtacgacaacgatgctggggggcagctgcccttctccaaatgtgcatggggaaaggctggtgtggactatgccccaaacctgccgccattcccctcaccagcggacgtcaaagagacgatgacccctggctatccccaggacctcgatattatcgatggcagaattttaagtagcaaggagtccatgtgttcaactccagcatttcctgtgtctccagagacaccgtatgtgaaaacagcgctgcgccatcctccgttcagcccacctgagcccccgctgagcagcccagccagtcagcacaaaggaggacgtgaaccacgaagctgccctgagacgctcactcacgctgtggggatgtcagagagccccatcggacccaaatccacgatgctccgggctgatgcgtcctcgacgccctcctttcagcaggcttttgcttcttcctgcaccatttccagcaacggccctgggcagaggagagagagctcctcttctgcagaacgccagtgggtggagagcagccccaagcccatggtttccctgctggggagcggccggcccaccggaagtcccctcagcgctgagttctccggtaccaggaaggactccccagtgctgtcctgcttcccgccgtcagagctccaggctcctttccacagccatgagctgtccctagcagagccaccggactccctggcgcctcccagcagccaggccttcctgggcttcggcaccgccccagtgggaagtggccttccgcccgaggaggacctgggggccttgctggccaattctcatggagcgtcaccgacccccagcatcccgctgacagcgacaggggctgccgacaatggcttcctgtcccacaactttctcacggtggcgcctggacacagcagccaccacagtccaggcctgcagggccagggtgtgaccctgcccgggcagccacccctccctgagaagaagcgggcctcggagggggatcgttctttgggctcagtctctccctcctccagtggcttctccagcccgcacagcgggagcaccatcagtatccccttcccaaatgtccttcccgacttttccaaggcttcagaagcggcctcacctctgccagatagtccaggtgataaacttgtgatcgtgaaatttgttcaagacacttccaagttctggtacaaggcggatatttcaagagaacaagccatcgccatgttgaaggacaaggagccgggctcattcattgttcgagacagccattccttccgaggggcctatggcctggccatgaaggtggccacgcccccaccttcagtcctgcagctgaacaagaaagctggagatttggccaatgaactcgtccggcactttttgatcgagtgtaccccgaagggagtgcggttgaaagggtgctcgaatgaaccatatttcgggagcctgacggccttggtgtgccagcattccatcacgcccttggccttgccgtgcaagctgcttatcccagagagagatccattggaggaaatagcagaaagttctccccagacggcagccaattcagcagctgagctgttgaagcagggggcagcctgcaacgtgtggtacttgaactctgtggagatggagtccctcaccggccaccaggcgatccagaaggccctgagcatcaccctggtccaggagcctccacctgtgtccacagttgtgcacttcaaggtgtcagcccagggcatcaccctgacagacaatcagaggaagctcttcttccggaggcattaccccgtgaacagtgtgattttctgtgccttggacccacaagacaggaagtggatcaaagatggcccttcctcaaaagtctttggatttgtggcccggaagcagggcagtgccacggataatgtgtgccacctgtttgcagagcatgaccctgagcagcctgccagtgccattgtcaacttcgtatcaaaggtcatgattggttccccaaagaaggtctgagaactcccctccctccctggacccaccgatgcctctcgaagccctggagacagccgttgggtgagggtggggcccccactttttaccaaactagtaaacctgacattccaggcccatgaggggaaagaggatcttccagctctgcaaaaacaagaacaaacaacatcaccgtgaattggcctttcctgaaagtgacttatctgacacatctctgtagccacatgctttttgggtagaagaagctgggcatgggtgcaccccaccccctagggtccccatgggaaagggacatgcaaggaaacagcacagaacacgaggtggtccccatgtccctggcacactagcattctgggggatgaggaatccccagcccttgaggcagaggtgccgagtgactgccatgcttcgcccgtccgcatgggcgcttctgtccagctgcacccgaggccgggggtttccctcacctcggtcttcccaagatggagatgctaacgaaactgagaagggggcgtatgtttgacgaaggtttgtgcaagtcaggcccttctggaacacagcagggcctacaacgaggggcctttgcgatgggctgtgaggatgggggtggtgggaagaattggccacgttagagaccccatgccaccccaccatggtgagtgctctgtgcctcctgctcacctgtggtgagctgggcgagctgggcgagctgggcgagctgggctggggagagcctgtgaggaccgagaggagaaatgagaagaaggaacaaaaatattatttctatgtaatttatattttacttatgccaaattatttatgataatttgccattgctatactgtaccagtgtcaaatgctgcagcctgccaagctgtgattttgtgaggcttgtccctatgtaggatgcaccgcaggcccctggccactgaaagagtgtgcagtggactgtgggtctcccatatgcggtgccgcccaaaggtggctttgcctcaagcaacctaccctgatgttttactcattggaatgtttttccccgattgtggatgacttcttttctgatggagagagtccaggagggatggaaaactcctggatttaagctcagcatcccccacatgggcttttcgatcatcttcaggcctgaagctgcacgacctgaagttcgcctgcatttatcagccctctttgtgctgctccttgccaccttggggttcctgctggggaccatgtgtggttgtggcatgtgtgagcagaagggaggatgaggaaaaagagaagaaaccccggtactgacaagctgtttttgagtgccactgtttgccatcatctaagccactgaatcaagtgtatttcaggcttatttcaacattccaatgccctggttttcctgcttgaatctgttcgtggtcaaaggtttgggggaatttgtgaccctggaacatccccagagtgaaagatggagctgggccacatcagaataaggccttggccccatcctctcacagcctaggtgctctgcaggcatgctgactgtcctgattgcgatccagcccgaaattccctcctctgctttcaaaagtcaaatcccccattcttaggccacactggtgtcacaagctcctgtcagggagctggggtttgggaatgtgctttgtgaactctgctttaaagtgaggggccgaggaaaacttagaaacaggcagagttggaagcagccaaatcacagtgggtgttgtgtgtgtgtgcgtgtgtgcatgcgtgcgtgtatgcgtgtgtgaaagcaggtggaccattccactttttagctcctattgatgcaccaaaccaagtgcctcatttctgtgccaaatgtttgccttggtcgttgtggacctccttctctaacttgcggtggcatgactgtcaggaggtgctggcattttcagcagatcctcatgtgttgaccctgatgtctttagcagaggcctctagcatctcggtttttcatccactgcaggaatgtggccacagggagcagaggtttgtactttccccaagaggtcctcatcctgagacggtctctacccatgtttaacccaaagagtgcaggccaggttccttatccttctgatgaaggatgagagagctcatttagaagtcagagcaaactagggtctcagtattgagaaacgcagcctgccagggaatcacagagacatcggggtgcccgcgatggccctcatgaagccatgcctcgacggcattcaggaagccctgcaaacgtgctttttgaactcattggccaggtgtgatttttacacaaggtaaacgtggtcaagggcatcggggaatttgctccaagcagatagctccctctgaggaaccaaaggaagcaagtttccacgatttctgaagagctggtataggaagtttctttcttccttttgtgttacatgtgcattaaacagaacaagctgtgtgtcatcacagattgtactgtgggctcagaaaccgtgagagagcccccaccgtggacaccggctctagggccacaggaaaaggaacgtttccaggcattttgtctccagggctcccgctggacaggcacgtactgccctggggagtaaatgcggagagttcacgaactgtgcccaacgcatgttatagccagggtcctactaactactcagtaaaagaacgtattgttgtattcctccagtgttaagctatagccatgttaaaagtcactgtgcatttattctcagcatcaaataccttgtaacgtcttctctgccttgttagtgcatatttttacttttctgatactgtaaagaatatatccagtatgtaaatgaatgttctataaatcttttgtatagtcattttctctgctccttaaatatcatctctattcagagtataataaaattatgaacttggtaagcctccgtgagacggtaaaaaaaaaaaaaaaataaacaaaaaaaaaaacaaaaacacaacaacaaaacaaaaagaaaaaacaaaaaaaacaaagacaaaaacagccacaccaccccccactccacacacccaaggcgggcgctcgaaaactctacagccgcagcagggtccaaccatatatacccactcgaccccgtagtaataggagaacggggcgcaccattcacggtgctcttgcttcaactacagctcaccgcgcggcgagcacctccatcggcccgacgcgagcgaaccaccacccctcccgctcatgacgaacaaccccctactgtccgtggagatcagcacgaagcgaccccagcaacaagtacgcgaccgtcggcagcaaccacaccgcgttgtgcacacacacttctgcctgcggccacaatcccgtcgctgctaaatactccggggt

SEQ ID NO: 309638 - DNA, 6555 bp, Homo sapiens
ccccgactagcccgacagtccccgactagcccgacagccccagcaggatctgcatcgtcatcgagccggcccagcttctgaagggagatgtcatggtgaaatgctaccacaagaaataccgctcggccacccgtgacgtcattttccgcctgcagtttcacactggggctgtgcagggctacgggctggtgtttgggaaggaggatctggacaatgccagcaaagatgaccgttttcctgactatgggaaggttgaattagtcttctctgccacgcctgagaagattcaagggtccgaacacttgtacaacgaccacggtgtgattgtggactacaacacaacagacccactgatacgctgggactcgtacgagaacctcagtgcagatggagaagtgctacacacgcagggccctgtcgatggcagcctttacgcgaaggtgaggaagaaaagctcctcggatcctggcatcccaggtggcccccaggcaatcccggccaccaacagcccagaccacagtgaccacaccttgtctgtcagcagtgactccggccactctacagcctctgccaggacggataagacggaagagcgcctggccccaggaaccaggaggggcctgagtgcccaggagaaggcagagttggaccagctgctcagtggctttggcctggaagatcctggaagctccctcaaggaaatgactgatgctcgaagcaagtacagtgggacccgccacgtggtgccagcccaggttcacgtgaatggagacgctgctctgaaggatcgggagacagacattctggatgacgagatgccccaccacgacctgcacagtgtggacagccttgggaccctgtcctcctcggaagggcctcagtcggcccacctgggtcccttcacctgccacaagagcagccagaactcactcctatctgacggttttggcagcaacgttggtgaagatccgcagggcaccctcgttccggacctgggccttggcatggacggcccctatgagcgggagcggacttttgggagtcgagagcccaagcagccccagcccctgctgagaaagccctcagtgtccgcccagatgcaggcctatgggcagagcagctactccacacagacctgggtgcgccagcagcagatggttgtagctcaccagtatagcttcgccccagatggggaggcccggctggtgagccgctgccctgcagacaatcctggcctcgtccaggcccagcccagagtgccactcacccccacccgagggaccagcagtagggtggctgtccagaggggtgtaggcagtgggccacatccccctgacacacagcagccctctcccagcaaagcgttcaaacccaggtttccaggagaccaggttgtgaatggagccggcccagagctgagcacaggcccctccccaggctcgcccaccctggacatcgaccagtccatcgagcagctcaacaggctgatcctggagctggatcccaccttcgagcccatccctacccacatgaacgccctcggtagccaggccaatggctctgtgtctccagacagcgtgggaggtgggctccgggcaagcagcaggctgcctgacacaggagagggccccagcagggccaccgggcggcaaggctcctctgctgaacagcccctgggcgggagactcaggaagctgagcctggggcagtacgacaacgatgctggggggcagctgcccttctccaaatgtgcatggggaaaggctggtgtggactatgccccaaacctgccgccattcccctcaccagcggacgtcaaagagacgatgacccctggctatccccaggacctcgatattatcgatggcagaattttaagtagcaaggagtccatgtgttcaactccagcatttcctgtgtctccagagacaccgtatgtgaaaacagcgctgcgccatcctccgttcagcccacctgagcccccgctgagcagcccagccagtcagcacaaaggaggacgtgaaccacgaagctgccctgagacgctcactcacgctgtggggatgtcagagagccccatcggacccaaatccacgatgctccgggctgatgcgtcctcgacgccctcctttcagcaggcttttgcttcttcctgcaccatttccagcaacggccctgggcagaggagagagagctcctcttctgcagaacgccagtgggtggagagcagccccaagcccatggtttccctgctggggagcggccggcccaccggaagtcccctcagcgctgagttctccggtaccaggaaggactccccagtgctgtcctgcttcccgccgtcagagctccaggctcctttccacagccatgagctgtccctagcagagccaccggactccctggcgcctcccagcagccaggccttcctgggcttcggcaccgccccagtgggaagtggccttccgcccgaggaggacctgggggccttgctggccaattctcatggagcgtcaccgacccccagcatcccgctgacagcgacaggggctgccgacaatggcttcctgtcccacaactttctcacggtggcgcctggacacagcagccaccacagtccaggcctgcagggccagggtgtgaccctgcccgggcagccacccctccctgagaagaagcgggcctcggagggggatcgttctttgggctcagtctctccctcctccagtggcttctccagcccgcacagcgggagcaccatcagtatccccttcccaaatgtccttcccgacttttccaaggcttcagaagcggcctcacctctgccagatagtccaggtgataaacttgtgatcgtgaaatttgttcaagacacttccaagttctggtacaaggcggatatttcaagagaacaagccatcgccatgttgaaggacaaggagccgggctcattcattgttcgagacagccattccttccgaggggcctatggcctggccatgaaggtggccacgcccccaccttcagtcctgcagctgaacaagaaagctggagatttggccaatgaactcgtccggcactttttgatcgagtgtaccccgaagggagtgcggttgaaagggtgctcgaatgaaccatatttcgggagcctgacggccttggtgtgccagcattccatcacgcccttggccttgccgtgcaagctgcttatcccagagagagatccattggaggaaatagcagaaagttctccccagacggcagccaattcagcagctgagctgttgaagcagggggcagcctgcaacgtgtggtacttgaactctgtggagatggagtccctcaccggccaccaggcgatccagaaggccctgagcatcaccctggtccaggagcctccacctgtgtccacagttgtgcacttcaaggtgtcagcccagggcatcaccctgacagacaatcagaggaagctcttcttccggaggcattaccccgtgaacagtgtgattttctgtgccttggacccacaagacaggaagtggatcaaagatggcccttcctcaaaagtctttggatttgtggcccggaagcagggcagtgccacggataatgtgtgccacctgtttgcagagcatgaccctgagcagcctgccagtgccattgtcaacttcgtatcaaaggtcatgattggttccccaaagaaggtctgagaactcccctccctccctggacccaccgatgcctctcgaagccctggagacagccgttgggtgagggtggggcccccactttttaccaaactagtaaacctgacattccaggcccatgaggggaaagaggatcttccagctctgcaaaaacaagaacaaacaacatcaccgtgaattggcctttcctgaaagtgacttatctgacacatctctgtagccacatgctttttgggtagaagaagctgggcatgggtgcaccccaccccctagggtccccatgggaaagggacatgcaaggaaacagcacagaacacgaggtggtccccatgtccctggcacactagcattctgggggatgaggaatccccagcccttgaggcagaggtgccgagtgactgccatgcttcgcccgtccgcatgggcgcttctgtccagctgcacccgaggccgggggtttccctcacctcggtcttcccaagatggagatgctaacgaaactgagaagggggcgtatgtttgacgaaggtttgtgcaagtcaggcccttctggaacacagcagggcctacaacgaggggcctttgcgatgggctgtgaggatgggggtggtgggaagaattggccacgttagagaccccatgccaccccaccatggtgagtgctctgtgcctcctgctcacctgtggtgagctgggcgagctgggcgagctgggcgagctgggctggggagagcctgtgaggaccgagaggagaaatgagaagaaggaacaaaaatattatttctatgtaatttatattttacttatgccaaattatttatgataatttgccattgctatactgtaccagtgtcaaatgctgcagcctgccaagctgtgattttgtgaggcttgtccctatgtaggatgcaccgcaggcccctggccactgaaagagtgtgcagtggactgtgggtctcccatatgcggtgccgcccaaaggtggctttgcctcaagcaacctaccctgatgttttactcattggaatgtttttccccgattgtggatgacttcttttctgatggagagagtccaggagggatggaaaactcctggatttaagctcagcatcccccacatgggcttttcgatcatcttcaggcctgaagctgcacgacctgaagttcgcctgcatttatcagccctctttgtgctgctccttgccaccttggggttcctgctggggaccatgtgtggttgtggcatgtgtgagcagaagggaggatgaggaaaaagagaagaaaccccggtactgacaagctgtttttgagtgccactgtttgccatcatctaagccactgaatcaagtgtatttcaggcttatttcaacattccaatgccctggttttcctgcttgaatctgttcgtggtcaaaggtttgggggaatttgtgaccctggaacatccccagagtgaaagatggagctgggccacatcagaataaggccttggccccatcctctcacagcctaggtgctctgcaggcatgctgactgtcctgattgcgatccagcccgaaattccctcctctgctttcaaaagtcaaatcccccattcttaggccacactggtgtcacaagctcctgtcagggagctggggtttgggaatgtgctttgtgaactctgctttaaagtgaggggccgaggaaaacttagaaacaggcagagttggaagcagccaaatcacagtgggtgttgtgtgtgtgtgcgtgtgtgcatgcgtgcgtgtatgcgtgtgtgaaagcaggtggaccattccactttttagctcctattgatgcaccaaaccaagtgcctcatttctgtgccaaatgtttgccttggtcgttgtggacctccttctctaacttgcggtggcatgactgtcaggaggtgctggcattttcagcagatcctcatgtgttgaccctgatgtctttagcagaggcctctagcatctcggtttttcatccactgcaggaatgtggccacagggagcagaggtttgtactttccccaagaggtcctcatcctgagacggtctctacccatgtttaacccaaagagtgcaggccaggttccttatccttctgatgaaggatgagagagctcatttagaagtcagagcaaactagggtctcagtattgagaaacgcagcctgccagggaatcacagagacatcggggtgcccgcgatggccctcatgaagccatgcctcgacggcattcaggaagccctgcaaacgtgctttttgaactcattggccaggtgtgatttttacacaaggtaaacgtggtcaagggcatcggggaatttgctccaagcagatagctccctctgaggaaccaaaggaagcaagtttccacgatttctgaagagctggtataggaagtttctttcttccttttgtgttacatgtgcattaaacagaacaagctgtgtgtcatcacagattgtactgtgggctcagaaaccgtgagagagcccccaccgtggacaccggctctagggccacaggaaaaggaacgtttccaggcattttgtctccagggctcccgctggacaggcacgtactgccctggggagtaaatgcggagagttcacgaactgtgcccaacgcatgttatagccagggtcctactaactactcagtaaaagaacgtattgttgtattcctccctaagtgctaggattacaggtgtgagccactgcccagccaggagaagaattctaaaaggaacacttttccttgcatggattgacataagtaattcagattccccagtgatgactactgctgtgtgcttcttggtctgttggcaacctga

SEQ ID NO: 309639 - DNA, 973 bp, Homo sapiens
gagaatgggaaactgccttgggagaagccccaagtgagcccaagggcgcagagcagaaggaccctggagtgtaagagcctagattgcaagcctggcaggaggagccggaagaattaacctcgagtctgcacgcttttaagaacaaggcctttaaaaaatccaaagtgtgtggagtttcaaactagggtctcagtattgagaaacgcagcctgccagggaatcacagagacatcggggtgcccgcgatggccctcatgaagccatgcctcgacggcattcaggaagccctgcaaacgtgctttttgaactcattggccaggtgtgatttttacacaaggtaaacgtggtcaagggcatcggggaatttgctccaagcagatagctccctctgaggaaccaaaggaagcaagtttccacgatttctgaagagctggtataggaagtttctttcttccttttgtgttacatgtgcattaaacagaacaagctgtgtgtcatcacagattgtactgtgggctcagaaaccgtgagagagcccccaccgtggacaccggctctagggccacaggaaaaggaacgtttccaggcattttgtctccagggctcccgctggacaggcacgtactgccctggggagtaaatgcggagagttcacgaactgtgcccaacgcatgttatagccagggtcctactaactactcagtaaaagaacgtattgttgtattcctccagtgttaagctatagccatgttaaaagtcactgtgcatttattctcagcatcaaataccttgtaacgtcttctctgccttgttagtgcatatttttacttttctgatactgtaaagaatatatccagtatgtaaatgaatgttctataaatcttttgtatagtcattttctctgctccttaaatatcatctctattcagagtataataaaattatgaacttggtaagcctccgtgagacggta

SEQ ID NO: 309640 - DNA, 5865 bp, Homo sapiens
ccccgactagcccgacagtccccgactagcccgacagccccagcaggatctgcatcgtcatcgagccggcccagcttctgaagggagatgtcatggtgaaatgctaccacaagaaataccgctcggccacccgtgacgtcattttccgcctgcagtttcacactggggctgtgcagggctacgggctggtgtttgggaaggaggatctggacaatgccagcaaagatgaccgttttcctgactatgggaaggttgaattagtcttctctgccacgcctgagaagattcaagggtccgaacacttgtacaacgaccacggtgtgattgtggactacaacacaacagacccactgatacgctgggactcgtacgagaacctcagtgcagatggagaagtgctacacacgcagggccctgtcgatggcagcctttacgcgaaggtgaggaagaaaagctcctcggatcctggcatcccaggtggcccccaggcaatcccggccaccaacagcccagaccacagtgaccacaccttgtctgtcagcagtgactccggccactctacagcctctgccaggacggataagacggaagagcgcctggccccaggaaccaggaggggcctgagtgcccaggagaaggcagagttggaccagctgctcagtggctttggcctggaagatcctggaagctccctcaaggaaatgactgatgctcgaagcaagtacagtgggacccgccacgtggtgccagcccaggttcacgtgaatggagacgctgctctgaaggatcgggagacagacattctggatgacgagatgccccaccacgacctgcacagtgtggacagccttgggaccctgtcctcctcggaagggcctcagtcggcccacctgggtcccttcacctgccacaagagcagccagaactcactcctatctgacggttttggcagcaacgttggtgaagatccgcagggcaccctcgttccggacctgggccttggcatggacggcccctatgagcgggagcggacttttgggagtcgagagcccaagcagccccagcccctgctgagaaagccctcagtgtccgcccagatgcaggcctatgggcagagcagctactccacacagacctgggtgcgccagcagcagatggttgtagctcaccagtatagcttcgccccagatggggaggcccggctggtgagccgctgccctgcagacaatcctggcctcgtccaggcccagcccagagtgccactcacccccacccgagggaccagcagtagggtggctgtccagaggggtgtaggcagtgggccacatccccctgacacacagcagccctctcccagcaaagcgttcaaacccaggtttccaggagaccaggttgtgaatggagccggcccagagctgagcacaggcccctccccaggctcgcccaccctggacatcgaccagtccatcgagcagctcaacaggctgatcctggagctggatcccaccttcgagcccatccctacccacatgaacgccctcggtagccaggccaatggctctgtgtctccagacagcgtgggaggtgggctccgggcaagcagcaggctgcctgacacaggagagggccccagcagggccaccgggcggcaaggctcctctgctgaacagcccctgggcgggagactcaggaagctgagcctggggcagtacgacaacgatgctggggggcagctgcccttctccaaatgtgcatggggaaaggctggtgtggactatgccccaaacctgccgccattcccctcaccagcggacgtcaaagagacgatgacccctggctatccccaggacctcgatattatcgatggcagaattttaagtagcaaggagtccatgtgttcaactccagcatttcctgtgtctccagagacaccgtatgtgaaaacagcgctgcgccatcctccgttcagcccacctgagcccccgctgagcagcccagccagtcagcacaaaggaggacgtgaaccacgaagctgccctgagacgctcactcacgctgtggggatgtcagagagccccatcggacccaaatccacgatgctccgggctgatgcgtcctcgacgccctcctttcagcaggcttttgcttcttcctgcaccatttccagcaacggccctgggcagaggagagagagctcctcttctgcagaacgccagtgggtggagagcagccccaagcccatggtttccctgctggggagcggccggcccaccggaagtcccctcagcgctgagttctccggtaccaggaaggactccccagtgctgtcctgcttcccgccgtcagagctccaggctcctttccacagccatgagctgtccctagcagagccaccggactccctggcgcctcccagcagccaggccttcctgggcttcggcaccgccccagtgggaagtggccttccgcccgaggaggacctgggggccttgctggccaattctcatggagcgtcaccgacccccagcatcccgctgacagcgacaggggctgccgacaatggcttcctgtcccacaactttctcacggtggcgcctggacacagcagccaccacagtccaggcctgcagggccagggtgtgaccctgcccgggcagccacccctccctgagaagaagcgggcctcggagggggatcgttctttgggctcagtctctccctcctccagtggcttctccagcccgcacagcgggagcaccatcagtatccccttcccaaatgtccttcccgacttttccaaggcttcagaagcggcctcacctctgccagatagtccaggtgataaacttgtgatcgtgaaatttgttcaagacacttccaagttctggtacaaggcggatatttcaagagaacaagccatcgccatgttgaaggacaaggagccgggctcattcattgttcgagacagccattccttccgaggggcctatggcctggccatgaaggtggccacgcccccaccttcagtcctgcagctgaacaagaaagctggagatttggccaatgaactcgtccggcactttttgatcgagtgtaccccgaagggagtgcggttgaaagggtgctcgaatgaaccatatttcgggagcctgacggccttggtgtgccagcattccatcacgcccttggccttgccgtgcaagctgcttatcccagagagagatccattggaggaaatagcagaaagttctccccagacggcagccaattcagcagctgagctgttgaagcagggggcagcctgcaacgtgtggtacttgaactctgtggagatggagtccctcaccggccaccaggcgatccagaaggccctgagcatcaccctggtccaggagcctccacctgtgtccacagttgtgcacttcaaggtgtcagcccagggcatcaccctgacagacaatcagaggaagctcttcttccggaggcattaccccgtgaacagtgtgattttctgtgccttggacccacaagacaggaagtggatcaaagatggcccttcctcaaaagtctttggatttgtggcccggaagcagggcagtgccacggataatgtgtgccacctgtttgcagagcatgaccctgagcagcctgccagtgccattgtcaacttcgtatcaaaggtcatgattggttccccaaagaaggtctgagaactcccctccctccctggacccaccgatgcctctcgaagccctggagacagccgttgggtgagggtggggcccccactttttaccaaactagtaaacctgacattccaggcccatgaggggaaagaggatcttccagctctgcaaaaacaagaacaaacaacatcaccgtgaattggcctttcctgaaagtgacttatctgacacatctctgtagccacatgctttttgggtagaagaagctgggcatgggtgcaccccaccccctagggtccccatgggaaagggacatgcaaggaaacagcacagaacacgaggtggtccccatgtccctggcacactagcattctgggggatgaggaatccccagcccttgaggcagaggtgccgagtgactgccatgcttcgcccgtccgcatgggcgcttctgtccagctgcacccgaggccgggggtttccctcacctcggtcttcccaagatggagatgctaacgaaactgagaagggggcgtatgtttgacgaaggtttgtgcaagtcaggcccttctggaacacagcagggcctacaacgaggggcctttgcgatgggctgtgaggatgggggtggtgggaagaattggccacgttagagaccccatgccaccccaccatggtgagtgctctgtgcctcctgctcacctgtggtgagctgggcgagctgggcgagctgggcgagctgggctggggagagcctgtgaggaccgagaggagaaatgagaagaaggaacaaaaatattatttctatgtaatttatattttacttatgccaaattatttatgataatttgccattgctatactgtaccagtgtcaaatgctgcagcctgccaagctgtgattttgtgaggcttgtccctatgtaggatgcaccgcaggcccctggccactgaaagagtgtgcagtggactgtgggtctcccatatgcggtgccgcccaaaggtggctttgcctcaagcaacctaccctgatgttttactcattggaatgtttttccccgattgtggatgacttcttttctgatggagagagtccaggagggatggaaaactcctggatttaagctcagcatcccccacatgggcttttcgatcatcttcaggcctgaagctgcacgacctgaagttcgcctgcatttatcagccctctttgtgctgctccttgccaccttggggttcctgctggggaccatgtgtggttgtggcatgtgtgagcagaagggaggatgaggaaaaagagaagaaaccccggtactgacaagctgtttttgagtgccactgtttgccatcatctaagccactgaatcaagtgtatttcaggcttatttcaacattccaatgccctggttttcctgcttgaatctgttcgtggtcaaaggtttgggggaatttgtgaccctggaacatccccagagtgaaagatggagctgggccacatcagaataaggccttggccccatcctctcacagcctaggtgctctgcaggcatgctgactgtcctgattgcgatccagcccgaaattccctcctctgctttcaaaagtcaaatcccccattcttaggccacactggtgtcacaagctcctgtcagggagctggggtttgggaatgtgctttgtgaactctgctttaaagtgaggggccgaggaaaacttagaaacaggcagagttggaagcagccaaatcacagtgggtgttgtgtgtgtgtgcgtgtgtgcatgcgtgcgtgtatgcgtgtgtgaaagcaggtggaccattccactttttagctcctattgatgcaccaaaccaagtgcctcatttcttgtgcccaacgcatgttatagccagggtcctactaactactcagtaaaagaacgtattgttgtattcctccagtgttaagctatagccatgttaaaagtcactgtgcatttattctcagcatcaaataccttgtaacgtcttctctgccttgttagtgcatatttttacttttctgatactgtaaagaatatatccagtatgtaaatgaatgttctataaatcttttgtatagtcattttctctgctccttaaatatcatctctattcagagtataataaaattatgaacttggtaagcctccgtgagacggta

SEQ ID NO: 309641 - DNA, 4225 bp, Homo sapiens
ccccgactagcccgacagtccccgactagcccgacagccccagcaggatctgcatcgtcatcgagccggcccagcttctgaagggagatgtcatggtgaaatgctaccacaagaaataccgctcggccacccgtgacgtcattttccgcctgcagtttcacactggggctgtgcagggctacgggctggtgtttgggaaggaggatctggacaatgccagcaaagatgaccgttttcctgactatgggaaggttgaattagtcttctctgccacgcctgagaagattcaagggtccgaacacttgtacaacgaccacggtgtgattgtggactacaacacaacagacccactgatacgctgggactcgtacgagaacctcagtgcagatggagaagtgctacacacgcagggccctgtcgatggcagcctttacgcgaaggtgaggaagaaaagctcctcggatcctggcatcccaggtggcccccaggcaatcccggccaccaacagcccagaccacagtgaccacaccttgtctgtcagcagtgactccggccactctacagcctctgccaggacggataagacggaagagcgcctggccccaggaaccaggaggggcctgagtgcccaggagaaggcagagttggaccagctgctcagtggctttggcctggaagatcctggaagctccctcaaggaaatgactgatgctcgaagcaagtacagtgggacccgccacgtggtgccagcccaggttcacgtgaatggagacgctgctctgaaggatcgggagacagacattctggatgacgagatgccccaccacgacctgcacagtgtggacagccttgggaccctgtcctcctcggaagggcctcagtcggcccacctgggtcccttcacctgccacaagagcagccagaactcactcctatctgacggttttggcagcaacgttggtgaagatccgcagggcaccctcgttccggacctgggccttggcatggacggcccctatgagcgggagcggacttttgggagtcgagagcccaagcagccccagcccctgctgagaaagccctcagtgtccgcccagatgcaggcctatgggcagagcagctactccacacagacctgggtgcgccagcagcagatggttgtagctcaccagtatagcttcgccccagatggggaggcccggctggtgagccgctgccctgcagacaatcctggcctcgtccaggcccagcccagagtgccactcacccccacccgagggaccagcagtagggtggctgtccagaggggtgtaggcagtgggccacatccccctgacacacagcagccctctcccagcaaagcgttcaaacccaggtttccaggagaccaggttgtgaatggagccggcccagagctgagcacaggcccctccccaggctcgcccaccctggacatcgaccagtccatcgagcagctcaacaggctgatcctggagctggatcccaccttcgagcccatccctacccacatgaacgccctcggtagccaggccaatggctctgtgtctccagacagcgtgggaggtgggctccgggcaagcagcaggctgcctgacacaggagagggccccagcagggccaccgggcggcaaggctcctctgctgaacagcccctgggcgggagactcaggaagctgagcctggggcagtacgacaacgatgctggggggcagctgcccttctccaaatgtgcatggggaaaggctggtgtggactatgccccaaacctgccgccattcccctcaccagcggacgtcaaagagacgatgacccctggctatccccaggacctcgatattatcgatggcagaattttaagtagcaaggagtccatgtgttcaactccagcatttcctgtgtctccagagacaccgtatgtgaaaacagcgctgcgccatcctccgttcagcccacctgagcccccgctgagcagcccagccagtcagcacaaaggaggacgtgaaccacgaagctgccctgagacgctcactcacgctgtggggatgtcagagagccccatcggacccaaatccacgatgctccgggctgatgcgtcctcgacgccctcctttcagcaggcttttgcttcttcctgcaccatttccagcaacggccctgggcagaggagagagagctcctcttctgcagaacgccagtgggtggagagcagccccaagcccatggtttccctgctggggagcggccggcccaccggaagtcccctcagcgctgagttctccggtaccaggaaggactccccagtgctgtcctgcttcccgccgtcagagctccaggctcctttccacagccatgagctgtccctagcagagccaccggactccctggcgcctcccagcagccaggccttcctgggcttcggcaccgccccagtgggaagtggccttccgcccgaggaggacctgggggccttgctggccaattctcatggagcgtcaccgacccccagcatcccgctgacagcgacaggggctgccgacaatggcttcctgtcccacaactttctcacggtggcgcctggacacagcagccaccacagtccaggcctgcagggccagggtgtgaccctgcccgggcagccacccctccctgagaagaagcgggcctcggagggggatcgttctttgggctcagtctctccctcctccagtggcttctccagcccgcacagcgggagcaccatcagtatccccttcccaaatgtccttcccgacttttccaaggcttcagaagcggcctcacctctgccagatagtccaggtgataaacttgtgatcgtgaaatttgttcaagacacttccaagttctggtacaaggcggatatttcaagagaacaagccatcgccatgttgaaggacaaggagccgggctcattcattgttcgagacagccattccttccgaggggcctatggcctggccatgaaggtggccacgcccccaccttcagtcctgcagctgaacaagaaagctggagatttggccaatgaactcgtccggcactttttgatcgagtgtaccccgaagggagtgcggttgaaagggtgctcgaatgaaccatatttcgggagcctgacggccttggtgtgccagcattccatcacgcccttggccttgccgtgcaagctgcttatcccagagagagatccattggaggaaatagcagaaagttctccccagacggcagccaattcagcagctgagctgttgaagcagggggcagcctgcaacgtgtggtacttgaactctgtggagatggagtccctcaccggccaccaggcgatccagaaggccctgagcatcaccctggtccaggagcctccacctgtgtccacagttgtgcacttcaaggtgtcagcccagggcatcaccctgacagacaatcagaggaagctcttcttccggaggcattaccccgtgaacagtgtgattttctgtgccttggacccacaagacaggaagtggatcaaagatggcccttcctcaaaagtctttggatttgtggcccggaagcagggcagtgccacggataatgtgtgccacctgtttgcagagcatgaccctgagcagcctgccagtgccattgtcaacttcgtatcaaaggtcatgattggttccccaaagaaggtctgagaactcccctccctccctggacccaccgatgcctctcgaagccctggagacagccgttgggtgagggtggggcccccactttttaccaaactagtaaacctgacattccaggcccatgaggggaaagaggatcttccagctctgcaaaaacaagaacaaacaacatcaccgtgaattggcctttcctgaaagtgacttatctgacacatctctgtagccacatgctttttgggtagaagaagctgggcatgggtgcaccccaccccctagggtccccatgggaaagggacatgcaaggaaacagcacagaacacgaggtggtccccatgtccctggcacactagcattctgggggatgaggaatccccagcccttgaggcagaggtgccgagtgactgccatgcttcgcccgtccgcatgggcgcttctgtccagctgcacccgaggccgggggtttccctcacctcggtcttcccaagatggagatgctcaaagatctttggggatcctctgaa

SEQ ID NO: 309642 - DNA, 889 bp, Homo sapiens
gagaatgggaaactgccttgggagaagccccaagtgagcccaagggcgcagagcagaaggaccctggagtgtaagagcctagattgcaagcctggcaggaggagccggaagaattaacctcgagtctgcacgcttttaagaacaaggcctttaaaaaatccaaagtgtgtggagtttgcaaacaaattattgacggtcaaggtatttcatgccgagcctgcaagtattcctgccacaagaaatgtgaagccaaggtggtgattccctgcggtgtgcaagtccgactggaacaggctccagggagttccacgctgtccagttctctctgccgtgataaacctctgcggcccgtcatcctgagtcccaccatggaggagggccatgggctggacctcacttacatcacggagcgcatcatcgctgtgtccttccctgccggctgctctgaggagtcctacctgcacaacctacaggaggtcacgcgcatgctcaagtccaagcacggggacaactacctggtattaaacctttcagaaaagagatatgaccttacgaagcttaacccaaagatcatggatgtgggctggccagagctccacgcaccgcccctggataagatgtgtaccatatgcaaggcgcaggagtcctggctgaacagcaacctccagcatgtggtcgtcattcactgcaggggcgggaaaggacgcataggagtggtcatatcatcctacatgcatttcaccaacgtctcagccagcgccgaccaggcccttgacaggtttgcaatgaagaagttttatgatgacaaagtttcagctttaatgcagccttcccaaaaacggtatgttcagttcctcagtgggctcctgtccggatcggtgaaaatgaa

SEQ ID NO: 309643 - DNA, 828 bp, Homo sapiens
aggtggcgacctctgcacatggaggatgctgaattctacaacgcggttcaagggccgcaatgacctgatggagtacgcaaagcaacacgggattcccatcccggtcactcccaagaacccgtggagcatggatgagaacctcatgcacatcacggagcgcatcatcgctgtgtccttccctgccggctgctctgaggagtcctacctgcacaacctacaggaggtcacgcgcatgctcaagtccaagcacggggacaactacctggtattaaacctttcagaaaagagatatgaccttacgaagcttaacccaaagatcatggatgtgggctggccagagctccacgcaccgcccctggataagatgtgtaccatatgcaaggcgcaggagtcctggctgaacagcaacctccagcatgtggtcgtcattcactgcaggggcgggaaaggacgcataggagtggtcatatcatcctacatgcatttcaccaacgtctcagccaggtaggatgaagatgtcagctcgctgtcttgaggtgctaaaagctgggcctgcatggggctgaaggctgtctgcgcgggagctgttctggataccaagggctcggctgacctgtgtttcccattccccagtgctgggttggtcagtgcctagaaacccagtttccagttaagcgtttacacttgtgaaagtggcattttccaggttgggtgactgtgtgattgattctaagtacttccatggaggcattaaaaaaataagtgaccccactgtcccttgttctttaatagagaattctctaacaaaaaataacagagataaaagtc

SEQ ID NO: 309644 - DNA, 602 bp, Homo sapiens
ccccgactagcccgacagtccccgactagcccgacagccccagcaggatctgcatcgtcatcgagccggcccagcttctgaagggagatgtcatggtgaaatgctaccacaagaaataccgctcggccacccgtgacgtcattttccgcctgcagtttcacactggggctgtgcagggctacgggctggtgtttgggaaggaggatctggacaatgccagcaaagatgaccgttttcctgactatgggaaggttgaattagtcttctctgccacgcctgagaagattcaagggtccgaacacttgtacaacgaccacggtgtgattgtggactacaacacaacagacccactgatacgctgggactcgtacgagaacctcagtgcagatggagaaggtgcgtgtgttcatcttgtgtgcagttatggaggcaaagggcacagggaagacagcccactcaaatatctgaagtattttgcagtctgctaagaagaaaaaatttcccctgttttctcagaggtccagaatcacaccttcgtgtgacacagttgtgagttttgagggtcttcgtgagaataaggcatggtgagtttgggtcagggc

SEQ ID NO: 309645 - DNA, 510 bp, Homo sapiens
acgagcttgttggaaagatgacttgagcaatccacacaaagcacagtgcagccttaggcatcattgttattagagctttgttaagaagcattgtgcaggggtaatatatatggttgaagttggagttggcttgatgtcaaccctcctgattcaagatccaacaaactgtatgctttagtctttatataatttggtaatgatgtgtctatgataagaatgataaacagttccatttacttacctctcaactatcttgtggaactttatacttctttgaagttttacacaaagctgcacactaatctaacataccagttgctaaaaagataagggctcagcctttgcatccgtttcattccagctgataaattggctgagcacacaacatctacagcagttgttgactcttgtttgctgtctgtccactttgcagggagcctgacggccttggtgtgccagcattccatcacgcccttggccttgccgtgcaagctgcttatcccagagaga

SEQ ID NO: 309646 - DNA, 388 bp, Homo sapiens
caggctgatcctggagctggatcccaccttcgagcccatccctacccacatgaacgccctcggtagccaggccaatggctctgtgtctccagacagcgtgggaggtgggctccgggcaagcagcaggctgcctgacacaggagagggccccagcagggccaccgggcggcaaggtgagctgggtctccatgggaggtgctccacgggaggtgctccacgggaggctaatgtgtgatgagaaatcagcctagtaggttagcttttggcgaaatccacaagggagggacatttcccttgcagtttcaactcttgtgaattttggcctaggatccaaatgctgtcatgctggtgtggtcccttggtaggagatttggaggatgggaagaac

SEQ ID NO: 309647 - DNA, 422 bp, Homo sapiens
cctccctgaaggtccctcaactgcatggacatgtagttcttccagccaagcagagggatcccggccaggtccccactgatccagtttgcaaaaagagtaaggggagaggacctacccaaggttatgagtgggcatagacctttgtccacccggcagaccttcttgtctttctcctccctttctccagccatcgccatgttgaaggacaaggagccgggctcattcattgttcgagacagccattccttccgaggggcctatggcctggccatgaaggtggccacgcccccaccttcagtcctgcagctgaacaagaaaggtaaggttactgctccctattgatctgttcagctcatccacagagaaactctgttggtttatttttaggctaataaaataaaagatgactttaacaatactca

SEQ ID NO: 309648 - DNA, 1670 bp, Homo sapiens
tttgagatggactcgctctgtcgtccaggctggagtgtgcagtggcatgatctcggctcactgcaacctccacctcccggactcaagcaattctcctgtctcagcctcccgagtagctgggactacaggcacgcgccaccatgcccagctaatttttgtatttttagtagagacggggtttcaccatattggtcaggccggtcttgaactcctgacctcaggtgatccgcccgcctccgccttcgaagtgctgggaatacaggcatgagccactgcgtctggcctctttttttgttcccgttatcacactgataacattgaattgcaatcttttacttacacatcttccttactaaacagagcttataaagatcagagatcctctattttcccccttaatctttttaatgtatataaacaatggaatgaataaatcaatgaatgaatgtctgaggaaacttaactacaccaaagtgtattggcagactaccagactttttaaacagctttattaagatataattcacaaaccatacagttcatagggtggtgcaaccgccaacacaatctaattttaaactatgtttatgctgctacgagaaagcctatacccataagcagtcattttctattccccacccccaaacccactccttagccctaggcaaccactaatctactttctcagaccgataactttagcataggtataaatcgatcacagagcctcaaaatccacccgatatctgggccatgatgtgaaatttggtaggtaatcgtcccacgttatcaacttgtaaagtagaaatggaagtgggggggaaaactcagccgccagtggcgtttgtgaaaagcacctggtaacaggctgtgctggaggggagttcagcccctagaaaagatcacggattaggaattacataagcataggtctcgggtccttttattttggacgcgatcctttcacgggatcgcctccggatgggagccggatgggatcccggacgggatcgtctcgctgggagccatgcaggaaaccgcaagagtcagaaacaggcgttgaaggcaggcagcattttccaaaacagctgtgtctcgggagctgccgggctgtagcgtctccccgagtcgcgcgcgcatgacgtggcgggcgcgcgatgacgcgacgcgtggcgcggtgcacgctgggatatttaagtctcctccgcggcgcggagccgcgatgtctccggcggctgcggcggctggagcaggcgagcggcggcggccgatagcgagtgtcagggccggccggggcggcgcttctcggcctgtcgctggtcggcctcctactgtacctcgtgcctgctgcggctgcgctggcctggctggccgtggggactaccgcggcctggtggggactgagccgcgagccccgaggttcgcgccccttgtcctccttcgttcagaaggcgcgacatcggcgaacactgttcgcttcgcctccggccaagtcgacagccaacggaaacctcctagagccgcggaccctgctcgaaggacctgaccctgccgaactgctcctcatgggcagttacctgggcaagcccgggccgccgcagcccgcccccgctccggagggccaggacctgcggaataggcctggcggcggccacccgcccgcccggcgc

SEQ ID NO: 309649 - DNA, 1696 bp, Homo sapiens
tttgagatggactcgctctgtcgtccaggctggagtgtgcagtggcatgatctcggctcactgcaacctccacctcccggactcaagcaattctcctgtctcagcctcccgagtagctgggactacaggcacgcgccaccatgcccagctaatttttgtatttttagtagagacggggtttcaccatattggtcaggccggtcttgaactcctgacctcaggtgatccgcccgcctccgccttcgaagtgctgggaatacaggcatgagccactgcgtctggcctctttttttgttcccgttatcacactgataacattgaattgcaatcttttacttacacatcttccttactaaacagagcttataaagatcagagatcctctattttcccccttaatctttttaatgtatataaacaatggaatgaataaatcaatgaatgaatgtctgaggaaacttaactacaccaaagtgtattggcagactaccagactttttaaacagctttattaagatataattcacaaaccatacagttcatagggtggtgcaaccgccaacacaatctaattttaaactatgtttatgctgctacgagaaagcctatacccataagcagtcattttctattccccacccccaaacccactccttagccctaggcaaccactaatctactttctcagaccgataactttagcataggtataaatcgatcacagagcctcaaaatccacccgatatctgggccatgatgtgaaatttggtaggtaatcgtcccacgttatcaacttgtaaagtagaaatggaagtgggggggaaaactcagccgccagtggcgtttgtgaaaagcacctggtaacaggctgtgctggaggggagttcagcccctagaaaagatcacggattaggaattacataagcataggtctcgggtccttttattttggacgcgatcctttcacgggatcgcctccggatgggagccggatgggatcccggacgggatcgtctcgctgggagccatgcaggaaaccgcaagagtcagaaacaggcgttgaaggcaggcagcattttccaaaacagctgtgtctcgggagctgccgggctgtagcgtctccccgagtcgcgcgcgcatgacgtggcgggcgcgcgatgacgcgacgcgtggcgcggtgcacgctgggatatttaagtctcctccgcggcgcggagccgcgatgtctccggcggctgcggcggctggagcaggcgagcggcggcggccgatagcgagtgtcagggacggccggggccggggctgcggcgggccggccggggcggcgcttctcggcctgtcgctggtcggcctcctactgtacctcgtgcctgctgcggctgcgctggcctggctggccgtggggactaccgcggcctggtggggactgagccgcgagccccgaggttcgcgccccttgtcctccttcgttcagaaggcgcgacatcggcgaacactgttcgcttcgcctccggccaagtcgacagccaacggaaacctcctagagccgcggaccctgctcgaaggacctgaccctgccgaactgctcctcatgggcagttacctgggcaagcccgggccgccgcagcccgcccccgctccggagggccaggacctgcggaataggcctggcggcggccacccgcccgcccggcgc

SEQ ID NO: 309650 - DNA, 1652 bp, Homo sapiens
tttgagatggactcgctctgtcgtccaggctggagtgtgcagtggcatgatctcggctcactgcaacctccacctcccggactcaagcaattctcctgtctcagcctcccgagtagctgggactacaggcacgcgccaccatgcccagctaatttttgtatttttagtagagacggggtttcaccatattggtcaggccggtcttgaactcctgacctcaggtgatccgcccgcctccgccttcgaagtgctgggaatacaggcatgagccactgcgtctggcctctttttttgttcccgttatcacactgataacattgaattgcaatcttttacttacacatcttccttactaaacagagcttataaagatcagagatcctctattttcccccttaatctttttaatgtatataaacaatggaatgaataaatcaatgaatgaatgtctgaggaaacttaactacaccaaagtgtattggcagactaccagactttttaaacagctttattaagatataattcacaaaccatacagttcatagggtggtgcaaccgccaacacaatctaattttaaactatgtttatgctgctacgagaaagcctatacccataagcagtcattttctattccccacccccaaacccactccttagccctaggcaaccactaatctactttctcagaccgataactttagcataggtataaatcgatcacagagcctcaaaatccacccgatatctgggccatgatgtgaaatttggtaggtaatcgtcccacgttatcaacttgtaaagtagaaatggaagtgggggggaaaactcagccgccagtggcgtttgtgaaaagcacctggtaacaggctgtgctggaggggagttcagcccctagaaaagatcacggattaggaattacataagcataggtctcgggtccttttattttggacgcgatcctttcacgggatcgcctccggatgggagccggatgggatcccggacgggatcgtctcgctgggagccatgcaggaaaccgcaagagtcagaaacaggcgttgaaggcaggcagcattttccaaaacagctgtgtctcgggagctgccgggctgtagcgtctccccgagtcgcgcgcgcatgacgtggcgggcgcgcgatgacgcgacgcgtggcgcggtgcacgctgggatatttaagtctcctccgcggcgcggagccgcgatgtctccggcggctgcggcggctggagcaggcgagcggcggcggccgatagcgagtgtcagggacggccggggccggggctgcggcgggccggccggggcggcgcttctcggctgcgctggcctggctggccgtggggactaccgcggcctggtggggactgagccgcgagccccgaggttcgcgccccttgtcctccttcgttcagaaggcgcgacatcggcgaacactgttcgcttcgcctccggccaagtcgacagccaacggaaacctcctagagccgcggaccctgctcgaaggacctgaccctgccgaactgctcctcatgggcagttacctgggcaagcccgggccgccgcagcccgcccccgctccggagggccaggacctgcggaataggcctggcggcggccacccgcccgcccggcgc

SEQ ID NO: 309651 - DNA, 225 bp, Homo sapiens
ctgcaccttcttctcatctctctgagttgccccagaggcatctatacctttccaacttttctatccccaaaacaccctaatctccagcgatactgaacaattccatctctggacttctgcacagtgctccttcatcttccttgaacctgccagacctctcagctccaggagcacttccctgccttccttcccctttatcacaacttttttttttttttttttttt

SEQ ID NO: 309652 - DNA, 895 bp, Homo sapiens
gaagctgtccctttaaaactcgagcaagctaccaggcaaactccgcctccagggaggttccttattaaataggagccaactggctgggtcggggctcaataccccaagcaatacctgcaactgaggattcttcccggggagaccgcagcccatcggcatggctcaagagtttgtgaactgcaaaatccagcctgggaaggtggttgtgttcatcaagcccacctgcccgtactgcaggagggcccaagagatcctcagtcaattgcccatcaaacaagggcttctggaatttgtcgatatcacagccaccaaccacactaacgagattcaagattatttgcaacagctcacgggagcaagaacggtgcctcgagtctttattggtaaagattgtataggcggatgcagtgatctagtctctttgcaacagagtggggaactgctgacgcggctaaagcagattggagctctgcagtaaccacagatctcataggaaatgttcaacaattctgtgaaaggtcacaggacccaattggagaaatcatatgaaaagcatagttggtcttggtgtcatatggatcagaggcacaagtgcagaggctgtggtcatgcggaacactctgttatttaagatggctatccagataatcctgaacactgtgtatttattttatttagactaccagcaaagattaaagcatgaaatgtaaaacatctgataaaacttacagccccctacaccaagagtgtatctgtgaaagagctcctacactttgaaaacttaagaatcccttatcatgaagtttgcctgttctagaattgtaagattgttaatttccttcaatctctagtgacaacacttaatttcttttctaataaaaaaaacctatagatg

SEQ ID NO: 309653 - DNA, 1049 bp, Homo sapiens
gaagctgtccctttaaaactcgagcaagctaccaggcaaactccgcctccagggaggttccttattaaataggagccaactggctgggtcggggctcaataccccaagcaatacctgcaactgaggattcttcccggggagaccgcagcccatcggcatggctcaagagtttgtgaactgcaaaatccagcctgggaaggtggttgtgttcatcaagcccacctgcccgtactgcaggagggcccaagagatcctcagtcaattgcccatcaaacaagggcttctggaatttgtcgatatcacagccaccaaccacactaacgagattcaagattatttgcaacagctcacgggagcaagaacggtgcctcgagtctttattggtaaagattgtataggcggatgcagtgatctagtctctttgcaacagagtggggaactgctgacgcggctaaagcagattggagctctgcagtaaccacagatctcataggaaatgttcaacaattctgtgaaaggtcacaggacccaattggagaaatcatatgaaaagcatagttggtcttggtgtcatatggatcagaggcacaagtgcagaggctgtggtcatgcggaacactctgttatttaagatggctatccagataatcctgaacactgtgtatttattttatttagactaccagcaaagattaaagcatgaaatgtaaaacatctgataaaacttacagccccctacaccaagagtgtatctgtgaaagagctcctacactttgaaaacttaagaatcccttatcatgaagtttgcctgttctagaattgtaagattgttaatttccttcaatctctagtgacaacacttaatttcttttctaataaaaaaaacctatagatgattcagtgatttttgtccaattcatttccatgttctcaagacattaaggaatgttatgcgaaatacactaacttaaaactgtgtttatattttgccctgccattataaataaagacacgtgctgctgtcactcactgagtacaaatggctgata

SEQ ID NO: 309654 - DNA, 947 bp, Homo sapiens
gaagctgtccctttaaaactcgagcaagctaccaggcaaactccgcctccagggaggttccttattaaataggagccaactggctgggtcggggctcaataccccaagcaatacctgcaactgaggattcttcccggggagaccgcagcccatcggcatggctcaagagtttgtgaactgcaaaatccagcctgggaaggtggttgtgttcatcaagcccacctgcccgtactgcaggagggcccaagagatcctcagtcaattgcccatcaaacaagggcttctggaatttgtcgatatcacagccaccaaccacactaacgagattcaagattatttgcaacagctcacgggagcaagaacggtgcctcgagtctttattggtaaagattgtataggcggatgcagtgatctagtctctttgcaacagagtggggaactgctgacgcggctaaagcagattggagctctgcagtaaccacagatctcataggaaatgttcaacaattctgtgaaaggtcacaggacccaattggagaaatcatatgaaaagcatagttggtcttggtgtcatatggatcagaggcacaagtgcagaggctgtggtcatgcggaacactctgttatttaagatggctatccagataatcctgaacactgtgtatttattttatttagactaccagcaaagattaaagcatgaaatgtaaaacatctgataaaacttacagccccctacaccaagagtgtatctgtgaaagagctcctacactttgaaaacttaagaatcccttatcatgaagtttgcctgttctagaattgtaagattgttaatttccttcaatctctagtgacaacacttaatttcttttctaataaaaaaaacctatagatgcacaacacaacaacaaccaacaacattcgccgccctcccccaaaacttgaac

SEQ ID NO: 309655 - DNA, 922 bp, Homo sapiens
gaagctgtccctttaaaactcgagcaagctaccaggcaaactccgcctccagggaggttccttattaaataggagccaactggctgggtcggggctcaataccccaagcaatacctgcaactgaggattcttcccggggagaccgcagcccatcggcatggctcaagagtttgtgaactgcaaaatccagcctgggaaggtggttgtgttcatcaagcccacctgcccgtactgcaggagggcccaagagatcctcagtcaattgcccatcaaacaagggcttctggaatttgtcgatatcacagccaccaaccacactaacgagattcaagattatttgcaacagctcacgggagcaagaacggtgcctcgagtctttattggtaaagattgtataggcggatgcagtgatctagtctctttgcaacagagtggggaactgctgacgcggctaaagcagattggagctctgcagtaaccacagatctcataggaaatgttcaacaattctgtgaaaggtcacaggacccaattggagaaatcatatgaaaagcatagttggtcttggtgtcatatggatcagaggcacaagtgcagaggctgtggtcatgcggaacactctgttatttaagatggctatccagataatcctgaacactgtgtatttattttatttagactaccagcaaagattaaagcatgaaatgtaaaacatctgataaaacttacagccccctacaccaagagtgtatctgtgaaagagctcctacactttgaaaacttaagaatcccttatcatgaagttgcggtctaaaatggagatggtaattcttatcctatgaaacttaatttttttataaaaactttgagttccgggtttggcacacatcccggtccgactaggggtggcaaacaccttagg

SEQ ID NO: 309656 - DNA, 975 bp, Homo sapiens
gaagctgtccctttaaaactcgagcaagctaccaggcaaactccgcctccagggaggttccttattaaataggagccaactggctgggtcggggctcaataccccaagcaatacctgcaactgaggattcttcccggggagaccgcagcccatcggcatggctcaagagtttgtgaactgcaaaatccagcctgggaaggtggttgtgttcatcaagcccacctgcccgtactgcaggagggcccaagagatcctcagtcaattgcccatcaaacaagggcttctggaatttgtcgatatcacagccaccaaccacactaacgagattcaagattatttgcaacagctcacgggagcaagaacggtgcctcgagtctttattggtaaagattgtataggcggatgcagtgatctagtctctttgcaacagagtggggaactgctgacgcggctaaagcagattggagctctgcagtaaccacagatctcataggaaatgttcaacaattctgtgaaaggtcacaggacccaattggagaaatcatatgaaaagcatagttggtcttggtgtcatatggatcagaggcacaagtgcagaggctgtggtcatgcggaacactctgttatttaagatggctatccagataatcctgaacactgtgtatttattttatttagactaccagcaaagattaaagcatgaaatgtaaaacatctgataaaacttacagccccctacaccaagagtgtatctgtgaaagagctcctacactttgaaaattagatccttataggagtgccgtctaaatggagatgtattcctattcctgggcacttatttttcaaaaaaaaaaaaaaaaatttggggcccccaaaagttaacatgtgggccggccggagaaagtaaattcaaacgccgaggggttcaccaaccggggggaaaagttgtgttactctcttcctgcggggggggca

SEQ ID NO: 309657 - DNA, 1617 bp, Homo sapiens
gaagctgtccctttaaaactcgagcaagctaccaggcaaactccgcctccagggaggttccttattaaataggagccaactggctgggtcggggctcaataccccaagcaatacctgcaactgaggattcttcccggggagaccgcagcccatcggcatggctcaagagtttgtgaactgcaaaatccagcctgggaaggtggttgtgttcatcaagcccacctgcccgtactgcaggagggcccaagagatcctcagtcaattgcccatcaaacaagggcttctggaatttgtcgatatcacagccaccaaccacactaacgagattcaagattatttgcaacagctcacgggagcaagaacggtgcctcgagtctttattggtaaagattgtataggcggatgcagtgatctagtctctttgcaacagagtggggaactgctgacgcggctaaagcagattggagctctgcagtaaccacagaacaggccccatgctgacgtccctcctcaagagctggatggcattgcaaatgatgacagcacttctggtggatgaatttgggggcacaaacagcttttttcctcttttggctcagtatttaaaagtggaccaacttgctcttaatcacagggccaagaaggttgacgggccatcttggttttcttctggatgtgctctttggttttcagaagactgtgacaagttctggcccaggattcgctcactgaccctcaattgtcctctttggcatgcgtttcttactgttctccatgtgtcggcatgtctctacctctaagccagtgtttttcaactatgtttatccagactccttctccacaatgatgaatccacagttggttatctgctactgcccattagctaaaatcattttgctgcttgactttatggagtttgtattatgaaatcagtgggtattttgaatgtgttctttctaactacatgcatctctccactcaactccaccccatcccatcccaccttgaaaatcactgctctgaaccagtgttctccaccttgtcctccacagatctcataggaaatgttcaacaattctgtgaaaggtcacaggacccaattggagaaatcatatgaaaagcatagttggtcttggtgtcatatggatcagaggcacaagtgcagaggctgtggtcatgcggaacactctgttatttaagatggctatccagataatcctgaacactgtgtatttattttatttagactaccagcaaagattaaagcatgaaatgtaaaacatctgataaaacttacagccccctacaccaagagtgtatctgtgaaagagctcctacactttgaaaacttaagaatcccttatcatgaagtttgcctgttctagaattgtaagattgttaatttccttcaatctctagtgacaacacttaatttcttttctaataaaaaaaacctatagatgattcagtgatttttgtccaattcatttccatgttctcaagacattaaggaatgttatgcgaaatacactaacttaaaactgtgtttatattttgccctgccattataaataaagacacgtgctgctgtcactcactgagtacaaatggctgata

SEQ ID NO: 309658 - DNA, 598 bp, Homo sapiens
accgcccaacccacaccaatggaaaatttaaaatttttttcgcaccagttcccgggagcaaaaacgggtgcctcgagtctttattggtaaagattgtataggcggatgcagtgatctagtctctttgcaacagagtggggaactgctgacgcggctaaagcagattggagctctgcagtaaccacagatctcataggaaatgttcaacaattctgtgaaaggtcacaggacccaattggagaaatcatatgaaaagcatagttggtcttggtgtcatatggatcagaggcacaagtgcagaggctgtggtcatgcggaacactctgttatttaagatggctatccagataatcctgaacactgtgtatttattttatttagactaccagcaaagattaaagcatgaaatgtaaaacatctgataaaacttacagccccctacaccaagagtgtatctgtgaaagagctcctacactttgaaaacttaagaatcccttatcatgaagtttgcctgttctagaattgtaagattgttaatttccttcaatctctagtgacaacacttaatttcttttctaataaaaaaaacctatagatg

SEQ ID NO: 309659 - DNA, 810 bp, Homo sapiens
gaagctgtccctttaaaactcgagcaagctaccaggcaaactccgcctccagggaggttccttattaaataggagccaactggctgggtcggggctcaataccccaagcaatacctgcaactgaggattcttcccggggagaccgcagcccatcggcatggctcaagagtttgtgaactgcaaaatccagcctgggaaggtggttgtgttcatcaagcccacctgcccgtactgcaggagggcccaagagatcctcagtcaattgcccatcaaacaagggcttctggaatttgtcgatatcacagccaccaaccacactaacgagattcaagattatttgcaacaagtggggaactgctgacgcggctaaagcagattggagctctgcagtaaccacagatctcataggaaatgttcaacaattctgtgaaaggtcacaggacccaattggagaaatcatatgaaaagcatagttggtcttggtgtcatatggatcagaggcacaagtgcagaggctgtggtcatgcggaacactctgttatttaagatggctatccagataatcctgaacactgtgtatttattttatttagactaccagcaaagattaaagcatgaaatgtaaaacatctgataaaacttacagccccctacaccaagagtgtatctgtgaaagagctcctacactttgaaaacttaagaatcccttatcatgaagtttgcctgttctagaattgtaagattgttaatttccttcaatctctagtgacaacacttaatttcttttctaataaaaaaaacctatagatg

SEQ ID NO: 309660 - DNA, 823 bp, Homo sapiens
gggccttagagaggatctcggtcacttgaatgagcggcggcactgcagccaaaggtcttcacggggcagaagagggagtacagctgatgtctgctgtgcggcagggtgcctcgagtctttattggtaaagattgtataggcggatgcagtgatctagtctctttgcaacagagtggggaactgctgacgcggctaaagcagattggagctctgcagtaaccacagaacaggccccatgctgacgtccctcctcaagagctggatggcattgcaaatgatgacagcacttctggtggatgaatttgggggcacaaacagcttttttcctcttttggctcagtatttaaaagtggaccaacttgctcttaatcacagggccaagaaggttgacgggccatcttggttttcttctggatgtgctctttggttttcagaagactgtgacaagttctggcccaggattcgctcactgaccctcaattgtcctctttggcatgcgtttcttactgttctccatgtgtcggcatgtctctacctctaagccagtgtttttcaactatgtttatccagactccttctccacaatgatgaatccacagttggttatctgctactgcccattagctaaaatcattttgctgcttgactttatggggtcggatttggacatcccggggtttggacggtgtgccttcttactacatggtttttcccttcaattcccccattcctttcccctgtagaatctggctgtgaccgggtcccccctggcccccagtccctggagtgccccttttggggggcgccgccccgcggacctttg

SEQ ID NO: 309661 - DNA, 1534 bp, Homo sapiens
gaattctggaatgtgtctgctcctagcagcagggaggaagtgtgtaactagagaggagcctattcagcaggtgtcatgactgtggcttggcgtgggtgacgcaccctcatccggggtgagttaaccatcttatgatggaccagcgattaaaggagactcaaacaccactacacccccctggttgaggacagagctcacttgtgttgctttgttttgctttctttgttttgctctgtcgtccaggtgtgagtgcaatggcaccatcacagcttactgcagcctcgacctcccgggccaaagcaatccttccacttcagcctcctgagtagctgggactacaggcatgcaccgccatgcctggctaattttgtattttttgtagagacggggtctcacgatgttacctaggctagtcttgaactcctgggctcaagcgaccctcccacctcagcctcacaaaagtagtaggattacattcatgagccactgtgcctggccctcacctgtgttttaacaacacagagagatgattgtacttaataaaccatggacctgaaaaatcagagacgtaatgcaaatacttttccagctgtatttagaaacgaactccttccttcctgattgctgtgacccagtttacaatcttaggtgtggtccctgatgcagagaaagcagagttcaatctaggtggtctgactgcagccaatcagaattctccttctgaaacatgtttctgtagagtgaaatttttaaatccctttgacaagttggacaagctcatgcatagcacacaacttgaaaactcttctggcgtaaaaacattctcgagttaataatgttaccccttataacagaaaggaagtcctgtcctgtgagcatatacataaggaggttttaaagtgatttgaaaagtttggaatcacgggaaatatttagtggtaggatagaaatgttctgtctaatctagtaatgtagtaatgtcctgggtcgtgtgcttttttaggtgcctcgagtctttattggtaaagattgtataggcggatgcagtgatctagtctctttgcaacagagtggggaactgctgacgcggctaaagcagattggagctctgcagtaaccacagatctcataggaaatgttcaacaattctgtgaaaggtcacaggacccaattggagaaatcatatgaaaagcatagttggtcttggtgtcatatggatcagaggcacaagtgcagaggctgtggtcatgcggaacactctgttatttaagatggctatccagataatcctgaacactgtgtatttattttatttagactaccagcaaagattaaagcatgaaatgtaaaacatctgataaaacttacagccccctacaccaagagtgtatctgtgaaagagctcctacactttgaaaacttaagaatcccttatcatgaagtttgcctgttctagaattgtaagattgttaatttccttcaatctctagtgacaacacttaatttcttttctaataaaaaaaacctatagatg

SEQ ID NO: 309662 - DNA, 1463 bp, Homo sapiens
gaagctgtccctttaaaactcgagcaagctaccaggcaaactccgcctccagggaggttccttattaaataggagccaactggctgggtcggggctcaataccccaagcaatacctgcaactgaggattcttcccggggagaccgcagcccatcggcatggctcaagagtttgtgaactgcaaaatccagcctgggaaggtggttgtgttcatcaagcccacctgcccgtactgcaggagggcccaagagatcctcagtcaattgcccatcaaacaagggcttctggaatttgtcgatatcacagccaccaaccacactaacgagattcaagattatttgcaacagctcacgggagcaagaacggtgcctcgagtctttattggtaaagattgtataggcggatgcagtgatctagtctctttgcaacagagtggggaactgctgacgcggctaaagcagattggagctctgcagtaaccacagaacaggccccatgctgacgtccctcctcaagagctggatggcattgcaaatgatgacagcacttctggtggatgaatttgggggcacaaacagcttttttcctcttttggctcagtatttaaaagtggaccaacttgctcttaatcacagggccaagaaggttgacgggccatcttggttttcttctggatgtgctctttggttttcagaagactgtgacaagttctggcccaggattcgctcactgaccctcaattgtcctctttggcatgcgtttcttactgttctccatgtgtcggcatgtctctacctctaagccagtgtttttcaactatgtttatccagactccttctccacaatgatgaatccacagttggttatctgctactgcccattagctaaaatcattttgctgcttgactttatggagtttgtattatgaaatcagtgggtattttgaatgtgttctttctaactacatgcatctctccactcaactccaccccatcccatcccaccttgaaaatcactgctctgaaccagtgttctccaccttgtcctccacagatctcataggaaatgttcaacaattctgtgaaaggtcacaggacccaattggagaaatcatatgaaaagcatagttggtcttggtgtcatatggatcagaggcacaagtgcagaggctgtggtcatgcggaacactctgttatttaagatggctatccagataatcctgaacactgtgtatttattttatttagactaccagcaaagattaaagcatgaaatgtaaaacatctgataaaacttacagccccctacaccaagagtgtatctgtgaaagagctcctacactttgaaaacttaagaatcccttatcatgaagtttgcctgttctagaattgtaagattgttaatttccttcaatctctagtgacaacacttaatttcttttctaataaaaaaaacctatagatg

SEQ ID NO: 309663 - DNA, 1313 bp, Homo sapiens
gaagctgtccctttaaaactcgagcaagctaccaggcaaactccgcctccagggaggttccttattaaataggagccaactggctgggtcggggctcaataccccaagcaatacctgcaactgaggattcttcccggggagaccgcagcccatcggcatggctcaagagtttgtgaactgcaaaatccagcctgggaaggtggttgtgttcatcaagcccacctgcccgtactgcaggagggcccaagagatcctcagtcaattgcccatcaaacaagggcttctggaatttgtcgatatcacagccaccaaccacactaacgagattcaagattatttgcaacagctcacgggagcaagaacggtgcctcgagtctttattggtaaagattgtataggcggatgcagtgatctagtctctttgcaacagagtggggaactgctgacgcggctaaagcagattggagctctgcagtaaccacagggccaagaaggttgacgggccatcttggttttcttctggatgtgctctttggttttcagaagactgtgacaagttctggcccaggattcgctcactgaccctcaattgtcctctttggcatgcgtttcttactgttctccatgtgtcggcatgtctctacctctaagccagtgtttttcaactatgtttatccagactccttctccacaatgatgaatccacagttggttatctgctactgcccattagctaaaatcattttgctgcttgactttatggagtttgtattatgaaatcagtgggtattttgaatgtgttctttctaactacatgcatctctccactcaactccaccccatcccatcccaccttgaaaatcactgctctgaaccagtgttctccaccttgtcctccacagatctcataggaaatgttcaacaattctgtgaaaggtcacaggacccaattggagaaatcatatgaaaagcatagttggtcttggtgtcatatggatcagaggcacaagtgcagaggctgtggtcatgcggaacactctgttatttaagatggctatccagataatcctgaacactgtgtatttattttatttagactaccagcaaagattaaagcatgaaatgtaaaacatctgataaaacttacagccccctacaccaagagtgtatctgtgaaagagctcctacactttgaaaacttaagaatcccttatcatgaagtttgcctgttctagaattgtaagattgttaatttccttcaatctctagtgacaacacttaatttcttttctaataaaaaaaacctatagatg

SEQ ID NO: 309664 - DNA, 919 bp, Homo sapiens
gaagctgtccctttaaaactcgagcaagctaccaggcaaactccgcctccagggaggttccttattaaataggagccaactggctgggtcggggctcaataccccaagcaatacctgcaactgaggattcttcccggggagaccgcagcccatcggcatggctcaagagtttgtgaactgcaaaatccagcctgggaaggtggttgtgttcatcaagcccacctgcccgtactgcaggagggcccaagagatcctcagtcaattgcccatcaaacaagggcttctggaatttgtcgatatcacagccaccaaccacactaacgagattcaagattatttgcaacagctcacgggagcaagaacggtgcctcgagtctttattggtaaagattgtataggcggatgcagtgatctagtctctttgcaacagagtggggaactgctgacgcggctaaagcagattggagctctgcagtaaccacagtgttctccaccttgtcctccacagatctcataggaaatgttcaacaattctgtgaaaggtcacaggacccaattggagaaatcatatgaaaagcatagttggtcttggtgtcatatggatcagaggcacaagtgcagaggctgtggtcatgcggaacactctgttatttaagatggctatccagataatcctgaacactgtgtatttattttatttagactaccagcaaagattaaagcatgaaatgtaaaacatctgataaaacttacagccccctacaccaagagtgtatctgtgaaagagctcctacactttgaaaacttaagaatcccttatcatgaagtttgcctgttctagaattgtaagattgttaatttccttcaatctctagtgacaacacttaatttcttttctaataaaaaaaacctatagatg

SEQ ID NO: 309665 - DNA, 417 bp, Homo sapiens
tcaaggccatctgcaacagagtgtgtttaaatggcaggtgtaagtgttctggtaatgagagaaaggaaggattttgccttacaaggagatcccttctttctttcctggcagaacaggccccatgctgacgtccctcctcaagagctggatggcattgcaaatgatgacagcacttctggtggatgaatttgggggcacaaacagcttttttcctcttttggctcagtatttaaaagtggaccaacttgctcttaatcacagggccaagaaggttgacgggccatcttggttttcttctggatgtgctctttggttttcagaagactgtgacaagttctggcccaggattcgctcactgaccctcaattgtcctctttggcatgcgtttcttactgttctccatgtgtcggcatgtct

SEQ ID NO: 309666 - DNA, 322 bp, Homo sapiens
tagttggtcttggtgtcatatggatcagaggcacaagtgcagaggctgtggtcatgcggaacactctgttatttaagatggctatccagataatcctgaacactgtgtatttattttatttagactaccagcaaagattaaagcatgaaatgtaaaacatctgataaaacttacagccccctacaccaagagtgtatctgtgaaagagctcctacactttgaaaacttaagaatcccttatcatgaagtttgcctgttctagaattgtaagattgttaatttccttcaatctctagtgacaacacttaatttcttttctaat

SEQ ID NO: 309667 - DNA, 656 bp, Homo sapiens
  misc_feature (477)..(477): n is a, c, g, or t
ggagtgtaccgtggggcctcactagcctctaactccctgtgtctgcatgagcatgtggcctccccgtcccttccccggtggcgaacccagtgacccagggacacgtggggtgtgcagctgctgcatacccagaacaccagcctcatccacaccaagaagaagctggagacagacctcatgcagctccagagtgaggtagaagatgccagcagggatgcaaggaacgctgaggagaaggccaagaaggccatcacggacgctgccatgatggcggaggagctgaagaaggagcaggacaccagcgcccaccttgagcggatgaagaagaacctggaacagacggtgaaggacctgcagcatcgtctagatgaggccgagcagctggcgctgaagggcgggaagaagcagatccagaaactggagaccaggatccgagagctggagtttgaacttgagggagagcagtgccaccacccncggcaggccttccctgacccgagccaggaacaaacaagggaccaagtgcacacattgctgagagccgtctcctgtgcctcccccgccccatccccggtcttcgtgttgtgtctgccaggctcaggcagaggcgcctgtccctgcttcttttctgaccgggaaataaatgcccctgaagg

SEQ ID NO: 309668 - DNA, 6028 bp, Homo sapiens
  misc_feature (3594)..(3594): n is a, c, g, or t
gaattccgtgggcggaggtctgggatctcctggctgttgctgtcttctgctctcatcctgcaggtgggactctcagctgacaccatgagtagtgacactgaaatggaagtgttcggcatagctgctcctttcctccggaagtcagaaaaggagaggatcgaggctcagaaccagccctttgatgccaagacgtattgcttcgtggtggactcaaaggaagaatatgccaaggggaaaatcaagagttctcaggatgggaaggtcactgtggaaactgaggacaacaggaccctggtggtcaaaccagaggatgtgtacgccatgaacccccccaagttcgacaggatcgaagacatggccatgctgacgcacctgaatgagccagccgtgctgtacaacctgaaggaccgttacacatcttggatgatctatacctactcaggcctcttctgtgtcactgtcaacccctacaagtggctgccggtgtacaaccccgaggtggtggaaggctaccgaggcaaaaagcgccaggaggccccaccccacatcttctccatctctgacaacgcctatcagttcatgctgactgatcgtgaaaaccagtccattctgatcacgggagaatccggggcaggaaagactgtgaacaccaaacgggtcatccagtactttgcaacaattgcagctactggggacctggccaagaagaaggactccaaaatgaaggggactctggaagatcaaatcatcagtgccaatcccctgctggaggcctttgggaacgccaagactgtgaggaatgacaactcctcccgttttggcaagttcatccgaatccattttggaaccactgggaagctggcctctgcagatattgaaacttatcttctggaaaaatcaagagtcactttccagctgaaggctgaaagaagctaccacatcttctaccagattctttctaacaagaagcctgagctcatagagctgctgcttattacgaccaacccttacgactacccgttcattagccagggggagatcctggtggccagcatagatgatcgagaggagctgctggctacagacagcgccattgacatcctgggcttcaccccagaagagaaatctgggctctacaagctgacgggagccgtgatgcactacgggaacatgaagttcaagcagaagcagcgagaggagcaggccgagccggatggcacagaagtggctgacaaaacagcctatctgatgggcctgaactcttcggacctcctaaaagctttgtgctttcctagagtgaaagttgggaatgagtacgttaccaaaggtcaaactgtggatcaggttcaccatgctgtgaatgctctttcaaaatcagtttatgaaaagttgttcttgtggatggtcactcgcattaaccagcaactggatacgaagcttccaagacaacacttcattggtgttttggacattgcaggctttgaaatctttgagtataacagcctggagcagctgtgcatcaacttcaccaatgagaaactgcaacagtttttcaaccaccacatgttcgtgctggagcaggaggagtacaagaaggaaggcatcgagtggacgttcattgacttcgggatggacctggctgcctgcatcgagctcatcgagaagcctatgggcatcttctccatcctggaagaggagtgcatgttccccaaggcaacagacacctccttcaagaacaagctgtatgaccagcatcttggaaagtccaacaacttccagaagcccaaggtggtcaaaggcagggcagaggctcacttctcactgatccactatgcgggcaccgtggactacagtgtctcaggttggctggagaagaacaaggaccctctgaacgagactgtggttgggctgtaccagaagtcttccaacaggctcctggcacacctctatgccacgtttgccacggcggatgctgacagtggaaagaagaaagttgccaagaagaagggttcttccttccaaactgtctctgcccttttcagggaaaacctgaacaagctgatgtcaaatttaagaactactcaccctcattttgtgcgttgtataattcccaatgaaaccaaaactccaggggctatggaacacagccttgttctgcaccagctgcggtgtaacggtgtcctggagggcatccgcatctgcaggaaagggttcccaaacaggattctctatggagattttaaacaaagataccgagtgctgaatgccagtgcaatcctggagggacaattcattgacagcaagaaagcctgtgaaaagcttctggcatccattgatattgaccacactcagtacaaatttggacataccaaggtgttcttcaaggctggcttgctgggaaccctggaagagatgcgggatgaccgcctggccaaactaatcacccggacacaagctgtgtgcagagggttcctcatgcgtgtggaattccagaagatggtgcagaggagggagtccatcttctgcatccagtacaacattcgctcattcatgaacgtcaagcactggccctggatgaaactcttcttcaagatcaagcccctcctcaagagtgcggagactgagaaagagatggccaccatgaaggaagaattccagaaaaccaaagatgaactcgccaagtcggaggcaaaaaggaaggagctagaggaaaaactggtgactctggtccaagagaagaatgacctgcagctccaagtacaagctgaaagcgaaaatttgttggatgctgaggaaagatgcgatcagctgatcaaagccaaattccagctcgaggccaagatcaaggaggtgacagagagagctgaagatgaggaggagatcaatgctgagctgacggccaagaagaggaaactggaggatgaatgctcagagctcaagaaagacattgatgaccttgagttgaccctggccaaggttgagaaggagaagcatgccacggagaacaaggttaaaaaccttactgaggaactctccgggttagatgaaacaattgcaaagttaaccagagagaagaaggccctccaagaggcgcaccagcaggccttggatgacctccaagctgaagaagacaaagtcaattctttgaacaaaaccaagagcaaactggaacagcaagtggaagacctggaaagctccctagaacaagaaaagaagctccgcgtagacctggaaaggaacaaaaggaaattggaaggagacttgaagcttgctcaagagtccatattagatctggagaatgacaagcaacagctggacgaaaggctcaagaagaaagattttgaatattgtcaacttcaaagcaaagtggaagatgagcagacactgggcctccagtttcagaagaaaatcaaagagttgcaggctcgaattgaggagctggaagaggagatagaggcggagagggccacccgcgcgaagacagagaaacagcgcagcgactatgcccgggagctggaggagctgagcgagcggctggaggaggcgggaggcgtcacctccacgcagatagagctcaacaagaagcgggaggcngagttcctgaagctgcgcagggacctggaggaggccacactgcagcacgaagccatggtggccacgctgaggaagaagcatgcggatagtgtggccgagcttggggagcagattgacaacctgcagcgggtcaagcagaagctggagaaggagaagagcgagttcaagctggagatcgatgacctctccagcagcatggagagtgtgtcgaaatctaaggcaaatctggaaaaaatctgccgaaccctggaggatcagttaagtgaggccaggggcaagaatgaggaaattcagaggagcctgagcgagctgaccacacagaagtctcgtttgcagaccgaggctggtgagctgagtcgtcagctggaagaaaaagaaagcatagtatcccaactttccaggagcaagcaagcctttacccagcaaacagaagagctcaagaggcagctggaggaagagaacaaggccaagaacgccctggcgcacgccctgcagtcctcccgccacgactgtgacctgctgcgggaacagtatgaggaggagcaggaaggcaaagctgagctgcagagggcgctgtccaaggccaatagtgaggttgcccagtggagaaccaaatacgagacggacgccatccagcgcacagaagagctggaggaggccaagaaaaaacttgctcagcgccttcaagattccgaggaacaggttgaggcagtgaatgctaaatgtgcttcactggagaagaccaagcagaggctgcaaggagaggtggaggatctgatggttgatgttgaaagagccaattccttggccgccgctctggacaagaagcagaggaactttgacaaggtgttggcagagtggaagacaaagtgtgaggagagccaagcagagctggaggcatccctgaaggagtcccgctccttgagcactgagctcttcaaactgaaaaatgcctacgaggaagccttagatcaacttgaaactgtgaaacgggaaaataagaacttagagcaggagatagcagatctcacagaacaaattgctgaaaatggcaaaaccatccatgaactggagaaatcaagaaagcagattgagctggaaaaggctgatatccagctggctctcgaggaagcagaggctgctcttgagcatgaagaagccaagatcctccgaatccagcttgaattgacacaagtgaaatcagaaattgatagaaagattgccgagaaggatgaagagatcgagcagctgaagaggaactaccagagaacagtggaaaccatgcagagcgccctggacgccgaggtgcggagcaggaatgaagccatccggctcaagaagaagatggagggggacctgaatgaaatcgagatccagctgagccacgccaaccgccaggcggcggagaccctcaaacacctcaggagtgtccagggacagctgaaggatacgcagctccacctggatgatgccctccgaggccaggaggacctgaaggagcagctggcgattgtggagcgcagagccaacctgctgcaggccgaggtggaggagctgcgggctactctggagcagacggagagggcccggaaactggcggaacaggagctcctggactccaacgagagggtgcagctgctgcatacccagaacaccagcctcatccacaccaagaagaagctggagacagacctcatgcagctccagagtgaggtagaagatgccagcagggatgcaaggaacgctgaggagaaggccaagaaggccatcacggacgctgccatgatggcggaggagctgaagaaggagcaggacaccagcgcccaccttgagcggatgaagaagaacctggaacagacggtgaaggacctgcagcatcgtctagatgaggccgagcagctggcgctgaagggcgggaagaagcagatccagaaactggagaccaggatccgagagctggagtttgaacttgagggagagcagaagaagaacacagagtctgttaagggcctgaggaagtatgagcggagggtcaaggagctgacgtaccagagtgaagaggacaggaagaatgtgctgagattgcaggatctggtggataaactgcaagtgaaagtcaagtcctacaagaggcaggcggaggaggctgatgaacaagccaatgctcatctcaccaaattccgaaaggctcagcatgagctggaggaggccgaggaacgtgcggatatcgcagaatctcaagtcaacaagctccgcgctaagactcgagacttcacctccagcaggatggtggtccacgagagtgaagagtgagccagcccttctggagcaggacagaagatatgcaaaatgtatattttcttgattcctgaccattgatacttaatgtccatgtgactctttttcacatgcaataaactttgctttgtttcaa

SEQ ID NO: 309669 - DNA, 449 bp, Homo sapiens
agctgcccatgccgtgtgcaaatctgccccctcctctccagtgacattcccactttctcattcttagagtgaagaggacaggaagaatgtgctgagattgcaggatctggtggataaactgcaagtgaaagtcaagtcctacaagaggcaggcggaggaggctgatgaacaagccaatgctcatctcaccaaattccgaaaggctcagcatgagctggaggaggccgaggaacgtgcggatatcgcagaatctcaagtcaacaagctccgcgctaagactcgagacttcacctccagcaggatggtggtccacgagagtgaagagtgagccagcccttctggagcaggacagaagatatgcaaaatgtatattttcttgattcctgaccattgatacttaatgtccatgtgactctttttcacatgcaataaactttgctttgtttcaa

SEQ ID NO: 309670 - DNA, 5571 bp, Homo sapiens
  misc_feature (3137)..(3137): n is a, c, g, or t
cggatcacctgaggtcgggagatcgagaccatcctggccaacatggtgaaaccccgtctctattaaaaatacagaaattagccaggtgtggtggcacgtgattgtagtcccagctactcaggaggctgaggcaggagaatcacttgaacccgggaggcagaggttgcagtgagccgagatcacgccactgcactccagcctggtgacagagcgagactccgtctcaaaaacataacaaaacaaaacaaaacaaaacaaaaattttagggggactaggctcctactcaaattacccataagatgaataggaactattgggccatggtagaatctggtctccccctgaatcccgccccatacagggcaagttcatccgaatccattttggaaccactgggaagctggcctctgcagatattgaaacttatcttctggaaaaatcaagagtcactttccagctgaaggctgaaagaagctaccacatcttctaccagattctttctaacaagaagcctgagctcatagagctgctgcttattacgaccaacccttacgactacccgttcattagccagggggagatcctggtggccagcatagatgatcgagaggagctgctggctacagacagcgccattgacatcctgggcttcaccccagaagagaaatctgggctctacaagctgacgggagccgtgatgcactacgggaacatgaagttcaagcagaagcagcgagaggagcaggccgagccggatggcacagaagtggctgacaaaacagcctatctgatgggcctgaactcttcggacctcctaaaagctttgtgctttcctagagtgaaagttgggaatgagtacgttaccaaaggtcaaactgtggatcaggttcaccatgctgtgaatgctctttcaaaatcagtttatgaaaagttgttcttgtggatggtcactcgcattaaccagcaactggatacgaagcttccaagacaacacttcattggtgttttggacattgcaggctttgaaatctttgagtataacagcctggagcagctgtgcatcaacttcaccaatgagaaactgcaacagtttttcaaccaccacatgttcgtgctggagcaggaggagtacaagaaggaaggcatcgagtggacgttcattgacttcgggatggacctggctgcctgcatcgagctcatcgagaagcctatgggcatcttctccatcctggaagaggagtgcatgttccccaaggcaacagacacctccttcaagaacaagctgtatgaccagcatcttggaaagtccaacaacttccagaagcccaaggtggtcaaaggcagggcagaggctcacttctcactgatccactatgcgggcaccgtggactacagtgtctcaggttggctggagaagaacaaggaccctctgaacgagactgtggttgggctgtaccagaagtcttccaacaggctcctggcacacctctatgccacgtttgccacggcggatgctgacagtggaaagaagaaagttgccaagaagaagggttcttccttccaaactgtctctgcccttttcagggaaaacctgaacaagctgatgtcaaatttaagaactactcaccctcattttgtgcgttgtataattcccaatgaaaccaaaactccaggggctatggaacacagccttgttctgcaccagctgcggtgtaacggtgtcctggagggcatccgcatctgcaggaaagggttcccaaacaggattctctatggagattttaaacaaagataccgagtgctgaatgccagtgcaatcctggagggacaattcattgacagcaagaaagcctgtgaaaagcttctggcatccattgatattgaccacactcagtacaaatttggacataccaaggtgttcttcaaggctggcttgctgggaaccctggaagagatgcgggatgaccgcctggccaaactaatcacccggacacaagctgtgtgcagagggttcctcatgcgtgtggaattccagaagatggtgcagaggagggagtccatcttctgcatccagtacaacattcgctcattcatgaacgtcaagcactggccctggatgaaactcttcttcaagatcaagcccctcctcaagagtgcggagactgagaaagagatggccaccatgaaggaagaattccagaaaaccaaagatgaactcgccaagtcggaggcaaaaaggaaggagctagaggaaaaactggtgactctggtccaagagaagaatgacctgcagctccaagtacaagctgaaagcgaaaatttgttggatgctgaggaaagatgcgatcagctgatcaaagccaaattccagctcgaggccaagatcaaggaggtgacagagagagctgaagatgaggaggagatcaatgctgagctgacggccaagaagaggaaactggaggatgaatgctcagagctcaagaaagacattgatgaccttgagttgaccctggccaaggttgagaaggagaagcatgccacggagaacaaggttaaaaaccttactgaggaactctccgggttagatgaaacaattgcaaagttaaccagagagaagaaggccctccaagaggcgcaccagcaggccttggatgacctccaagctgaagaagacaaagtcaattctttgaacaaaaccaagagcaaactggaacagcaagtggaagacctggaaagctccctagaacaagaaaagaagctccgcgtagacctggaaaggaacaaaaggaaattggaaggagacttgaagcttgctcaagagtccatattagatctggagaatgacaagcaacagctggacgaaaggctcaagaagaaagattttgaatattgtcaacttcaaagcaaagtggaagatgagcagacactgggcctccagtttcagaagaaaatcaaagagttgcaggctcgaattgaggagctggaagaggagatagaggcggagagggccacccgcgcgaagacagagaaacagcgcagcgactatgcccgggagctggaggagctgagcgagcggctggaggaggcgggaggcgtcacctccacgcagatagagctcaacaagaagcgggaggcngagttcctgaagctgcgcagggacctggaggaggccacactgcagcacgaagccatggtggccacgctgaggaagaagcatgcggatagtgtggccgagcttggggagcagattgacaacctgcagcgggtcaagcagaagctggagaaggagaagagcgagttcaagctggagatcgatgacctctccagcagcatggagagtgtgtcgaaatctaaggcaaatctggaaaaaatctgccgaaccctggaggatcagttaagtgaggccaggggcaagaatgaggaaattcagaggagcctgagcgagctgaccacacagaagtctcgtttgcagaccgaggctggtgagctgagtcgtcagctggaagaaaaagaaagcatagtatcccaactttccaggagcaagcaagcctttacccagcaaacagaagagctcaagaggcagctggaggaagagaacaaggccaagaacgccctggcgcacgccctgcagtcctcccgccacgactgtgacctgctgcgggaacagtatgaggaggagcaggaaggcaaagctgagctgcagagggcgctgtccaaggccaatagtgaggttgcccagtggagaaccaaatacgagacggacgccatccagcgcacagaagagctggaggaggccaagaaaaaacttgctcagcgccttcaagattccgaggaacaggttgaggcagtgaatgctaaatgtgcttcactggagaagaccaagcagaggctgcaaggagaggtggaggatctgatggttgatgttgaaagagccaattccttggccgccgctctggacaagaagcagaggaactttgacaaggtgttggcagagtggaagacaaagtgtgaggagagccaagcagagctggaggcatccctgaaggagtcccgctccttgagcactgagctcttcaaactgaaaaatgcctacgaggaagccttagatcaacttgaaactgtgaaacgggaaaataagaacttagagcaggagatagcagatctcacagaacaaattgctgaaaatggcaaaaccatccatgaactggagaaatcaagaaagcagattgagctggaaaaggctgatatccagctggctctcgaggaagcagaggctgctcttgagcatgaagaagccaagatcctccgaatccagcttgaattgacacaagtgaaatcagaaattgatagaaagattgccgagaaggatgaagagatcgagcagctgaagaggaactaccagagaacagtggaaaccatgcagagcgccctggacgccgaggtgcggagcaggaatgaagccatccggctcaagaagaagatggagggggacctgaatgaaatcgagatccagctgagccacgccaaccgccaggcggcggagaccctcaaacacctcaggagtgtccagggacagctgaaggatacgcagctccacctggatgatgccctccgaggccaggaggacctgaaggagcagctggcgattgtggagcgcagagccaacctgctgcaggccgaggtggaggagctgcgggctactctggagcagacggagagggcccggaaactggcggaacaggagctcctggactccaacgagagggtgcagctgctgcatacccagaacaccagcctcatccacaccaagaagaagctggagacagacctcatgcagctccagagtgaggtagaagatgccagcagggatgcaaggaacgctgaggagaaggccaagaaggccatcacggacgctgccatgatggcggaggagctgaagaaggagcaggacaccagcgcccaccttgagcggatgaagaagaacctggaacagacggtgaaggacctgcagcatcgtctagatgaggccgagcagctggcgctgaagggcgggaagaagcagatccagaaactggagaccaggatccgagagctggagtttgaacttgagggagagcagaagaagaacacagagtctgttaagggcctgaggaagtatgagcggagggtcaaggagctgacgtaccagagtgaagaggacaggaagaatgtgctgagattgcaggatctggtggataaactgcaagtgaaagtcaagtcctacaagaggcaggcggaggaggctgatgaacaagccaatgctcatctcaccaaattccgaaaggctcagcatgagctggaggaggccgaggaacgtgcggatatcgcagaatctcaagtcaacaagctccgcgctaagactcgagacttcacctccagcaggatggtggtccacgagagtgaagagtgagccagcccttctggagcaggacagaagatatgcaaaatgtatattttcttgattcctgaccattgatacttaatgtccatgtgactctttttcacatgcaataaactttgctttgtttcaa

SEQ ID NO: 309671 - DNA, 5430 bp, Homo sapiens
  misc_feature (2996)..(2996): n is a, c, g, or t
aaaaaatatcccagtttggacaataaaatacataattactctagttatattatttgctttacttctaaaaatgtaagaaattgaatttttttaaagaaaaatgttggttcctgccttgatctaagtctcatccaaaggaaataaatagtcactagttttttatcttacaactcaggacatttgtctttggttattaatggaaattagtatgtgattactttcatagttatgccacaaatcacattgaagaaggaatcattccgacctctgcagatattgaaacttatcttctggaaaaatcaagagtcactttccagctgaaggctgaaagaagctaccacatcttctaccagattctttctaacaagaagcctgagctcatagagctgctgcttattacgaccaacccttacgactacccgttcattagccagggggagatcctggtggccagcatagatgatcgagaggagctgctggctacagacagcgccattgacatcctgggcttcaccccagaagagaaatctgggctctacaagctgacgggagccgtgatgcactacgggaacatgaagttcaagcagaagcagcgagaggagcaggccgagccggatggcacagaagtggctgacaaaacagcctatctgatgggcctgaactcttcggacctcctaaaagctttgtgctttcctagagtgaaagttgggaatgagtacgttaccaaaggtcaaactgtggatcaggttcaccatgctgtgaatgctctttcaaaatcagtttatgaaaagttgttcttgtggatggtcactcgcattaaccagcaactggatacgaagcttccaagacaacacttcattggtgttttggacattgcaggctttgaaatctttgagtataacagcctggagcagctgtgcatcaacttcaccaatgagaaactgcaacagtttttcaaccaccacatgttcgtgctggagcaggaggagtacaagaaggaaggcatcgagtggacgttcattgacttcgggatggacctggctgcctgcatcgagctcatcgagaagcctatgggcatcttctccatcctggaagaggagtgcatgttccccaaggcaacagacacctccttcaagaacaagctgtatgaccagcatcttggaaagtccaacaacttccagaagcccaaggtggtcaaaggcagggcagaggctcacttctcactgatccactatgcgggcaccgtggactacagtgtctcaggttggctggagaagaacaaggaccctctgaacgagactgtggttgggctgtaccagaagtcttccaacaggctcctggcacacctctatgccacgtttgccacggcggatgctgacagtggaaagaagaaagttgccaagaagaagggttcttccttccaaactgtctctgcccttttcagggaaaacctgaacaagctgatgtcaaatttaagaactactcaccctcattttgtgcgttgtataattcccaatgaaaccaaaactccaggggctatggaacacagccttgttctgcaccagctgcggtgtaacggtgtcctggagggcatccgcatctgcaggaaagggttcccaaacaggattctctatggagattttaaacaaagataccgagtgctgaatgccagtgcaatcctggagggacaattcattgacagcaagaaagcctgtgaaaagcttctggcatccattgatattgaccacactcagtacaaatttggacataccaaggtgttcttcaaggctggcttgctgggaaccctggaagagatgcgggatgaccgcctggccaaactaatcacccggacacaagctgtgtgcagagggttcctcatgcgtgtggaattccagaagatggtgcagaggagggagtccatcttctgcatccagtacaacattcgctcattcatgaacgtcaagcactggccctggatgaaactcttcttcaagatcaagcccctcctcaagagtgcggagactgagaaagagatggccaccatgaaggaagaattccagaaaaccaaagatgaactcgccaagtcggaggcaaaaaggaaggagctagaggaaaaactggtgactctggtccaagagaagaatgacctgcagctccaagtacaagctgaaagcgaaaatttgttggatgctgaggaaagatgcgatcagctgatcaaagccaaattccagctcgaggccaagatcaaggaggtgacagagagagctgaagatgaggaggagatcaatgctgagctgacggccaagaagaggaaactggaggatgaatgctcagagctcaagaaagacattgatgaccttgagttgaccctggccaaggttgagaaggagaagcatgccacggagaacaaggttaaaaaccttactgaggaactctccgggttagatgaaacaattgcaaagttaaccagagagaagaaggccctccaagaggcgcaccagcaggccttggatgacctccaagctgaagaagacaaagtcaattctttgaacaaaaccaagagcaaactggaacagcaagtggaagacctggaaagctccctagaacaagaaaagaagctccgcgtagacctggaaaggaacaaaaggaaattggaaggagacttgaagcttgctcaagagtccatattagatctggagaatgacaagcaacagctggacgaaaggctcaagaagaaagattttgaatattgtcaacttcaaagcaaagtggaagatgagcagacactgggcctccagtttcagaagaaaatcaaagagttgcaggctcgaattgaggagctggaagaggagatagaggcggagagggccacccgcgcgaagacagagaaacagcgcagcgactatgcccgggagctggaggagctgagcgagcggctggaggaggcgggaggcgtcacctccacgcagatagagctcaacaagaagcgggaggcngagttcctgaagctgcgcagggacctggaggaggccacactgcagcacgaagccatggtggccacgctgaggaagaagcatgcggatagtgtggccgagcttggggagcagattgacaacctgcagcgggtcaagcagaagctggagaaggagaagagcgagttcaagctggagatcgatgacctctccagcagcatggagagtgtgtcgaaatctaaggcaaatctggaaaaaatctgccgaaccctggaggatcagttaagtgaggccaggggcaagaatgaggaaattcagaggagcctgagcgagctgaccacacagaagtctcgtttgcagaccgaggctggtgagctgagtcgtcagctggaagaaaaagaaagcatagtatcccaactttccaggagcaagcaagcctttacccagcaaacagaagagctcaagaggcagctggaggaagagaacaaggccaagaacgccctggcgcacgccctgcagtcctcccgccacgactgtgacctgctgcgggaacagtatgaggaggagcaggaaggcaaagctgagctgcagagggcgctgtccaaggccaatagtgaggttgcccagtggagaaccaaatacgagacggacgccatccagcgcacagaagagctggaggaggccaagaaaaaacttgctcagcgccttcaagattccgaggaacaggttgaggcagtgaatgctaaatgtgcttcactggagaagaccaagcagaggctgcaaggagaggtggaggatctgatggttgatgttgaaagagccaattccttggccgccgctctggacaagaagcagaggaactttgacaaggtgttggcagagtggaagacaaagtgtgaggagagccaagcagagctggaggcatccctgaaggagtcccgctccttgagcactgagctcttcaaactgaaaaatgcctacgaggaagccttagatcaacttgaaactgtgaaacgggaaaataagaacttagagcaggagatagcagatctcacagaacaaattgctgaaaatggcaaaaccatccatgaactggagaaatcaagaaagcagattgagctggaaaaggctgatatccagctggctctcgaggaagcagaggctgctcttgagcatgaagaagccaagatcctccgaatccagcttgaattgacacaagtgaaatcagaaattgatagaaagattgccgagaaggatgaagagatcgagcagctgaagaggaactaccagagaacagtggaaaccatgcagagcgccctggacgccgaggtgcggagcaggaatgaagccatccggctcaagaagaagatggagggggacctgaatgaaatcgagatccagctgagccacgccaaccgccaggcggcggagaccctcaaacacctcaggagtgtccagggacagctgaaggatacgcagctccacctggatgatgccctccgaggccaggaggacctgaaggagcagctggcgattgtggagcgcagagccaacctgctgcaggccgaggtggaggagctgcgggctactctggagcagacggagagggcccggaaactggcggaacaggagctcctggactccaacgagagggtgcagctgctgcatacccagaacaccagcctcatccacaccaagaagaagctggagacagacctcatgcagctccagagtgaggtagaagatgccagcagggatgcaaggaacgctgaggagaaggccaagaaggccatcacggacgctgccatgatggcggaggagctgaagaaggagcaggacaccagcgcccaccttgagcggatgaagaagaacctggaacagacggtgaaggacctgcagcatcgtctagatgaggccgagcagctggcgctgaagggcgggaagaagcagatccagaaactggagaccaggatccgagagctggagtttgaacttgagggagagcagaagaagaacacagagtctgttaagggcctgaggaagtatgagcggagggtcaaggagctgacgtaccagagtgaagaggacaggaagaatgtgctgagattgcaggatctggtggataaactgcaagtgaaagtcaagtcctacaagaggcaggcggaggaggctgatgaacaagccaatgctcatctcaccaaattccgaaaggctcagcatgagctggaggaggccgaggaacgtgcggatatcgcagaatctcaagtcaacaagctccgcgctaagactcgagacttcacctccagcaggatggtggtccacgagagtgaagagtgagccagcccttctggagcaggacagaagatatgcaaaatgtatattttcttgattcctgaccattgatacttaatgtccatgtgactctttttcacatgcaataaactttgctttgtttcaa

SEQ ID NO: 309672 - DNA, 5678 bp, Homo sapiens
  misc_feature (3137)..(3137): n is a, c, g, or t
cggatcacctgaggtcgggagatcgagaccatcctggccaacatggtgaaaccccgtctctattaaaaatacagaaattagccaggtgtggtggcacgtgattgtagtcccagctactcaggaggctgaggcaggagaatcacttgaacccgggaggcagaggttgcagtgagccgagatcacgccactgcactccagcctggtgacagagcgagactccgtctcaaaaacataacaaaacaaaacaaaacaaaacaaaaattttagggggactaggctcctactcaaattacccataagatgaataggaactattgggccatggtagaatctggtctccccctgaatcccgccccatacagggcaagttcatccgaatccattttggaaccactgggaagctggcctctgcagatattgaaacttatcttctggaaaaatcaagagtcactttccagctgaaggctgaaagaagctaccacatcttctaccagattctttctaacaagaagcctgagctcatagagctgctgcttattacgaccaacccttacgactacccgttcattagccagggggagatcctggtggccagcatagatgatcgagaggagctgctggctacagacagcgccattgacatcctgggcttcaccccagaagagaaatctgggctctacaagctgacgggagccgtgatgcactacgggaacatgaagttcaagcagaagcagcgagaggagcaggccgagccggatggcacagaagtggctgacaaaacagcctatctgatgggcctgaactcttcggacctcctaaaagctttgtgctttcctagagtgaaagttgggaatgagtacgttaccaaaggtcaaactgtggatcaggttcaccatgctgtgaatgctctttcaaaatcagtttatgaaaagttgttcttgtggatggtcactcgcattaaccagcaactggatacgaagcttccaagacaacacttcattggtgttttggacattgcaggctttgaaatctttgagtataacagcctggagcagctgtgcatcaacttcaccaatgagaaactgcaacagtttttcaaccaccacatgttcgtgctggagcaggaggagtacaagaaggaaggcatcgagtggacgttcattgacttcgggatggacctggctgcctgcatcgagctcatcgagaagcctatgggcatcttctccatcctggaagaggagtgcatgttccccaaggcaacagacacctccttcaagaacaagctgtatgaccagcatcttggaaagtccaacaacttccagaagcccaaggtggtcaaaggcagggcagaggctcacttctcactgatccactatgcgggcaccgtggactacagtgtctcaggttggctggagaagaacaaggaccctctgaacgagactgtggttgggctgtaccagaagtcttccaacaggctcctggcacacctctatgccacgtttgccacggcggatgctgacagtggaaagaagaaagttgccaagaagaagggttcttccttccaaactgtctctgcccttttcagggaaaacctgaacaagctgatgtcaaatttaagaactactcaccctcattttgtgcgttgtataattcccaatgaaaccaaaactccaggggctatggaacacagccttgttctgcaccagctgcggtgtaacggtgtcctggagggcatccgcatctgcaggaaagggttcccaaacaggattctctatggagattttaaacaaagataccgagtgctgaatgccagtgcaatcctggagggacaattcattgacagcaagaaagcctgtgaaaagcttctggcatccattgatattgaccacactcagtacaaatttggacataccaaggtgttcttcaaggctggcttgctgggaaccctggaagagatgcgggatgaccgcctggccaaactaatcacccggacacaagctgtgtgcagagggttcctcatgcgtgtggaattccagaagatggtgcagaggagggagtccatcttctgcatccagtacaacattcgctcattcatgaacgtcaagcactggccctggatgaaactcttcttcaagatcaagcccctcctcaagagtgcggagactgagaaagagatggccaccatgaaggaagaattccagaaaaccaaagatgaactcgccaagtcggaggcaaaaaggaaggagctagaggaaaaactggtgactctggtccaagagaagaatgacctgcagctccaagtacaagctgaaagcgaaaatttgttggatgctgaggaaagatgcgatcagctgatcaaagccaaattccagctcgaggccaagatcaaggaggtgacagagagagctgaagatgaggaggagatcaatgctgagctgacggccaagaagaggaaactggaggatgaatgctcagagctcaagaaagacattgatgaccttgagttgaccctggccaaggttgagaaggagaagcatgccacggagaacaaggttaaaaaccttactgaggaactctccgggttagatgaaacaattgcaaagttaaccagagagaagaaggccctccaagaggcgcaccagcaggccttggatgacctccaagctgaagaagacaaagtcaattctttgaacaaaaccaagagcaaactggaacagcaagtggaagacctggaaagctccctagaacaagaaaagaagctccgcgtagacctggaaaggaacaaaaggaaattggaaggagacttgaagcttgctcaagagtccatattagatctggagaatgacaagcaacagctggacgaaaggctcaagaagaaagattttgaatattgtcaacttcaaagcaaagtggaagatgagcagacactgggcctccagtttcagaagaaaatcaaagagttgcaggctcgaattgaggagctggaagaggagatagaggcggagagggccacccgcgcgaagacagagaaacagcgcagcgactatgcccgggagctggaggagctgagcgagcggctggaggaggcgggaggcgtcacctccacgcagatagagctcaacaagaagcgggaggcngagttcctgaagctgcgcagggacctggaggaggccacactgcagcacgaagccatggtggccacgctgaggaagaagcatgcggatagtgtggccgagcttggggagcagattgacaacctgcagcgggtcaagcagaagctggagaaggagaagagcgagttcaagctggagatcgatgacctctccagcagcatggagagtgtgtcgaaatctaaggcaaatctggaaaaaatctgccgaaccctggaggatcagttaagtgaggccaggggcaagaatgaggaaattcagaggagcctgagcgagctgaccacacagaagtctcgtttgcagaccgaggctggtgagctgagtcgtcagctggaagaaaaagaaagcatagtatcccaactttccaggagcaagcaagcctttacccagcaaacagaagagctcaagaggcagctggaggaagagaacaaggccaagaacgccctggcgcacgccctgcagtcctcccgccacgactgtgacctgctgcgggaacagtatgaggaggagcaggaaggcaaagctgagctgcagagggcgctgtccaaggccaatagtgaggttgcccagtggagaaccaaatacgagacggacgccatccagcgcacagaagagctggaggaggccaagaaaaaacttgctcagcgccttcaagattccgaggaacaggttgaggcagtgaatgctaaatgtgcttcactggagaagaccaagcagaggctgcaaggagaggtggaggatctgatggttgatgttgaaagagccaattccttggccgccgctctggacaagaagcagaggaactttgacaaggtgttggcagagtggaagacaaagtgtgaggagagccaagcagagctggaggcatccctgaaggagtcccgctccttgagcactgagctcttcaaactgaaaaatgcctacgaggaagccttagatcaacttgaaactgtgaaacgggaaaataagaacttagagcaggagatagcagatctcacagaacaaattgctgaaaatggcaaaaccatccatgaactggagaaatcaagaaagcagattgagctggaaaaggctgatatccagctggctctcgaggaagcagaggctgctcttgagcatgaagaagccaagatcctccgaatccagcttgaattgacacaagtgaaatcagaaattgatagaaagattgccgagaaggatgaagagatcgagcagctgaagaggaactaccagagaacagtggaaaccatgcagagcgccctggacgccgaggtgcggagcaggaatgaagccatccggctcaagaagaagatggagggggacctgaatgaaatcgagatccagctgagccacgccaaccgccaggcggcggagaccctcaaacacctcaggagtgtccagggacagctgaaggatacgcagctccacctggatgatgccctccgaggccaggaggacctgaaggagcagctggcgattgtggagcgcagagccaacctgctgcaggccgaggtggaggagctgcgggctactctggagcagacggagagggcccggaaactggcggaacaggagctcctggactccaacgagagggtgcagctgctgcatacccagaacaccagcctcatccacaccaagaagaagctggagacagacctcatgcagctccagagtgaggtagaagatgccagcagggatgcaaggaacgctgaggagaaggccaagaaggccatcacggacgctgccatgatggcggaggagctgaagaaggagcaggacaccagcgcccaccttgagcggatgaagaagaacctggaacagacggtgaaggacctgcagcatcgtctagatgaggccgagcagctggcgctgaagggcgggaagaagcagatccagaaactggagaccaggatccgagagctggagtttgaacttgagggagagcagaagaagaacacagagtctgttaagggcctgaggaagtatgagcggagggtcaaggagctgacgtaccagagtgaagaggacaggaagaatgtgctgagattgcaggatctggtggataaactgcaagtgaaagtcaagtcctacaagaggcaggcggaggaggctgtaagtgagataggtgctgactgcggcaggcagaccgtgctgtttcccgtggtgagttctgagagaggcgcgtgctgatataacctgcctgggctctttggttttaggatgaacaagccaatgctcatctcaccaaattccgaaaggctcagcatgagctggaggaggccgaggaacgtgcggatatcgcagaatctcaagtcaacaagctccgcgctaagactcgagacttcacctccagcaggatggtggtccacgagagtgaagagtgagccagcccttctggagcaggacagaagatatgcaaaatgtatattttcttgattcctgaccattgatacttaatgtccatgtgactctttttcacatgcaataaactttgctttgtttcaa

SEQ ID NO: 309673 - DNA, 5311 bp, Homo sapiens
  misc_feature (3137)..(3137): n is a, c, g, or t
  misc_feature (5132)..(5132): n is a, c, g, or t
cggatcacctgaggtcgggagatcgagaccatcctggccaacatggtgaaaccccgtctctattaaaaatacagaaattagccaggtgtggtggcacgtgattgtagtcccagctactcaggaggctgaggcaggagaatcacttgaacccgggaggcagaggttgcagtgagccgagatcacgccactgcactccagcctggtgacagagcgagactccgtctcaaaaacataacaaaacaaaacaaaacaaaacaaaaattttagggggactaggctcctactcaaattacccataagatgaataggaactattgggccatggtagaatctggtctccccctgaatcccgccccatacagggcaagttcatccgaatccattttggaaccactgggaagctggcctctgcagatattgaaacttatcttctggaaaaatcaagagtcactttccagctgaaggctgaaagaagctaccacatcttctaccagattctttctaacaagaagcctgagctcatagagctgctgcttattacgaccaacccttacgactacccgttcattagccagggggagatcctggtggccagcatagatgatcgagaggagctgctggctacagacagcgccattgacatcctgggcttcaccccagaagagaaatctgggctctacaagctgacgggagccgtgatgcactacgggaacatgaagttcaagcagaagcagcgagaggagcaggccgagccggatggcacagaagtggctgacaaaacagcctatctgatgggcctgaactcttcggacctcctaaaagctttgtgctttcctagagtgaaagttgggaatgagtacgttaccaaaggtcaaactgtggatcaggttcaccatgctgtgaatgctctttcaaaatcagtttatgaaaagttgttcttgtggatggtcactcgcattaaccagcaactggatacgaagcttccaagacaacacttcattggtgttttggacattgcaggctttgaaatctttgagtataacagcctggagcagctgtgcatcaacttcaccaatgagaaactgcaacagtttttcaaccaccacatgttcgtgctggagcaggaggagtacaagaaggaaggcatcgagtggacgttcattgacttcgggatggacctggctgcctgcatcgagctcatcgagaagcctatgggcatcttctccatcctggaagaggagtgcatgttccccaaggcaacagacacctccttcaagaacaagctgtatgaccagcatcttggaaagtccaacaacttccagaagcccaaggtggtcaaaggcagggcagaggctcacttctcactgatccactatgcgggcaccgtggactacagtgtctcaggttggctggagaagaacaaggaccctctgaacgagactgtggttgggctgtaccagaagtcttccaacaggctcctggcacacctctatgccacgtttgccacggcggatgctgacagtggaaagaagaaagttgccaagaagaagggttcttccttccaaactgtctctgcccttttcagggaaaacctgaacaagctgatgtcaaatttaagaactactcaccctcattttgtgcgttgtataattcccaatgaaaccaaaactccaggggctatggaacacagccttgttctgcaccagctgcggtgtaacggtgtcctggagggcatccgcatctgcaggaaagggttcccaaacaggattctctatggagattttaaacaaagataccgagtgctgaatgccagtgcaatcctggagggacaattcattgacagcaagaaagcctgtgaaaagcttctggcatccattgatattgaccacactcagtacaaatttggacataccaaggtgttcttcaaggctggcttgctgggaaccctggaagagatgcgggatgaccgcctggccaaactaatcacccggacacaagctgtgtgcagagggttcctcatgcgtgtggaattccagaagatggtgcagaggagggagtccatcttctgcatccagtacaacattcgctcattcatgaacgtcaagcactggccctggatgaaactcttcttcaagatcaagcccctcctcaagagtgcggagactgagaaagagatggccaccatgaaggaagaattccagaaaaccaaagatgaactcgccaagtcggaggcaaaaaggaaggagctagaggaaaaactggtgactctggtccaagagaagaatgacctgcagctccaagtacaagctgaaagcgaaaatttgttggatgctgaggaaagatgcgatcagctgatcaaagccaaattccagctcgaggccaagatcaaggaggtgacagagagagctgaagatgaggaggagatcaatgctgagctgacggccaagaagaggaaactggaggatgaatgctcagagctcaagaaagacattgatgaccttgagttgaccctggccaaggttgagaaggagaagcatgccacggagaacaaggttaaaaaccttactgaggaactctccgggttagatgaaacaattgcaaagttaaccagagagaagaaggccctccaagaggcgcaccagcaggccttggatgacctccaagctgaagaagacaaagtcaattctttgaacaaaaccaagagcaaactggaacagcaagtggaagacctggaaagctccctagaacaagaaaagaagctccgcgtagacctggaaaggaacaaaaggaaattggaaggagacttgaagcttgctcaagagtccatattagatctggagaatgacaagcaacagctggacgaaaggctcaagaagaaagattttgaatattgtcaacttcaaagcaaagtggaagatgagcagacactgggcctccagtttcagaagaaaatcaaagagttgcaggctcgaattgaggagctggaagaggagatagaggcggagagggccacccgcgcgaagacagagaaacagcgcagcgactatgcccgggagctggaggagctgagcgagcggctggaggaggcgggaggcgtcacctccacgcagatagagctcaacaagaagcgggaggcngagttcctgaagctgcgcagggacctggaggaggccacactgcagcacgaagccatggtggccacgctgaggaagaagcatgcggatagtgtggccgagcttggggagcagattgacaacctgcagcgggtcaagcagaagctggagaaggagaagagcgagttcaagctggagatcgatgacctctccagcagcatggagagtgtgtcgaaatctaaggcaaatctggaaaaaatctgccgaaccctggaggatcagttaagtgaggccaggggcaagaatgaggaaattcagaggagcctgagcgagctgaccacacagaagtctcgtttgcagaccgaggctggtgagctgagtcgtcagctggaagaaaaagaaagcatagtatcccaactttccaggagcaagcaagcctttacccagcaaacagaagagctcaagaggcagctggaggaagagaacaaggccaagaacgccctggcgcacgccctgcagtcctcccgccacgactgtgacctgctgcgggaacagtatgaggaggagcaggaaggcaaagctgagctgcagagggcgctgtccaaggccaatagtgaggttgcccagtggagaaccaaatacgagacggacgccatccagcgcacagaagagctggaggaggccaagaaaaaacttgctcagcgccttcaagattccgaggaacaggttgaggcagtgaatgctaaatgtgcttcactggagaagaccaagcagaggctgcaaggagaggtggaggatctgatggttgatgttgaaagagccaattccttggccgccgctctggacaagaagcagaggaactttgacaaggtgttggcagagtggaagacaaagtgtgaggagagccaagcagagctggaggcatccctgaaggagtcccgctccttgagcactgagctcttcaaactgaaaaatgcctacgaggaagccttagatcaacttgaaactgtgaaacgggaaaataagaacttagagcaggagatagcagatctcacagaacaaattgctgaaaatggcaaaaccatccatgaactggagaaatcaagaaagcagattgagctggaaaaggctgatatccagctggctctcgaggaagcagaggctgctcttgagcatgaagaagccaagatcctccgaatccagcttgaattgacacaagtgaaatcagaaattgatagaaagattgccgagaaggatgaagagatcgagcagctgaagaggaactaccagagaacagtggaaaccatgcagagcgccctggacgccgaggtgcggagcaggaatgaagccatccggctcaagaagaagatggagggggacctgaatgaaatcgagatccagctgagccacgccaaccgccaggcggcggagaccctcaaacacctcaggagtgtccagggacagctgaaggatacgcagctccacctggatgatgccctccgaggccaggaggacctgaaggagcagctggcgattgtggagcgcagagccaacctgctgcaggccgaggtggaggagctgcgggctactctggagcagacggagagggcccggaaactggcggaacaggagctcctggactccaacgagagggtgcagctgctgcatacccagaacaccagcctcatccacaccaagaagaagctggagacagacctcatgcagctccagagtgaggtagaagatgccagcagggatgcaaggaacgctgaggagaaggccaagaaggccatcacggacgctgccatgatggcggaggagctgaagaaggagcaggacaccagcgcccaccttgagcggatgaagaagaacctggaacagacggtgaaggacctgcagcatcgtctagatgaggccgagcagctggcgctgaagggcgggaagaagcagatccagaaactggagaccaggatccgagagctggagtttgaacttgagggagagcagtgccaccacccncggcaggccttccctgacccgagccaggaacaaacaagggaccaagtgcacacattgctgagagccgtctcctgtgcctcccccgccccatccccggtcttcgtgttgtgtctgccaggctcaggcagaggcgcctgtccctgcttcttttctgaccgggaaataaatgcccctgaagg

SEQ ID NO: 309674 - DNA, 4131 bp, Homo sapiens
  misc_feature (3137)..(3137): n is a, c, g, or t
cggatcacctgaggtcgggagatcgagaccatcctggccaacatggtgaaaccccgtctctattaaaaatacagaaattagccaggtgtggtggcacgtgattgtagtcccagctactcaggaggctgaggcaggagaatcacttgaacccgggaggcagaggttgcagtgagccgagatcacgccactgcactccagcctggtgacagagcgagactccgtctcaaaaacataacaaaacaaaacaaaacaaaacaaaaattttagggggactaggctcctactcaaattacccataagatgaataggaactattgggccatggtagaatctggtctccccctgaatcccgccccatacagggcaagttcatccgaatccattttggaaccactgggaagctggcctctgcagatattgaaacttatcttctggaaaaatcaagagtcactttccagctgaaggctgaaagaagctaccacatcttctaccagattctttctaacaagaagcctgagctcatagagctgctgcttattacgaccaacccttacgactacccgttcattagccagggggagatcctggtggccagcatagatgatcgagaggagctgctggctacagacagcgccattgacatcctgggcttcaccccagaagagaaatctgggctctacaagctgacgggagccgtgatgcactacgggaacatgaagttcaagcagaagcagcgagaggagcaggccgagccggatggcacagaagtggctgacaaaacagcctatctgatgggcctgaactcttcggacctcctaaaagctttgtgctttcctagagtgaaagttgggaatgagtacgttaccaaaggtcaaactgtggatcaggttcaccatgctgtgaatgctctttcaaaatcagtttatgaaaagttgttcttgtggatggtcactcgcattaaccagcaactggatacgaagcttccaagacaacacttcattggtgttttggacattgcaggctttgaaatctttgagtataacagcctggagcagctgtgcatcaacttcaccaatgagaaactgcaacagtttttcaaccaccacatgttcgtgctggagcaggaggagtacaagaaggaaggcatcgagtggacgttcattgacttcgggatggacctggctgcctgcatcgagctcatcgagaagcctatgggcatcttctccatcctggaagaggagtgcatgttccccaaggcaacagacacctccttcaagaacaagctgtatgaccagcatcttggaaagtccaacaacttccagaagcccaaggtggtcaaaggcagggcagaggctcacttctcactgatccactatgcgggcaccgtggactacagtgtctcaggttggctggagaagaacaaggaccctctgaacgagactgtggttgggctgtaccagaagtcttccaacaggctcctggcacacctctatgccacgtttgccacggcggatgctgacagtggaaagaagaaagttgccaagaagaagggttcttccttccaaactgtctctgcccttttcagggaaaacctgaacaagctgatgtcaaatttaagaactactcaccctcattttgtgcgttgtataattcccaatgaaaccaaaactccaggggctatggaacacagccttgttctgcaccagctgcggtgtaacggtgtcctggagggcatccgcatctgcaggaaagggttcccaaacaggattctctatggagattttaaacaaagataccgagtgctgaatgccagtgcaatcctggagggacaattcattgacagcaagaaagcctgtgaaaagcttctggcatccattgatattgaccacactcagtacaaatttggacataccaaggtgttcttcaaggctggcttgctgggaaccctggaagagatgcgggatgaccgcctggccaaactaatcacccggacacaagctgtgtgcagagggttcctcatgcgtgtggaattccagaagatggtgcagaggagggagtccatcttctgcatccagtacaacattcgctcattcatgaacgtcaagcactggccctggatgaaactcttcttcaagatcaagcccctcctcaagagtgcggagactgagaaagagatggccaccatgaaggaagaattccagaaaaccaaagatgaactcgccaagtcggaggcaaaaaggaaggagctagaggaaaaactggtgactctggtccaagagaagaatgacctgcagctccaagtacaagctgaaagcgaaaatttgttggatgctgaggaaagatgcgatcagctgatcaaagccaaattccagctcgaggccaagatcaaggaggtgacagagagagctgaagatgaggaggagatcaatgctgagctgacggccaagaagaggaaactggaggatgaatgctcagagctcaagaaagacattgatgaccttgagttgaccctggccaaggttgagaaggagaagcatgccacggagaacaaggttaaaaaccttactgaggaactctccgggttagatgaaacaattgcaaagttaaccagagagaagaaggccctccaagaggcgcaccagcaggccttggatgacctccaagctgaagaagacaaagtcaattctttgaacaaaaccaagagcaaactggaacagcaagtggaagacctggaaagctccctagaacaagaaaagaagctccgcgtagacctggaaaggaacaaaaggaaattggaaggagacttgaagcttgctcaagagtccatattagatctggagaatgacaagcaacagctggacgaaaggctcaagaagaaagattttgaatattgtcaacttcaaagcaaagtggaagatgagcagacactgggcctccagtttcagaagaaaatcaaagagttgcaggctcgaattgaggagctggaagaggagatagaggcggagagggccacccgcgcgaagacagagaaacagcgcagcgactatgcccgggagctggaggagctgagcgagcggctggaggaggcgggaggcgtcacctccacgcagatagagctcaacaagaagcgggaggcngagttcctgaagctgcgcagggacctggaggaggccacactgcagcacgaagccatggtggccacgctgaggaagaagcatgcggatagtgtggccgagcttggggagcagattgacaacctgcagcgggtcaagcagaagctggagaaggagaagagcgagttcaagctggagatcgatgacctctccagcagcatggagagtgtgtcgaaatctaaggcaaatctggaaaaaatctgccgaaccctggaggatcagttaagtgaggccaggggcaagaatgaggaaattcagaggagcctgagcgagctgaccacacagaagtctcgtttgcagaccgaggctggtgagctgagtcgtcagctggaagaaaaagaaagcatagtatcccaactttccaggagcaagcaagcctttacccagcaaacagaagagctcaagaggcagctggaggaagagaacaaggccaagaacgccctggcgcacgccctgcagtcctcccgccacgactgtgacctgctgcgggaacagtatgaggaggagcaggaaggcaaagctgagctgcagagggcgctgtccaaggccaatagtgaggttgcccagtggagaaccaaatacgagacggacgccatccagcgcacagaagagctggaggaggccaagaaaaaacttgctcagcgccttcaagattccgaggaacaggttgaggcagtgaatgctaaatgtgcttcactggagaagaccaagcagaggctgcaaggagaggtggaggatctgatggttgatgttgaaagagccaattccttggccgccgctctggacaagaagcagaggaactttgacaagatggtggtccacgagagtgaagagtgagccagcccttctggagcaggacagaagatatgcaaaatgtatattttcttgattcctgaccattgatacttaatgtccatgtgactctttttcacatgcaataaactttgctttgtttcaa

SEQ ID NO: 309675 - DNA, 2398 bp, Homo sapiens
cggatcacctgaggtcgggagatcgagaccatcctggccaacatggtgaaaccccgtctctattaaaaatacagaaattagccaggtgtggtggcacgtgattgtagtcccagctactcaggaggctgaggcaggagaatcacttgaacccgggaggcagaggttgcagtgagccgagatcacgccactgcactccagcctggtgacagagcgagactccgtctcaaaaacataacaaaacaaaacaaaacaaaacaaaaattttagggggactaggctcctactcaaattacccataagatgaataggaactattgggccatggtagaatctggtctccccctgaatcccgccccatacagggcaagttcatccgaatccattttggaaccactgggaagctggcctctgcagatattgaaacttatcttctggaaaaatcaagagtcactttccagctgaaggctgaaagaagctaccacatcttctaccagattctttctaacaagaagcctgagctcatagagctgctgcttattacgaccaacccttacgactacccgttcattagccagggggagatcctggtggccagcatagatgatcgagaggagctgctggctacagacagcgccattgacatcctgggcttcaccccagaagagaaatctgggctctacaagctgacgggagccgtgatgcactacgggaacatgaagttcaagcagaagcagcgagaggagcaggccgagccggatggcacagaagtggctgacaaaacagcctatctgatgggcctgaactcttcggacctcctaaaagctttgtgctttcctagagtgaaagttgggaatgagtacgttaccaaaggtcaaactgtggatcaggttcaccatgctgtgaatgctctttcaaaatcagtttatgaaaagttgttcttgtggatggtcactcgcattaaccagcaactggatacgaagcttccaagacaacacttcattggtgttttggacattgcaggctttgaaatctttgagtataacagcctggagcagctgtgcatcaacttcaccaatgagaaactgcaacagtttttcaaccaccacatgttcgtgctggagcaggaggagtacaagaaggaaggcatcgagtggacgttcattgacttcgggatggacctggctgcctgcatcgagctcatcgagaagcctatgggcatcttctccatcctggaagaggagtgcatgttccccaaggcaacagacacctccttcaagaacaagctgtatgaccagcatcttggaaagtccaacaacttccagaagcccaaggtggtcaaaggcagggcagaggctcacttctcactgatccactatgcgggcaccgtggactacagtgtctcaggttggctggagaagaacaaggaccctctgaacgagactgtggttgggctgtaccagaagtcttccaacaggctcctggcacacctctatgccacgtttgccacggcggatgctgacagtggaaagaagaaagttgccaagaagaagggttcttccttccaaactgtctctgcccttttcagggaaaacctgaacaagctgatgtcaaatttaagaactactcaccctcattttgtgcgttgtataattcccaatgaaaccaaaactccaggggctatggaacacagccttgttctgcaccagctgcggtgtaacggtgtcctggagggcatccgcatctgcaggaaagggttcccaaacaggattctctatggagattttaaacaaagataccgagtgctgaatgccagtgcaatcctggagggacaattcattgacagcaagaaagcctgtgaaaagcttctggcatccattgatattgaccacactcagtacaaatttggacataccaaggtgttcttcaaggctggcttgctgggaaccctggaagagatgcgggatgaccgcctggccaaactaatcacccggacacaagctgtgtgcagagggttcctcatgcgtgtggaattccagaagatggtgcagaggagggagtccatcttctgcatccagtacaacattcgctcattcatgaacgtcaagcactggccctggatgaaactcttcttcaagatcaagcccctcctcaagagtgcggagactgagaaagagatggccaccatgaaggaagaattccagaaaaccaaagatgaactcgccaagtcggaggcaaaaaggaaggagctagaggaaaaactggtgactctggtccaagagaagaatgacctgcagctccaagtacaagctgaaacgggaaatttgttggatgctgaggttgcagtgagccgagatcgtgccactgcgctccagtctgggccacagagtaagactctatc

SEQ ID NO: 309676 - DNA, 1466 bp, Homo sapiens
cggatcacctgaggtcgggagatcgagaccatcctggccaacatggtgaaaccccgtctctattaaaaatacagaaattagccaggtgtggtggcacgtgattgtagtcccagctactcaggaggctgaggcaggagaatcacttgaacccgggaggcagaggttgcagtgagccgagatcacgccactgcactccagcctggtgacagagcgagactccgtctcaaaaacataacaaaacaaaacaaaacaaaacaaaaattttagggggactaggctcctactcaaattacccataagatgaataggaactattgggccatggtagaatctggtctccccctgaatcccgccccatacagggcaagttcatccgaatccattttggaaccactgggaagctggcctctgcagatattgaaacttatcttctggaaaaatcaagagtcactttccagctgaaggctgaaagaagctaccacatcttctaccagattctttctaacaagaagcctgagctcatagagctgctgcttattacgaccaacccttacgactacccgttcattagccagggggagatcctggtggccagcatagatgatcgagaggagctgctggctacagacagcgccattgacatcctgggcttcaccccagaagagaaatctgggctctacaagctgacgggagccgtgatgcactacgggaacatgaagttcaagcagaagcagcgagaggagcaggccgagccggatggcacagaagtggctgacaaaacagcctatctgatgggcctgaactcttcggacctcctaaaagctttgtgctttcctagagtgaaagttgggaatgagtacgttaccaaaggtcaaactgtggatcaggttcaccatgctgtgaatgctctttcaaaatcagtttatgaaaagttgttcttgtggatggtcactcgcattaaccagcaactggatacgaagcttccaagacaacacttcattggtgttttggacattgcaggctttgaaatctttgagtataacagcctggagcagctgtgcatcaacttcaccaatgagaaactgcaacagtttttcaaccaccacatgttcgtgctggagcaggaggagtacaagaaggaaggcatcgagtggacgttcattgacttcgggatggacctggctgcctgcatcgagctcatcgagaagcctatgggcatcttctccatcctggaagaggagtgcatgttccccaaggcaacagacacctccttcaagaacaagctgtatgaccagcatcttggaaagtccaacaacttccagaagcccaaggtggtcaaaggcaggccagcccttctggagcaggacagaagatatgcaaaatgtatattttcttgattcctgaccattgatacttaatgtccatgtgactctttttcacatgcaataaactttgctttgtttcaa

SEQ ID NO: 309677 - DNA, 483 bp, Homo sapiens
atgaattcgatgaatttatttttattactaggcgtttccccatctcatgtgtctttaaatgcggtgctgggccattagagggacctggcgttagcacattttattaaaacaaacagctttgatcttggtcagacacaaggcaagttattgatcccagattttgagtagacaggaaattctcctgggcgtataaaaacacatgggtgtctgaatcacatagattagtgattccaacttgatgaatagtgatgttcaagtggatggaaactgaaataacagctgcttctctttcatattctttaaggaaaaaacttgctcagcgccttcaagattccgaggaacaggttgaggcagtgaatgctaaatgtgcttcactggagaagaccaagcagaggctgcaaggagaggtggaggatctgatggttgatgttgaaagagccaattccttggccgccgctctggacaagaagcagaggaactttg

SEQ ID NO: 309678 - DNA, 351 bp, Homo sapiens
tctttgattctgaaagaagtctaacttttcacatgaatgttgtatttttttattagtataacagcctggagcagctgtgcatcaacttcaccaatgagaaactgcaacagtttttcaaccaccacatgttcgtgctggagcaggaggagtacaagaaggaaggcatcgagtggacgttcattgacttcgggatggacctggctgcctgcatcgagctcatcgagaaggtatccagttccatccccaccgtaagctcttctcatagactcttctgctcattactgcagctcatatttacctctctgcactttgccttgccttcaatccagcctatgggcatcttctccatcc

SEQ ID NO: 309679 - DNA, 545 bp, Homo sapiens
cgagaccaacctgaccaatatggagaaaccccatctctactaaaaatacaaaattagccgggcatggtagtgcatgcctgtagtcccaggtactcgggaggctgaggcaggagaatcacatgaacccgggaggtggaggttgcagtaagccaagatcgtgccattgcactgcagcctgggcaacaagagtgtaactccatctcaaaaaaaaatgtttcctcttcttccctcaatttcttgcattaggggactctggaagatcaaatcatcagtgccaatcccctgctggaggcctttgggaacgccaagactgtgaggaatgacaactcctcccgttttgtgagtctgagtttggttaagatggaatttgctttgtgcctcacaaaataggcaagagccctgtcctcaaagagtgtagagaccagaggcaacagatgatgaaaaacaaaacaacccaacaagaccatttcagataaagataaattcagaccaagttcaatgaacagcgtgtgtaagagaggaactgggggccaggcttgctttag

SEQ ID NO: 309680 - DNA, 471 bp, Homo sapiens
gaaaacctgaacaagctgatgtcaaatttaagaactactcaccctcattttgtgcgttgtataattcccaatgaaaccaaaactccaggtgagacacctgctggctcgctaggtggtgctcagtttttaagaaattctgtgtaaggctgatatctcgcttctgttcccaggggctatggaacacagccttgttctgcaccagctgcggtgtaacggtgtcctggagggcatccgcatctgcaggaaagggttcccaaacaggattctctatggagattttaaacaaaggtgtgtaataaacatgttctatatgcttggggatgagatgtacgaacactggaatttgagagggagaaagattcgtatgaaaagacctatttcgaaagaacagatatggacctccatgtaaactgaacaatctaccatttggccaagttatatatatttgtttcttccatgtttttctctgga

SEQ ID NO: 309681 - DNA, 608 bp, Homo sapiens
  misc_feature (38)..(38): n is a, c, g, or t
gaagaaagaaagaaagaaagaacgaaagaacgaaagancgaaagaaagaaagaaagaaagaaagagtgtatgagtgtgagtgtgtgtgcatggaagttggggcactgggcgtctgactccctccccacccaagagaggaaggacccctcaccacccccactggcgagacagtttactttgccgacttgccatgtttttgccaaaaccaagattttgaaggaaatgagtggccagcgccagggcccaggccatgtggcctgcccagcctcaatgtcacttggcggcggggtggggtgggggtgggcagcagcatcccagccttgagatgcttcactttccttctctgtaaccagactttgaaaaattgttcgtttcatcaggctctgttcctcaatggccttttgctacgtgcctcccgagaaatttgtctttttgtataaatgacaaagtgttgaaaatgtatttcctgaaataaatgtttcaaatgcagaaacccaaaaaaaaaaaacaaattgaggggatatatgaggggggacgaagcggtctgaatggcatgtgcataggcggtttctggacaagttttggccacgtggaaattggcggtccaa

SEQ ID NO: 309682 - DNA, 4455 bp, Homo sapiens
tgcctctgtcactgcagactaatgggacggaggggggtgacttctcagggttcctcctgggcaggtgctccggaaccttttctcagcacgctggcctggggcacggccgttcctcctgcccagccacgttggggtacagggtgaagaagggctggggccagcccaggacagaggaaggcgaggcaggcacgcaggaactgggctttttaaacccttaagcccaaggaaatcgtagcatcgcgggacagggaaaatgaaagactttggaagtcgtcaggaatttgactctgtgagttggtttccaagagtctaagttaagcatctccaagtggatattaaaaaggagcagcaagcctcggggcggcgggggctggaggaggtggagagaggaggctgccggaagccgcactcgggacctctgcagccaccgaccagaccgggcggccgggactctgggactctcgcaggcagacccggtggtctgccggactcctcggggcccacttcgggccctctctcctgcctcctatttttggatttctctcctttgctccctttttcctcccgttttgaagagacaatgctacttcagtttggagcacaaacatatgatcagcacatggaaatgtggtaattcggatgcattcgtgattgcaacagattgaagaaattagaccagacaaagagtgtttttagaggaggaggaggaggaggaggaggctgagagagggagggcgacgggggtgagaaaggggaggccgcctctgagcgggacgccgggactcccgccgctgctaaatatatccgtaggaatggagagggaccggatctcagccttgaaaagatcttttgaggtcgaggaggtcgagacacccaactccaccccaccccggagggtccagactcccctactccgagccactgtggccagctccacccagaaattccaggacctgggcgtgaagaactcagaaccctcggcccgccatgtggactccctaagccaacgctcccccaaggcgtccctgcggagggtggagctctcgggccccaaggcggccgagccggtgtcccggcgcactgagctgtccattgacatctcgtccaagcaggtggagaacgccggggccatcggcccgtcccggttcgggctcaagagggccgaggtgttgggccacaagacgccagaaccggcccctcggaggacggagatcaccatcgtcaaaccccaggagtcagcccaccggaggatggagccccctgcctccaaggtccccgaggtgcccactgcccctgccaccgacgcagcccccaagagggtggagatccagatgcccaagcctgctgaggcgcccaccgcccccagcccagcccagaccttggagaattcagagcctgcccctgtgtctcagctgcagagcaggctggagcccaagccccagccccctgtggctgaggctacaccccggagccaggaggccactgaggcggctcccagctgcgttggcgacatggccgacacccccagagatgccgggctcaagcaggcgcctgcatcacggaacgagaaggccccggtggacttcggctacgtggggattgactccatcctggagcagatgcgccggaaggccatgaagcagggcttcgagttcaacatcatggtggtcgggcagagcggcttgggtaaatccaccttaatcaacaccctcttcaaatccaaaatcagccggaagtcggtgcagcccacctcagaggagcgcatccccaagaccatcgagatcaagtccatcacgcacgatattgaggagaaaggcgtccggatgaagctgacagtgattgacacaccagggttcggggaccacatcaacaacgagaactgctggcagcccatcatgaagttcatcaatgaccagtacgagaaatacctgcaggaggaggtcaacatcaaccgcaagaagcgcatcccggacacccgcgtccactgctgcctctacttcatccccgccaccggccactccctcaggcccctggacatcgagtttatgaaacgcctgagcaaggtggtcaacatcgtccctgtcatcgccaaggcggacacactcaccctggaggagagggtccacttcaaacagcggatcaccgcagacctgctgtccaacggcatcgacgtgtacccccagaaggaatttgatgaggactcggaggaccggctggtgaacgagaagttccgggagatgatcccatttgctgtggtgggcagtgaccacgagtaccaggtcaacggcaagaggatccttgggaggaagaccaagtggggtaccatcgaagttgaaaacaccacacactgtgagtttgcctacctgcgggaccttctcatcaggacgcacatgcagaacatcaaggacatcaccagcagcatccacttcgaggcgtaccgtgtgaagcgcctcaacgagggcagcagcgccatggccaacggcgtggaggagaaggagccagaagccccggagatgtagacgccaccctgcccacccccgggatcctgcccccaagtcatttccgtcccccccccaggccctcccaccaccccattttattttatatgattttctccatttgtcatcgttccccaccccttcgacatgctgccaggaaacaagggaaggggcctccctccgagtgagtcagtgatgaggccgcggcctccccgaggttgtggggaggctgcactggagccacaggcaggggtgagagcacccactgaattgacatgaccctctgtccccaggcctggctccccgagggctcagaagagcagcttcggtgtgcagatcatccgtccgtgtggggttctcagtgccggaggccttggggtgggggccaggcctcgcacttgcagaggagcccagtgggctgcacgctcccctccatccccatcggccctgtcccctggagtgtgtcagagcccaggggagaatgcagcccaccaggagcacctggaccccctgcccgccacatggtgtggccatcactcagcccctacccctgccctgctcctaagggtagaaaactccagggtcccctgccaccgactgcccagccactccaagccccctggcagctgcccctcctggagcagaaagtgcctttatctcagccatccgcagactgctcggccagatgcggggacaggctggaatgagggaggcgtcttcatctccctgccatccccctctcacgccacccccgcccccaccgggctgcaggtgctgctgatgcgctgggatctgattgaggataaaaaggaaggagagatgacccctaccccctcatcccccagttttgaaaaggtctaagcaagtgagtctggtggaggagctgagggagggagccatggaaggtgccagaaggaaggttggcgggggcacgtgtgggccgtggcttgggctggtcagagtggcgtgagctgcccggcgcctgccctgcccaagtgaccagggaagtgtgtgtgtgtccatgtgtatgcgtgtccgtctgtctgtctagtgtctgggtttggcccaagactgggctgtagttacattaatgcccagccagccacccctgccactcacccctcctggcccaggccttgctgactctctgagctggggaggtgggaggccaggcgagcctgactctgttgatctacccgtgcctgggcccctcccctcagagcccatggtaacgaacccctagaaaggagagaacgggcgtcaggggtgcacagtccacagctgaagagcaaggtttcgtggcagcacggcccggcccctcaccctctgtccccacgaggggacccatgggggctgtctttgcagggcacagatgaccaaagtcccttcctgcttcctgttacctgtcttgctcctggggagaaagaggggcctgatgagactccactcaggtgcacacatcaccaggtgcatctgcaggcaccgggctggctgcttgcagccaggagaaggtcagcgagaaggagtgtatgagtgtgagtgtgtgtgcatggaagttggggcactgggcgtctgactccctccccacccaagagaggaaggacccctcaccacccccactggcgagacagtttactttgccgacttgccatgtttttgccaaaaccaagattttgaaggaaatgagtggccagcgccagggcccaggccatgtggcctgcccagcctcaatgtcacttggcggcggggtggggtgggggtgggcagcagcatcccagccttgagatgcttcactttccttctctgtaaccagactttgaaaaattgttcgtttcatcaggctctgttcctcaatggccttttgctacgtgcctcccgagaaatttgtctttttgtataaatgacaaagtgttgaaaatgtatttcctgaaataaatgtttcaaatgcagaaaccca

SEQ ID NO: 309683 - DNA, 3937 bp, Homo sapiens
gtcagtatggaggaggcggaccttgagggagagtaggaattggattgcaagaggaaggagagccttctggccagcagcagccagcagcagtgggggaggctggaatgagctggctggagagggggctggggcataaggaggggcctgcctgtgaagatcatatgggccaggctgtggagggccaggcatgcccgccgggagtgcagctggtccacgggaagcatctggagtggctgggaatgggcgcaggagcagcgccgtgggagcacaggtctctttcccggggcggctcacctggtgtcttggttcctgcaagccttgaaaagatcttttgaggtcgaggaggtcgagacacccaactccaccccaccccggagggtccagactcccctactccgagccactgtggccagctccacccagaaattccaggacctgggcgtgaagaactcagaaccctcggcccgccatgtggactccctaagccaacgctcccccaaggcgtccctgcggagggtggagctctcgggccccaaggcggccgagccggtgtcccggcgcactgagctgtccattgacatctcgtccaagcaggtggagaacgccggggccatcggcccgtcccggttcgggctcaagagggccgaggtgttgggccacaagacgccagaaccggcccctcggaggacggagatcaccatcgtcaaaccccaggagtcagcccaccggaggatggagccccctgcctccaaggtccccgaggtgcccactgcccctgccaccgacgcagcccccaagagggtggagatccagatgcccaagcctgctgaggcgcccaccgcccccagcccagcccagaccttggagaattcagagcctgcccctgtgtctcagctgcagagcaggctggagcccaagccccagccccctgtggctgaggctacaccccggagccaggaggccactgaggcggctcccagctgcgttggcgacatggccgacacccccagagatgccgggctcaagcaggcgcctgcatcacggaacgagaaggccccggtggacttcggctacgtggggattgactccatcctggagcagatgcgccggaaggccatgaagcagggcttcgagttcaacatcatggtggtcgggcagagcggcttgggtaaatccaccttaatcaacaccctcttcaaatccaaaatcagccggaagtcggtgcagcccacctcagaggagcgcatccccaagaccatcgagatcaagtccatcacgcacgatattgaggagaaaggcgtccggatgaagctgacagtgattgacacaccagggttcggggaccacatcaacaacgagaactgctggcagcccatcatgaagttcatcaatgaccagtacgagaaatacctgcaggaggaggtcaacatcaaccgcaagaagcgcatcccggacacccgcgtccactgctgcctctacttcatccccgccaccggccactccctcaggcccctggacatcgagtttatgaaacgcctgagcaaggtggtcaacatcgtccctgtcatcgccaaggcggacacactcaccctggaggagagggtccacttcaaacagcggatcaccgcagacctgctgtccaacggcatcgacgtgtacccccagaaggaatttgatgaggactcggaggaccggctggtgaacgagaagttccgggagatgatcccatttgctgtggtgggcagtgaccacgagtaccaggtcaacggcaagaggatccttgggaggaagaccaagtggggtaccatcgaagttgaaaacaccacacactgtgagtttgcctacctgcgggaccttctcatcaggacgcacatgcagaacatcaaggacatcaccagcagcatccacttcgaggcgtaccgtgtgaagcgcctcaacgagggcagcagcgccatggccaacggcgtggaggagaaggagccagaagccccggagatgtagacgccaccctgcccacccccgggatcctgcccccaagtcatttccgtcccccccccaggccctcccaccaccccattttattttatatgattttctccatttgtcatcgttccccaccccttcgacatgctgccaggaaacaagggaaggggcctccctccgagtgagtcagtgatgaggccgcggcctccccgaggttgtggggaggctgcactggagccacaggcaggggtgagagcacccactgaattgacatgaccctctgtccccaggcctggctccccgagggctcagaagagcagcttcggtgtgcagatcatccgtccgtgtggggttctcagtgccggaggccttggggtgggggccaggcctcgcacttgcagaggagcccagtgggctgcacgctcccctccatccccatcggccctgtcccctggagtgtgtcagagcccaggggagaatgcagcccaccaggagcacctggaccccctgcccgccacatggtgtggccatcactcagcccctacccctgccctgctcctaagggtagaaaactccagggtcccctgccaccgactgcccagccactccaagccccctggcagctgcccctcctggagcagaaagtgcctttatctcagccatccgcagactgctcggccagatgcggggacaggctggaatgagggaggcgtcttcatctccctgccatccccctctcacgccacccccgcccccaccgggctgcaggtgctgctgatgcgctgggatctgattgaggataaaaaggaaggagagatgacccctaccccctcatcccccagttttgaaaaggtctaagcaagtgagtctggtggaggagctgagggagggagccatggaaggtgccagaaggaaggttggcgggggcacgtgtgggccgtggcttgggctggtcagagtggcgtgagctgcccggcgcctgccctgcccaagtgaccagggaagtgtgtgtgtgtccatgtgtatgcgtgtccgtctgtctgtctagtgtctgggtttggcccaagactgggctgtagttacattaatgcccagccagccacccctgccactcacccctcctggcccaggccttgctgactctctgagctggggaggtgggaggccaggcgagcctgactctgttgatctacccgtgcctgggcccctcccctcagagcccatggtaacgaacccctagaaaggagagaacgggcgtcaggggtgcacagtccacagctgaagagcaaggtttcgtggcagcacggcccggcccctcaccctctgtccccacgaggggacccatgggggctgtctttgcagggcacagatgaccaaagtcccttcctgcttcctgttacctgtcttgctcctggggagaaagaggggcctgatgagactccactcaggtgcacacatcaccaggtgcatctgcaggcaccgggctggctgcttgcagccaggagaaggtcagcgagaaggagtgtatgagtgtgagtgtgtgtgcatggaagttggggcactgggcgtctgactccctccccacccaagagaggaaggacccctcaccacccccactggcgagacagtttactttgccgacttgccatgtttttgccaaaaccaagattttgaaggaaatgagtggccagcgccagggcccaggccatgtggcctgcccagcctcaatgtcacttggcggcggggtggggtgggggtgggcagcagcatcccagccttgagatgcttcactttccttctctgtaaccagactttgaaaaattgttcgtttcatcaggctctgttcctcaatggccttttgctacgtgcctcccgagaaatttgtctttttgtataaatgacaaagtgttgaaaatgtatttcctgaaataaatgtttcaaatgcagaaaccca

SEQ ID NO: 309684 - DNA, 3793 bp, Homo sapiens
gccttcctactaccggcccaggattagcgccctgggagcgcgcgccccgctgcctcgccgccacactttcctgggagcggcggccacggaggcaccatgaagaagtcttactcaggaggcacgcggacctccagtggccggctccggaggcttggtgactccagtggcccagccttgaaaagatcttttgaggtcgaggaggtcgagacacccaactccaccccaccccggagggtccagactcccctactccgagccactgtggccagctccacccagaaattccaggacctgggcgtgaagaactcagaaccctcggcccgccatgtggactccctaagccaacgctcccccaaggcgtccctgcggagggtggagctctcgggccccaaggcggccgagccggtgtcccggcgcactgagctgtccattgacatctcgtccaagcaggtggagaacgccggggccatcggcccgtcccggttcgggctcaagagggccgaggtgttgggccacaagacgccagaaccggcccctcggaggacggagatcaccatcgtcaaaccccaggagtcagcccaccggaggatggagccccctgcctccaaggtccccgaggtgcccactgcccctgccaccgacgcagcccccaagagggtggagatccagatgcccaagcctgctgaggcgcccaccgcccccagcccagcccagaccttggagaattcagagcctgcccctgtgtctcagctgcagagcaggctggagcccaagccccagccccctgtggctgaggctacaccccggagccaggaggccactgaggcggctcccagctgcgttggcgacatggccgacacccccagagatgccgggctcaagcaggcgcctgcatcacggaacgagaaggccccggtggacttcggctacgtggggattgactccatcctggagcagatgcgccggaaggccatgaagcagggcttcgagttcaacatcatggtggtcgggcagagcggcttgggtaaatccaccttaatcaacaccctcttcaaatccaaaatcagccggaagtcggtgcagcccacctcagaggagcgcatccccaagaccatcgagatcaagtccatcacgcacgatattgaggagaaaggcgtccggatgaagctgacagtgattgacacaccagggttcggggaccacatcaacaacgagaactgctggcagcccatcatgaagttcatcaatgaccagtacgagaaatacctgcaggaggaggtcaacatcaaccgcaagaagcgcatcccggacacccgcgtccactgctgcctctacttcatccccgccaccggccactccctcaggcccctggacatcgagtttatgaaacgcctgagcaaggtggtcaacatcgtccctgtcatcgccaaggcggacacactcaccctggaggagagggtccacttcaaacagcggatcaccgcagacctgctgtccaacggcatcgacgtgtacccccagaaggaatttgatgaggactcggaggaccggctggtgaacgagaagttccgggagatgatcccatttgctgtggtgggcagtgaccacgagtaccaggtcaacggcaagaggatccttgggaggaagaccaagtggggtaccatcgaagttgaaaacaccacacactgtgagtttgcctacctgcgggaccttctcatcaggacgcacatgcagaacatcaaggacatcaccagcagcatccacttcgaggcgtaccgtgtgaagcgcctcaacgagggcagcagcgccatggccaacggcgtggaggagaaggagccagaagccccggagatgtagacgccaccctgcccacccccgggatcctgcccccaagtcatttccgtcccccccccaggccctcccaccaccccattttattttatatgattttctccatttgtcatcgttccccaccccttcgacatgctgccaggaaacaagggaaggggcctccctccgagtgagtcagtgatgaggccgcggcctccccgaggttgtggggaggctgcactggagccacaggcaggggtgagagcacccactgaattgacatgaccctctgtccccaggcctggctccccgagggctcagaagagcagcttcggtgtgcagatcatccgtccgtgtggggttctcagtgccggaggccttggggtgggggccaggcctcgcacttgcagaggagcccagtgggctgcacgctcccctccatccccatcggccctgtcccctggagtgtgtcagagcccaggggagaatgcagcccaccaggagcacctggaccccctgcccgccacatggtgtggccatcactcagcccctacccctgccctgctcctaagggtagaaaactccagggtcccctgccaccgactgcccagccactccaagccccctggcagctgcccctcctggagcagaaagtgcctttatctcagccatccgcagactgctcggccagatgcggggacaggctggaatgagggaggcgtcttcatctccctgccatccccctctcacgccacccccgcccccaccgggctgcaggtgctgctgatgcgctgggatctgattgaggataaaaaggaaggagagatgacccctaccccctcatcccccagttttgaaaaggtctaagcaagtgagtctggtggaggagctgagggagggagccatggaaggtgccagaaggaaggttggcgggggcacgtgtgggccgtggcttgggctggtcagagtggcgtgagctgcccggcgcctgccctgcccaagtgaccagggaagtgtgtgtgtgtccatgtgtatgcgtgtccgtctgtctgtctagtgtctgggtttggcccaagactgggctgtagttacattaatgcccagccagccacccctgccactcacccctcctggcccaggccttgctgactctctgagctggggaggtgggaggccaggcgagcctgactctgttgatctacccgtgcctgggcccctcccctcagagcccatggtaacgaacccctagaaaggagagaacgggcgtcaggggtgcacagtccacagctgaagagcaaggtttcgtggcagcacggcccggcccctcaccctctgtccccacgaggggacccatgggggctgtctttgcagggcacagatgaccaaagtcccttcctgcttcctgttacctgtcttgctcctggggagaaagaggggcctgatgagactccactcaggtgcacacatcaccaggtgcatctgcaggcaccgggctggctgcttgcagccaggagaaggtcagcgagaaggagtgtatgagtgtgagtgtgtgtgcatggaagttggggcactgggcgtctgactccctccccacccaagagaggaaggacccctcaccacccccactggcgagacagtttactttgccgacttgccatgtttttgccaaaaccaagattttgaaggaaatgagtggccagcgccagggcccaggccatgtggcctgcccagcctcaatgtcacttggcggcggggtggggtgggggtgggcagcagcatcccagccttgagatgcttcactttccttctctgtaaccagactttgaaaaattgttcgtttcatcaggctctgttcctcaatggccttttgctacgtgcctcccgagaaatttgtctttttgtataaatgacaaagtgttgaaaatgtatttcctgaaataaatgtttcaaatgcagaaaccca

SEQ ID NO: 309685 - DNA, 3984 bp, Homo sapiens
ccccaggcctggccttgacaggcgggcggagcagccagtgcgagacagggaggccggtgcgggtgcgggaacctgatccgcccgggaggcgggggcggggcgggggcgcagcgcgcggggaggggccggcgcccgccttcctcccccattcattcagctgagccagggggcctaggggctcctccggcggctagctctgcactgcaggagcgcgggcgcggcgccccagccagcgcgcagggcccgggccccgccgggggcgcttcctcgccgctgccctccgcgcgacccgctgcccaccagccatcatgtcggaccccgcggtcaacgcgcagctggatgggatcatttcggacttcgaagccttgaaaagatcttttgaggtcgaggaggtcgagacacccaactccaccccaccccggagggtccagactcccctactccgagccactgtggccagctccacccagaaattccaggacctgggcgtgaagaactcagaaccctcggcccgccatgtggactccctaagccaacgctcccccaaggcgtccctgcggagggtggagctctcgggccccaaggcggccgagccggtgtcccggcgcactgagctgtccattgacatctcgtccaagcaggtggagaacgccggggccatcggcccgtcccggttcgggctcaagagggccgaggtgttgggccacaagacgccagaaccggcccctcggaggacggagatcaccatcgtcaaaccccaggagtcagcccaccggaggatggagccccctgcctccaaggtccccgaggtgcccactgcccctgccaccgacgcagcccccaagagggtggagatccagatgcccaagcctgctgaggcgcccaccgcccccagcccagcccagaccttggagaattcagagcctgcccctgtgtctcagctgcagagcaggctggagcccaagccccagccccctgtggctgaggctacaccccggagccaggaggccactgaggcggctcccagctgcgttggcgacatggccgacacccccagagatgccgggctcaagcaggcgcctgcatcacggaacgagaaggccccggtggacttcggctacgtggggattgactccatcctggagcagatgcgccggaaggccatgaagcagggcttcgagttcaacatcatggtggtcgggcagagcggcttgggtaaatccaccttaatcaacaccctcttcaaatccaaaatcagccggaagtcggtgcagcccacctcagaggagcgcatccccaagaccatcgagatcaagtccatcacgcacgatattgaggagaaaggcgtccggatgaagctgacagtgattgacacaccagggttcggggaccacatcaacaacgagaactgctggcagcccatcatgaagttcatcaatgaccagtacgagaaatacctgcaggaggaggtcaacatcaaccgcaagaagcgcatcccggacacccgcgtccactgctgcctctacttcatccccgccaccggccactccctcaggcccctggacatcgagtttatgaaacgcctgagcaaggtggtcaacatcgtccctgtcatcgccaaggcggacacactcaccctggaggagagggtccacttcaaacagcggatcaccgcagacctgctgtccaacggcatcgacgtgtacccccagaaggaatttgatgaggactcggaggaccggctggtgaacgagaagttccgggagatgatcccatttgctgtggtgggcagtgaccacgagtaccaggtcaacggcaagaggatccttgggaggaagaccaagtggggtaccatcgaagttgaaaacaccacacactgtgagtttgcctacctgcgggaccttctcatcaggacgcacatgcagaacatcaaggacatcaccagcagcatccacttcgaggcgtaccgtgtgaagcgcctcaacgagggcagcagcgccatggccaacggcgtggaggagaaggagccagaagccccggagatgtagacgccaccctgcccacccccgggatcctgcccccaagtcatttccgtcccccccccaggccctcccaccaccccattttattttatatgattttctccatttgtcatcgttccccaccccttcgacatgctgccaggaaacaagggaaggggcctccctccgagtgagtcagtgatgaggccgcggcctccccgaggttgtggggaggctgcactggagccacaggcaggggtgagagcacccactgaattgacatgaccctctgtccccaggcctggctccccgagggctcagaagagcagcttcggtgtgcagatcatccgtccgtgtggggttctcagtgccggaggccttggggtgggggccaggcctcgcacttgcagaggagcccagtgggctgcacgctcccctccatccccatcggccctgtcccctggagtgtgtcagagcccaggggagaatgcagcccaccaggagcacctggaccccctgcccgccacatggtgtggccatcactcagcccctacccctgccctgctcctaagggtagaaaactccagggtcccctgccaccgactgcccagccactccaagccccctggcagctgcccctcctggagcagaaagtgcctttatctcagccatccgcagactgctcggccagatgcggggacaggctggaatgagggaggcgtcttcatctccctgccatccccctctcacgccacccccgcccccaccgggctgcaggtgctgctgatgcgctgggatctgattgaggataaaaaggaaggagagatgacccctaccccctcatcccccagttttgaaaaggtctaagcaagtgagtctggtggaggagctgagggagggagccatggaaggtgccagaaggaaggttggcgggggcacgtgtgggccgtggcttgggctggtcagagtggcgtgagctgcccggcgcctgccctgcccaagtgaccagggaagtgtgtgtgtgtccatgtgtatgcgtgtccgtctgtctgtctagtgtctgggtttggcccaagactgggctgtagttacattaatgcccagccagccacccctgccactcacccctcctggcccaggccttgctgactctctgagctggggaggtgggaggccaggcgagcctgactctgttgatctacccgtgcctgggcccctcccctcagagcccatggtaacgaacccctagaaaggagagaacgggcgtcaggggtgcacagtccacagctgaagagcaaggtttcgtggcagcacggcccggcccctcaccctctgtccccacgaggggacccatgggggctgtctttgcagggcacagatgaccaaagtcccttcctgcttcctgttacctgtcttgctcctggggagaaagaggggcctgatgagactccactcaggtgcacacatcaccaggtgcatctgcaggcaccgggctggctgcttgcagccaggagaaggtcagcgagaaggagtgtatgagtgtgagtgtgtgtgcatggaagttggggcactgggcgtctgactccctccccacccaagagaggaaggacccctcaccacccccactggcgagacagtttactttgccgacttgccatgtttttgccaaaaccaagattttgaaggaaatgagtggccagcgccagggcccaggccatgtggcctgcccagcctcaatgtcacttggcggcggggtggggtgggggtgggcagcagcatcccagccttgagatgcttcactttccttctctgtaaccagactttgaaaaattgttcgtttcatcaggctctgttcctcaatggccttttgctacgtgcctcccgagaaatttgtctttttgtataaatgacaaagtgttgaaaatgtatttcctgaaataaatgtttcaaatgcagaaaccca

SEQ ID NO: 309686 - DNA, 3946 bp, Homo sapiens
  misc_feature (1)..(1): n is a, c, g, or t
  misc_feature (7)..(7): n is a, c, g, or t
  misc_feature (11)..(11): n is a, c, g, or t
  misc_feature (17)..(17): n is a, c, g, or t
  misc_feature (19)..(20): n is a, c, g, or t
  misc_feature (22)..(22): n is a, c, g, or t
ntcctgntcancctcananngntgttggcccggggccttcagtggcctttgtgtctgggtgagaggaaccctggatggccactctgccctgagtgtgtgggtccccagaagtgctgggttagggggcacggagggccagaaagtcccctttggagcgctggactctctcgctgactcctaccccaccccggcctggggtttcagagaaggggtccaggcaggagtgtcatcttttctcaatggggatgtggcttcagtctctgtccaggaggcacgcggacctccagtggccggctccggaggcttggtgactccagtggcccagccttgaaaagatcttttgaggtcgaggaggtcgagacacccaactccaccccaccccggagggtccagactcccctactccgagccactgtggccagctccacccagaaattccaggacctgggcgtgaagaactcagaaccctcggcccgccatgtggactccctaagccaacgctcccccaaggcgtccctgcggagggtggagctctcgggccccaaggcggccgagccggtgtcccggcgcactgagctgtccattgacatctcgtccaagcaggtggagaacgccggggccatcggcccgtcccggttcgggctcaagagggccgaggtgttgggccacaagacgccagaaccggcccctcggaggacggagatcaccatcgtcaaaccccaggagtcagcccaccggaggatggagccccctgcctccaaggtccccgaggtgcccactgcccctgccaccgacgcagcccccaagagggtggagatccagatgcccaagcctgctgaggcgcccaccgcccccagcccagcccagaccttggagaattcagagcctgcccctgtgtctcagctgcagagcaggctggagcccaagccccagccccctgtggctgaggctacaccccggagccaggaggccactgaggcggctcccagctgcgttggcgacatggccgacacccccagagatgccgggctcaagcaggcgcctgcatcacggaacgagaaggccccggtggacttcggctacgtggggattgactccatcctggagcagatgcgccggaaggccatgaagcagggcttcgagttcaacatcatggtggtcgggcagagcggcttgggtaaatccaccttaatcaacaccctcttcaaatccaaaatcagccggaagtcggtgcagcccacctcagaggagcgcatccccaagaccatcgagatcaagtccatcacgcacgatattgaggagaaaggcgtccggatgaagctgacagtgattgacacaccagggttcggggaccacatcaacaacgagaactgctggcagcccatcatgaagttcatcaatgaccagtacgagaaatacctgcaggaggaggtcaacatcaaccgcaagaagcgcatcccggacacccgcgtccactgctgcctctacttcatccccgccaccggccactccctcaggcccctggacatcgagtttatgaaacgcctgagcaaggtggtcaacatcgtccctgtcatcgccaaggcggacacactcaccctggaggagagggtccacttcaaacagcggatcaccgcagacctgctgtccaacggcatcgacgtgtacccccagaaggaatttgatgaggactcggaggaccggctggtgaacgagaagttccgggagatgatcccatttgctgtggtgggcagtgaccacgagtaccaggtcaacggcaagaggatccttgggaggaagaccaagtggggtaccatcgaagttgaaaacaccacacactgtgagtttgcctacctgcgggaccttctcatcaggacgcacatgcagaacatcaaggacatcaccagcagcatccacttcgaggcgtaccgtgtgaagcgcctcaacgagggcagcagcgccatggccaacggcgtggaggagaaggagccagaagccccggagatgtagacgccaccctgcccacccccgggatcctgcccccaagtcatttccgtcccccccccaggccctcccaccaccccattttattttatatgattttctccatttgtcatcgttccccaccccttcgacatgctgccaggaaacaagggaaggggcctccctccgagtgagtcagtgatgaggccgcggcctccccgaggttgtggggaggctgcactggagccacaggcaggggtgagagcacccactgaattgacatgaccctctgtccccaggcctggctccccgagggctcagaagagcagcttcggtgtgcagatcatccgtccgtgtggggttctcagtgccggaggccttggggtgggggccaggcctcgcacttgcagaggagcccagtgggctgcacgctcccctccatccccatcggccctgtcccctggagtgtgtcagagcccaggggagaatgcagcccaccaggagcacctggaccccctgcccgccacatggtgtggccatcactcagcccctacccctgccctgctcctaagggtagaaaactccagggtcccctgccaccgactgcccagccactccaagccccctggcagctgcccctcctggagcagaaagtgcctttatctcagccatccgcagactgctcggccagatgcggggacaggctggaatgagggaggcgtcttcatctccctgccatccccctctcacgccacccccgcccccaccgggctgcaggtgctgctgatgcgctgggatctgattgaggataaaaaggaaggagagatgacccctaccccctcatcccccagttttgaaaaggtctaagcaagtgagtctggtggaggagctgagggagggagccatggaaggtgccagaaggaaggttggcgggggcacgtgtgggccgtggcttgggctggtcagagtggcgtgagctgcccggcgcctgccctgcccaagtgaccagggaagtgtgtgtgtgtccatgtgtatgcgtgtccgtctgtctgtctagtgtctgggtttggcccaagactgggctgtagttacattaatgcccagccagccacccctgccactcacccctcctggcccaggccttgctgactctctgagctggggaggtgggaggccaggcgagcctgactctgttgatctacccgtgcctgggcccctcccctcagagcccatggtaacgaacccctagaaaggagagaacgggcgtcaggggtgcacagtccacagctgaagagcaaggtttcgtggcagcacggcccggcccctcaccctctgtccccacgaggggacccatgggggctgtctttgcagggcacagatgaccaaagtcccttcctgcttcctgttacctgtcttgctcctggggagaaagaggggcctgatgagactccactcaggtgcacacatcaccaggtgcatctgcaggcaccgggctggctgcttgcagccaggagaaggtcagcgagaaggagtgtatgagtgtgagtgtgtgtgcatggaagttggggcactgggcgtctgactccctccccacccaagagaggaaggacccctcaccacccccactggcgagacagtttactttgccgacttgccatgtttttgccaaaaccaagattttgaaggaaatgagtggccagcgccagggcccaggccatgtggcctgcccagcctcaatgtcacttggcggcggggtggggtgggggtgggcagcagcatcccagccttgagatgcttcactttccttctctgtaaccagactttgaaaaattgttcgtttcatcaggctctgttcctcaatggccttttgctacgtgcctcccgagaaatttgtctttttgtataaatgacaaagtgttgaaaatgtatttcctgaaataaatgtttcaaatgcagaaaccca

SEQ ID NO: 309687 - DNA, 3188 bp, Homo sapiens
tccagcgtcaggcccagcccctatagtgtcagctccctcctctggggacccccttgcttgtgcccctctgggtcccagcacatcccaggcctgcagggagggggagaggaagagactgactcactggccaggtcccccaggggctggagaggctggagaggcaggagctggatcagatctgaatccagaggctctcggaggaagagctcaggccactgaggcggctcccagctgcgttggcgacatggccgacacccccagagatgccgggctcaagcaggcgcctgcatcacggaacgagaaggccccggtggacttcggctacgtggggattgactccatcctggagcagatgcgccggaaggccatgaagcagggcttcgagttcaacatcatggtggtcgggcagagcggcttgggtaaatccaccttaatcaacaccctcttcaaatccaaaatcagccggaagtcggtgcagcccacctcagaggagcgcatccccaagaccatcgagatcaagtccatcacgcacgatattgaggagaaaggcgtccggatgaagctgacagtgattgacacaccagggttcggggaccacatcaacaacgagaactgctggcagcccatcatgaagttcatcaatgaccagtacgagaaatacctgcaggaggaggtcaacatcaaccgcaagaagcgcatcccggacacccgcgtccactgctgcctctacttcatccccgccaccggccactccctcaggcccctggacatcgagtttatgaaacgcctgagcaaggtggtcaacatcgtccctgtcatcgccaaggcggacacactcaccctggaggagagggtccacttcaaacagcggatcaccgcagacctgctgtccaacggcatcgacgtgtacccccagaaggaatttgatgaggactcggaggaccggctggtgaacgagaagttccgggagatgatcccatttgctgtggtgggcagtgaccacgagtaccaggtcaacggcaagaggatccttgggaggaagaccaagtggggtaccatcgaagttgaaaacaccacacactgtgagtttgcctacctgcgggaccttctcatcaggacgcacatgcagaacatcaaggacatcaccagcagcatccacttcgaggcgtaccgtgtgaagcgcctcaacgagggcagcagcgccatggccaacggcgtggaggagaaggagccagaagccccggagatgtagacgccaccctgcccacccccgggatcctgcccccaagtcatttccgtcccccccccaggccctcccaccaccccattttattttatatgattttctccatttgtcatcgttccccaccccttcgacatgctgccaggaaacaagggaaggggcctccctccgagtgagtcagtgatgaggccgcggcctccccgaggttgtggggaggctgcactggagccacaggcaggggtgagagcacccactgaattgacatgaccctctgtccccaggcctggctccccgagggctcagaagagcagcttcggtgtgcagatcatccgtccgtgtggggttctcagtgccggaggccttggggtgggggccaggcctcgcacttgcagaggagcccagtgggctgcacgctcccctccatccccatcggccctgtcccctggagtgtgtcagagcccaggggagaatgcagcccaccaggagcacctggaccccctgcccgccacatggtgtggccatcactcagcccctacccctgccctgctcctaagggtagaaaactccagggtcccctgccaccgactgcccagccactccaagccccctggcagctgcccctcctggagcagaaagtgcctttatctcagccatccgcagactgctcggccagatgcggggacaggctggaatgagggaggcgtcttcatctccctgccatccccctctcacgccacccccgcccccaccgggctgcaggtgctgctgatgcgctgggatctgattgaggataaaaaggaaggagagatgacccctaccccctcatcccccagttttgaaaaggtctaagcaagtgagtctggtggaggagctgagggagggagccatggaaggtgccagaaggaaggttggcgggggcacgtgtgggccgtggcttgggctggtcagagtggcgtgagctgcccggcgcctgccctgcccaagtgaccagggaagtgtgtgtgtgtccatgtgtatgcgtgtccgtctgtctgtctagtgtctgggtttggcccaagactgggctgtagttacattaatgcccagccagccacccctgccactcacccctcctggcccaggccttgctgactctctgagctggggaggtgggaggccaggcgagcctgactctgttgatctacccgtgcctgggcccctcccctcagagcccatggtaacgaacccctagaaaggagagaacgggcgtcaggggtgcacagtccacagctgaagagcaaggtttcgtggcagcacggcccggcccctcaccctctgtccccacgaggggacccatgggggctgtctttgcagggcacagatgaccaaagtcccttcctgcttcctgttacctgtcttgctcctggggagaaagaggggcctgatgagactccactcaggtgcacacatcaccaggtgcatctgcaggcaccgggctggctgcttgcagccaggagaaggtcagcgagaaggagtgtatgagtgtgagtgtgtgtgcatggaagttggggcactgggcgtctgactccctccccacccaagagaggaaggacccctcaccacccccactggcgagacagtttactttgccgacttgccatgtttttgccaaaaccaagattttgaaggaaatgagtggccagcgccagggcccaggccatgtggcctgcccagcctcaatgtcacttggcggcggggtggggtgggggtgggcagcagcatcccagccttgagatgcttcactttccttctctgtaaccagactttgaaaaattgttcgtttcatcaggctctgttcctcaatggccttttgctacgtgcctcccgagaaatttgtctttttgtataaatgacaaagtgttgaaaatgtatttcctgaaataaatgtttcaaatgcagaaaccca

SEQ ID NO: 309688 - DNA, 2084 bp, Homo sapiens
tccagcgtcaggcccagcccctatagtgtcagctccctcctctggggacccccttgcttgtgcccctctgggtcccagcacatcccaggcctgcagggagggggagaggaagagactgactcactggccaggtcccccaggggctggagaggctggagaggcaggagctggatcagatctgaatccagaggctctcggaggaagagctcaggccactgaggcggctcccagctgcgttggcgacatggccgacacccccagagatgccgggctcaagcaggcgcctgcatcacggaacgagaaggccccggtggacttcggctacgtggggattgactccatcctggagcagatgcgccggaaggccatgaagcagggcttcgagttcaacatcatggtggtcgggcagagcggcttgggtaaatccaccttaatcaacaccctcttcaaatccaaaatcagccggaagtcggtgcagcccacctcagaggagcgcatccccaagaccatcgagatcaagtccatcacgcacgatattgaggagaaaggcgtccggatgaagctgacagtgattgacacaccagggttcggggaccacatcaacaacgagaactgctggcagcccatcatgaagttcatcaatgaccagtacgagaaatacctgcaggaggaggtcaacatcaaccgcaagaagcgcatcccggacacccgcgtccactgctgcctctacttcatccccgccaccggccactcctgcccctcctggagcagaaagtgcctttatctcagccatccgcagactgctcggccagatgcggggacaggctggaatgagggaggcgtcttcatctccctgccatccccctctcacgccacccccgcccccaccgggctgcaggtgctgctgatgcgctgggatctgattgaggataaaaaggaaggagagatgacccctaccccctcatcccccagttttgaaaaggtctaagcaagtgagtctggtggaggagctgagggagggagccatggaaggtgccagaaggaaggttggcgggggcacgtgtgggccgtggcttgggctggtcagagtggcgtgagctgcccggcgcctgccctgcccaagtgaccagggaagtgtgtgtgtgtccatgtgtatgcgtgtccgtctgtctgtctagtgtctgggtttggcccaagactgggctgtagttacattaatgcccagccagccacccctgccactcacccctcctggcccaggccttgctgactctctgagctggggaggtgggaggccaggcgagcctgactctgttgatctacccgtgcctgggcccctcccctcagagcccatggtaacgaacccctagaaaggagagaacgggcgtcaggggtgcacagtccacagctgaagagcaaggtttcgtggcagcacggcccggcccctcaccctctgtccccacgaggggacccatgggggctgtctttgcagggcacagatgaccaaagtcccttcctgcttcctgttacctgtcttgctcctggggagaaagaggggcctgatgagactccactcaggtgcacacatcaccaggtgcatctgcaggcaccgggctggctgcttgcagccaggagaaggtcagcgagaaggagtgtatgagtgtgagtgtgtgtgcatggaagttggggcactgggcgtctgactccctccccacccaagagaggaaggacccctcaccacccccactggcgagacagtttactttgccgacttgccatgtttttgccaaaaccaagattttgaaggaaatgagtggccagcgccagggcccaggccatgtggcctgcccagcctcaatgtcacttggcggcggggtggggtgggggtgggcagcagcatcccagccttgagatgcttcactttccttctctgtaaccagactttgaaaaattgttcgtttcatcaggctctgttcctcaatggccttttgctacgtgcctcccgagaaatttgtctttttgtataaatgacaaagtgttgaaaatgtatttcctgaaataaatgtttcaaatgcagaaaccca

SEQ ID NO: 309689 - DNA, 2823 bp, Homo sapiens
tgcctctgtcactgcagactaatgggacggaggggggtgacttctcagggttcctcctgggcaggtgctccggaaccttttctcagcacgctggcctggggcacggccgttcctcctgcccagccacgttggggtacagggtgaagaagggctggggccagcccaggacagaggaaggcgaggcaggcacgcaggaactgggctttttaaacccttaagcccaaggaaatcgtagcatcgcgggacagggaaaatgaaagactttggaagtcgtcaggaatttgactctgtgagttggtttccaagagtctaagttaagcatctccaagtggatattaaaaaggagcagcaagcctcggggcggcgggggctggaggaggtggagagaggaggctgccggaagccgcactcgggacctctgcagccaccgaccagaccgggcggccgggactctgggactctcgcaggcagacccggtggtctgccggactcctcggggcccacttcgggccctctctcctgcctcctatttttggatttctctcctttgctccctttttcctcccgttttgaagagacaatgctacttcagtttggagcacaaacatatgatcagcacatggaaatgtggtaattcggatgcattcgtgattgcaacagattgaagaaattagaccagacaaagagtgtttttagaggaggaggaggaggaggaggaggctgagagagggagggcgacgggggtgagaaaggggaggccgcctctgagcgggacgccgggactcccgccgctgctaaatatatccgtaggaatggagagggaccggatctcagccttgaaaagatcttttgaggtcgaggaggtcgagacacccaactccaccccaccccggagggtccagactcccctactccgagccactgtggccagctccacccagaaattccaggacctgggcgtgaagaactcagaaccctcggcccgccatgtggactccctaagccaacgctcccccaaggcgtccctgcggagggtggagctctcgggccccaaggcggccgagccggtgtcccggcgcactgagctgtccattgacatctcgtccaagcaggtggagaacgccggggccatcggcccgtcccggttcgggctcaagagggccgaggtgttgggccacaagacgccagaaccggcccctcggaggacggagatcaccatcgtcaaaccccaggagtcagcccaccggaggatggagccccctgcctccaaggtccccgaggtgcccactgcccctgccaccgacgcagcccccaagagggtggagatccagatgcccaagcctgctgaggcgcccaccgcccccagcccagcccagaccttggagaattcagagcctgcccctgtgtctcagctgcagagcaggctggagcccaagccccagccccctgtggctgaggctacaccccggagccaggaggccactgaggcggctcccagctgcgttggcgacatggccgacacccccagagatgccgggctcaagcaggcgcctgcatcacggaacgagaaggccccggtggacttcggctacgtggggattgactccatcctggagcagatgcgccggaaggccatgaagcagggcttcgagttcaacatcatggtggtcgggcagagcggcttgggtaaatccaccttaatcaacaccctcttcaaatccaaaatcagccggaagtcggtgcagcccacctcagaggagcgcatccccaagaccatcgagatcaagtccatcacgcacgatattgaggagaaaggcgtccggatgaagctgacagtgattgacacaccagggttcggggaccacatcaacaacgagaactgctggcagcccatcatgaagttcatcaatgaccagtacgagaaatacctgcaggaggaggtcaacatcaaccgcaagaagcgcatcccggacacccgcgtccactgctgcctctacttcatccccgccaccggccactccctcaggcccctggacatcgagtttatgaaacgcctgagcaaggtggtcaacatcgtccctgtcatcgccaaggcggacacactcaccctggaggagagggtccacttcaaacagcggatcaccgcagacctgctgtccaacggcatcgacgtgtacccccagaaggaatttgatgaggactcggaggaccggctggtgaacgagaagttccgggagatgatcccatttgctgtggtgggcagtgaccacgagtaccaggtcaacggcaagaggatccttgggaggaagaccaagtggggtaccatcgaagttgaaaacaccacacactgtgagtttgcctacctgcgggaccttctcatcaggacgcacatgcagaacatcaaggacatcaccagcagcatccacttcgaggcgtaccgtgtgaagcgcctcaacgagggcagcagcgccatggccaacggcgtggaggagaaggagccagaagccccggagatgtagacgccaccctgcccacccccgggatcctgcccccaagtcatttccgtcccccccccaggccctcccaccaccccattttattttatatgattttctccatttgtcatcgttccccaccatcccagccttgagatgcttcactttccttctctgtaaccagactttgaaaaattgttcgtttcatcaggctctgttcctcaatggccttttgctacgtgcctcccgagaaatttgtctttttgtataaatgacaaagtgttgaaaatgtatttcctgaaataaatgtttcaaatgcagaaaccca

SEQ ID NO: 309690 - DNA, 712 bp, Homo sapiens
gcagtaactcgggtataggtacgaggctgggtgtcgctgaagagcaaggtttcgtggcagcacggcccggcccctcaccctctgtccccacgaggggacccatgggggctgtctttgcagggcacagatgaccaaagtcccttcctgcttcctgttacctgtcttgctcctggggagaaagaggggcctgatgagactccactcaggtgcacacatcaccaggtgcatctgcaggcaccgggctggctgcttgcagccaggagaaggtcagcgagaaggagtgtatgagtgtgagtgtgtgtgcatggaagttggggcactgggcgtctgactccctccccacccaagagaggaaggacccctcaccacccccactggcgagacagtttactttgccgacttgccatgtttttgccaaaaccaagattttgaaggaaatgagtggccagcgccagggcccaggccatgtggcctgcccagcctcaatgtcacttggcggcggggtggggtgggggtgggcagcagcatcccagccttgagatgcttcactttccttctctgtaaccagactttgaaaaattgttcgtttcatcaggctctgttcctcaatggccttttgctacgtgcctcccgagaaatttgtctttttgtataaatgacaaagtgttgaaaatgtatttcctgaaataaatgtttcaaatgcagaaaccca

SEQ ID NO: 309691 - DNA, 2035 bp, Homo sapiens
ttttcgagcactgttggcctactggatgcgtgtccgtctgtctgtctagtgtctgggtttggcccaagactgggctgtagttacattaatgcccagccagccacccctgccactcacccctcctggcccaggccttgctgactctctgagctggggaggtgggaggccaggcgagcctgactctgttgatctacccgcgcctggccaactctctcacattttaaaacactactttctgctacaaaagtggcgtgtacaatgggaaatgtcacaaataaataccccaggaagacactcaaaagcccctgtgatgcccccccagccctggtcctggggtgtcggcctcgggtctccctcctggtgcggcatccttttaccactgcagttaactgggaggaaacgatccccatgcattgctctaaatcccgctggatctggttttgggggtgctgggctgctgcccaggagactggaaggggaggaaggtgtgtggcccctgagggcttccaaagcactctgtgctgtgaggatcccaccccgtgcgctcccagaaagtggccggtgtttttctgctccagcagggagcccaggtgaggttctctaggtaggtggaaaggtaggtggagcaggcttcaagagcagaacccagcagagcgccccggcttcctcccatcgccctcctactccctctcctcccctctcctcccctcccctcccatccttttgtaagcaaggaggggagaggcttccaccgaagttgggcccagctcaggtgtcctgagtggtgggaatctgtgcagggcccaggcgcatttcctgcccgggagcaggaatgctttacagatgttggagctgcctcaaggcatggccaggaggggccggagaagcagaaccagctgcataggggatgctgggctggtgcctgcacatggaacagtcattgattaaaatgtcacttgtaaggtgcctaaatcttcgggtcctcctccttggagagtcccaggtaagctgcgttccctgggctgattccaggctgggccaggcggggctgggctgcagacctctggggactgcctacccaaccccacaccaccaggctccctgctcctcctgaaggccttggccttcagtaaaatgcaaaaagttaaatgctctgggttttctctgataatagaagcaatgcctgtccattgtagaatgttgggaaaatagagaagagcaagagcaacaacaggcacggaactccacccctgccggtcagcctgcctgtgcgtgggagttaaaacaaaacgcttctgcaaacatttgtttttttttgtttttccaaaattaagctccgattgtgcatatcacttgataatcgaaattattttttgaaaaataattttaatagctatgcagtactccatcctgtcaacatatggaatgaaatgatgatttctaaattcttactcttgtcacctgggctgcagttggaggcctggtgggggtccgtgcggcgactggctgggccgtccctgtccctcctcccagatgacagaggtgcctggtgtttggcaaactcacttagaaggagcaagaagcaactgggatggctcagaagcccatggtggaatagtctgttgtaaacgaagagacaagaggaggccgagggctggtttccccttctccttcccgctcccagccctcccctctttcccatcgagtctctggtctctgccttcaggcccatggatgggcaaagcatctttcgagagcttgcctgccaaccctcagagtcacatacacgaaggtctcctggagctcagaaggtcagacacaaagtcactccttgaccctatttattgaaatatccgtttttttgagcacttttcccgtgtagactcaacagggtctccctctgttgcccaggctggagtgcagtggtgcgatcatggctcactgcagccttgaactcctgagctcaagcaatcctgctgcctcagttctccgagtagctgggaccacatgtgtaagtcactaagcctggctaatt

SEQ ID NO: 309692 - DNA, 764 bp, Homo sapiens
gcgtgtggcagctccttggcgtccctcccgtgccttcaggttgcttctgcgccgggcctgccgctgggcgcccctatctctgcctgccccctcctcctgctcccctcgccctgcccccttggagcaattccccaccgagcctcccttcccaggcagtcgaggtccctccctacctctgccccgcgctctgggaggctccttgttccgcgaccacaaagcccctttgatcctctgctcggctctgagccatgtgacccggtgggcgggaagcgcacgatggcgcgtccagcgcagcccgacgttccgctgctgggccactgaggcggctcccagctgcgttggcgacatggccgacacccccagagatgccgggctcaagcaggcgcctgcatcacggaacgagaaggccccggtggacttcggctacgtggggattgactccatcctggagcagatgcgccggaaggccatgaagcagggcttcgagttcaacatcatggtggtcgggcagagcggcttgggtaaatccaccttaatcaacaccctcttcaaatccaaaatcagccggaagtcggtgcagcccacctcagaggagcgcatccccaagaccatcgagatcaagtccatcacgcacgatattgaggagaaaggcgtccggatgaagctgacagtgattgacacaccagggttcggggaccacatcaacaacgagaactggacgcgccatcgtgcgcttcgggatcctctagatcagcctgcgacac

SEQ ID NO: 309693 - DNA, 1344 bp, Homo sapiens
gcgtgtggcagctccttggcgtccctcccgtgccttcaggttgcttctgcgccgggcctgccgctgggcgcccctatctctgcctgccccctcctcctgctcccctcgccctgcccccttggagcaattccccaccgagcctcccttcccaggcagtcgaggtccctccctacctctgccccgcgctctgggaggctccttgttccgcgaccacaaagcccctttgatcctctgctcggctctgagccatgtgacccggtgggcgggaagcgcacgatggcgcgtccagcgcagcccgacgttccgctgctggggtgagtcctgctcctttgttcttcccagccttgcaccactggctcgggggctctcaggtggcgcggccgcgaggcggaccctgatggccatggtggcggtgccgggagccacgctgtccctgggccccggcccgaggccggcaggaccgagcggggtccccaggagaggggtggcggggagctcgatctccacgcggggaccagattttcggcctcaaaatagaagaatagggctttgtgtggtcacagctatctctttgtaaatatttggccaactaagctgagtggctaagttctcctgctgcccggagcttcttggaacatgtttccttttcgcaaggggtttccctggcttccaggagggccaggaagaaattcgaattggccaccgctttctctaaaatcactccgctcaagttatcacccctctgggctcccgaagaccggctggctggaggctggagatagtctcaatgctcgaaatgccgtaaccgaagctccccgcggcgccggcactgggatccagggagctgctgctacagcgcagctctggattcctggatgtgttggatatgtgcagggcgttcctgggaggagcggggagggagggtgctgctggcggggctggtctgcgtgtgctttgcttctctacaatggcatgctgcgtgtcggccatgcagaggcatgtcagtgagcaggggctgagggatctccctaacggacctgctttcagagggtcttttcatgctgggagaaccccagagactaaatcatgcagccaacggggtggtccccggcctcaaagcagggaggggcgaggagctttgtaggcaatgccatctgctcctgaaacgccgtcccagtgactctggggactgactcagcctccagcctgctgcacttcatccctggcccctctctctttgctttttcatgtgaaatctgctgtgttttggtcagaggtttggggaacagctctctgctcatctaagataagtttgtaattcctttcctggagaaaaatatgcca

SEQ ID NO: 309694 - DNA, 759 bp, Homo sapiens
gcgtgtggcagctccttggcgtccctcccgtgccttcaggttgcttctgcgccgggcctgccgctgggcgcccctatctctgcctgccccctcctcctgctcccctcgccctgcccccttggagcaattccccaccgagcctcccttcccaggcagtcgaggtccctccctacctctgccccgcgctctgggaggctccttgttccgcgaccacaaagcccctttgatcctctgctcggctctgagccatgtgacccggtgggcgggaagcgcacgatggcgcgtccagcgcagcccgacgttccgctgctgggccactgaggcggctcccagctgcgttggcgacatggccgacacccccagagatgccgggctcaagcaggcgcctgcatcacggaacgagaaggccccggtggacttcggctacgtggggattgactccatcctggagcagatgcgccggaaggccatgaagcagggcttcgagttcaacatcatggtggtcgggcagagcggcttgggtaaatccaccttaatcaacaccctcttcaaatccaaaatcagccggaagtcggtgcagcccacctcagaggagcgcatccccaagaccatcgagatcaagtccatcacgcacgatattgaggagaaaggcgtccggatgaagctgacagtgattgacacaccagggttcggggaccacatcaacaacgagaactgatcttcgtgatcgcttcctggattaccatggatactcaagaa

SEQ ID NO: 309695 - DNA, 1734 bp, Homo sapiens
agcagggatctgaaggactttgcaggcacccagggagataggagaggaggagggagcagccctggccggacactgtcctcctagcattgcctgcatcagggactcactcagctttaagaagcccctttgtgggggacagggagcatctgttagtttataggacctgaagtgcccccatgggctcaagtttctgggaaggcctgcaggtggccgtagggctgccgcaggggtgctggccccagggtctggattcaggggagcctgcagagggagggcagctggaggctgctccagtgtgcattgttacgaggcaaagtaaggagactgctgggcccacgctgggccggggtggatggaggcaaggaagtcttcgccggggcaagggcaccagctgtagatgccggcagctttctcctggacacgggcctggaaggctgacagggtgtggtgagtgccaccggctcccctgccgtggcctggtcagtggcttcacaggcctccgtgggcaggaggaggatgaccttgcattctgcttggccaccattggcagtgacagacaaggtgtgtggggatgtggccatttcggtccgtgctctgagagccaggtgtgggttgggtttggggaagacaggggaatggcattgacttgaccctgagcactttgtcctggggtgcaggcccggctgtcactcccctggagctgggaatggcattgggcggtggctcagggtcccttgccccagcggcaccatctctgcatttggccagcaaggctgatgggacttgtgtggacatttctgggacgtagaccaggcagcatgacacacagggaggggtaggcagagaagggcggcccctgggtcttggtttccaagtcaggctttgcaagcctgctgtgtcaagccctctctcggcaccaggccaggtgggccagggtcagccctggggctgtgatgagtgtgagtgcccctaaagtgtgtcatgtccaatagctgcctcctctctgggcactgcctcccagccagatatcctacagcccccgtcccagccacagacagcaatctgattccctcatcctcggcaggtcctggggttggggtaagaatttgtcactaagtgcagatgttcccagagggtgctggctcagggctgcgtggattacagccctttcatccctgccttagacccacctgcaactctggagaaaagatggcccagtggacgcctgcggggaggagggagctggtccccaggatgagcagatttgggggcagtccccatcacgggaccggtgacctacttgccaccagcgccagtgaatggcagaggggccctggcataaggcctgggttcagaatgggaacctgcagagaaactgtcaaggtctcccgccacctgacacctccgcctggctgccaccctagaaacacccttgctgcaagaagatgggggagtttgtctggggcatggtctggcgacaccaacttgagaacctcaggcctaagtgttggcctctgggcctcagctgtcctctgagctgtaaagctggctcctgggcacttgtggaaaacactggactctttattttattttactttacattctgggatacatgtgcagaacgtgcaggtttgttacataggaatacaagtgccatagtggtttgctgcacccattggactcttcaatccagctccactagaaatgactgccttctttcccttcttccgtccc

SEQ ID NO: 309696 - DNA, 383 bp, Homo sapiens
tctagcggatcgctgatgctactccacaaacagagtgctaccttcacaaacagagtcagccacccctgccactcacccctcctggcccaggccttgctgactctctgagctggggaggtgggaggccaggcgagcctgactctgttgatctacccgtgcctgggcccctcccctcagagcccatggtaacgaacccctagaaaggagagaacgggcgtcaggggtgcacagtccacagctgaagagcaaggtttcgtggcagcacggcccggcccctcaccctctgtccccacgaggggacccatgggggctgtctttgcagggcacagatgaccaaagtcccttcctgcttcctgttaccttgtggaggtagcactaactta

SEQ ID NO: 309697 - DNA, 1002 bp, Homo sapiens
  misc_feature (182)..(182): n is a, c, g, or t
gccttcctactaccggcccaggattagcgccctgggagcgcgcgccccgctgcctcgccgccacactttcctgggagcggcggccacggaggcaccatgaagaagtcttactcaggaggcacgcggacctccagtggccggctccggaggcttggtgactccagtggcccagccttgaaaanatcttttgaggtcgagggagggagggagggagggagggagggaggagggagggagggagggagggagggagggaggagggagggagggagggagggagggagggaggagggagggagggagggagggagggagggaggagggagggagggagggagggagggagggaggagggagggagggagggagggagggagggaggagggagggagggagggagggagggagggaggagggagggagggagggagggagggagggaggagggagggagggagggagggagggagggaggagggagggagggagggagggagggagggaggagggagggagggagggagggagggagggaggagggagggagggagggagggagggagggaggagggagggagggagggagggagggagggaggagggagggagggagggagggagggagggaggagggagggagggagggagggagggagggaggagggagggagggagggagggagggagggaggagggagggagggagggagggagggagggaggagggagggagggagggagggagggagggaggagggagggagggagggagggagggagggaggagggagggagggagggagggagggagggaggagggagggagggagggagggagggagggaggagggagggagggagggagggagggagggaggagggagggagggagggagggagggagggaggagggagggagggagggagggagggagggaggagggagggagggagggagggagggagggaggagggagggagggagggagggagggagggagg

SEQ ID NO: 309698 - DNA, 676 bp, Homo sapiens
gcgtgtggcagctccttggcgtccctcccgtgccttcaggttgcttctgcgccgggcctgccgctgggcgcccctatctctgcctgccccctcctcctgctcccctcgccctgcccccttggagcaattccccaccgagcctcccttcccaggcagtcgaggtccctccctacctctgccccgcgctctgggaggctccttgttccgcgaccacaaagcccctttgatcctctgctcggctctgagccatgtgacccggtgggcgggaagcgcacgatggcgcgtccagcgcagcccgacgttccgctgctgggccactgaggcggctcccagctgcgttggcgacatggccgacacccccagagatgccgggctcaagcaggcgcctgcatcacggaacgagaaggccccggtggacttcggctacgtggggattgactccatcctggagcagatgcgccggaaggccatgaagcagggcttcgagttcaacatcatggtggtcggtgagtcctcaccttgcatgccactcaaccaatgccggaaaccagcctcagcccccagggcggcccacaagcctttgggcttggtcttcccttctgtaaaatggggcagcaaccctgacctcagacgcgccatcgtgcgcttcgggatcctctagatcagcctgcgacac

SEQ ID NO: 309699 - DNA, 3290 bp, Homo sapiens
gcgtgtggcagctccttggcgtccctcccgtgccttcaggttgcttctgcgccgggcctgccgctgggcgcccctatctctgcctgccccctcctcctgctcccctcgccctgcccccttggagcaattccccaccgagcctcccttcccaggcagtcgaggtccctccctacctctgccccgcgctctgggaggctccttgttccgcgaccacaaagcccctttgatcctctgctcggctctgagccatgtgacccggtgggcgggaagcgcacgatggcgcgtccagcgcagcccgacgttccgctgctgggccactgaggcggctcccagctgcgttggcgacatggccgacacccccagagatgccgggctcaagcaggcgcctgcatcacggaacgagaaggccccggtggacttcggctacgtggggattgactccatcctggagcagatgcgccggaaggccatgaagcagggcttcgagttcaacatcatggtggtcgggcagagcggcttgggtaaatccaccttaatcaacaccctcttcaaatccaaaatcagccggaagtcggtgcagcccacctcagaggagcgcatccccaagaccatcgagatcaagtccatcacgcacgatattgaggagaaaggcgtccggatgaagctgacagtgattgacacaccagggttcggggaccacatcaacaacgagaactgctggcagcccatcatgaagttcatcaatgaccagtacgagaaatacctgcaggaggaggtcaacatcaaccgcaagaagcgcatcccggacacccgcgtccactgctgcctctacttcatccccgccaccggccactccctcaggcccctggacatcgagtttatgaaacgcctgagcaaggtggtcaacatcgtccctgtcatcgccaaggcggacacactcaccctggaggagagggtccacttcaaacagcggatcaccgcagacctgctgtccaacggcatcgacgtgtacccccagaaggaatttgatgaggactcggaggaccggctggtgaacgagaagttccgggagatgatcccatttgctgtggtgggcagtgaccacgagtaccaggtcaacggcaagaggatccttgggaggaagaccaagtggggtaccatcgaagttgaaaacaccacacactgtgagtttgcctacctgcgggaccttctcatcaggacgcacatgcagaacatcaaggacatcaccagcagcatccacttcgaggcgtaccgtgtgaagcgcctcaacgagggcagcagcgccatggccaacggcgtggaggagaaggagccagaagccccggagatgtagacgccaccctgcccacccccgggatcctgcccccaagtcatttccgtcccccccccaggccctcccaccaccccattttattttatatgattttctccatttgtcatcgttccccaccccttcgacatgctgccaggaaacaagggaaggggcctccctccgagtgagtcagtgatgaggccgcggcctccccgaggttgtggggaggctgcactggagccacaggcaggggtgagagcacccactgaattgacatgaccctctgtccccaggcctggctccccgagggctcagaagagcagcttcggtgtgcagatcatccgtccgtgtggggttctcagtgccggaggccttggggtgggggccaggcctcgcacttgcagaggagcccagtgggctgcacgctcccctccatccccatcggccctgtcccctggagtgtgtcagagcccaggggagaatgcagcccaccaggagcacctggaccccctgcccgccacatggtgtggccatcactcagcccctacccctgccctgctcctaagggtagaaaactccagggtcccctgccaccgactgcccagccactccaagccccctggcagctgcccctcctggagcagaaagtgcctttatctcagccatccgcagactgctcggccagatgcggggacaggctggaatgagggaggcgtcttcatctccctgccatccccctctcacgccacccccgcccccaccgggctgcaggtgctgctgatgcgctgggatctgattgaggataaaaaggaaggagagatgacccctaccccctcatcccccagttttgaaaaggtctaagcaagtgagtctggtggaggagctgagggagggagccatggaaggtgccagaaggaaggttggcgggggcacgtgtgggccgtggcttgggctggtcagagtggcgtgagctgcccggcgcctgccctgcccaagtgaccagggaagtgtgtgtgtgtccatgtgtatgcgtgtccgtctgtctgtctagtgtctgggtttggcccaagactgggctgtagttacattaatgcccagccagccacccctgccactcacccctcctggcccaggccttgctgactctctgagctggggaggtgggaggccaggcgagcctgactctgttgatctacccgtgcctgggcccctcccctcagagcccatggtaacgaacccctagaaaggagagaacgggcgtcaggggtgcacagtccacagctgaagagcaaggtttcgtggcagcacggcccggcccctcaccctctgtccccacgaggggacccatgggggctgtctttgcagggcacagatgaccaaagtcccttcctgcttcctgttacctgtcttgctcctggggagaaagaggggcctgatgagactccactcaggtgcacacatcaccaggtgcatctgcaggcaccgggctggctgcttgcagccaggagaaggtcagcgagaaggagtgtatgagtgtgagtgtgtgtgcatggaagttggggcactgggcgtctgactccctccccacccaagagaggaaggacccctcaccacccccactggcgagacagtttactttgccgacttgccatgtttttgccaaaaccaagattttgaaggaaatgagtggccagcgccagggcccaggccatgtggcctgcccagcctcaatgtcacttggcggcggggtggggtgggggtgggcagcagcatcccagccttgagatgcttcactttccttctctgtaaccagactttgaaaaattgttcgtttcatcaggctctgttcctcaatggccttttgctacgtgcctcccgagaaatttgtctttttgtataaatgacaaagtgttgaaaatgtatttcctgaaataaatgtttcaaatgcagaaaccca

SEQ ID NO: 309700 - DNA, 3487 bp, Homo sapiens
ccccaggcctggccttgacaggcgggcggagcagccagtgcgagacagggaggccggtgcgggtgcgggaacctgatccgcccgggaggcgggggcggggcgggggcgcagcgcgcggggaggggccggcgcccgccttcctcccccattcattcagctgagccagggggcctaggggctcctccggcggctagctctgcactgcaggagcgcgggcgcggcgccccagccagcgcgcagggcccgggccccgccgggggcgcttcctcgccgctgccctccgcgcgacccgctgcccaccagccatcatgtcggaccccgcggtcaacgcgcagctggatgggatcatttcggacttcgaagatgcccaagcctgctgaggcgcccaccgcccccagcccagcccagaccttggagaattcagagcctgcccctgtgtctcagctgcagagcaggctggagcccaagccccagccccctgtggctgaggctacaccccggagccaggaggccactgaggcggctcccagctgcgttggcgacatggccgacacccccagagatgccgggctcaagcaggcgcctgcatcacggaacgagaaggccccggtggacttcggctacgtggggattgactccatcctggagcagatgcgccggaaggccatgaagcagggcttcgagttcaacatcatggtggtcgggcagagcggcttgggtaaatccaccttaatcaacaccctcttcaaatccaaaatcagccggaagtcggtgcagcccacctcagaggagcgcatccccaagaccatcgagatcaagtccatcacgcacgatattgaggagaaaggcgtccggatgaagctgacagtgattgacacaccagggttcggggaccacatcaacaacgagaactgctggcagcccatcatgaagttcatcaatgaccagtacgagaaatacctgcaggaggaggtcaacatcaaccgcaagaagcgcatcccggacacccgcgtccactgctgcctctacttcatccccgccaccggccactccctcaggcccctggacatcgagtttatgaaacgcctgagcaaggtggtcaacatcgtccctgtcatcgccaaggcggacacactcaccctggaggagagggtccacttcaaacagcggatcaccgcagacctgctgtccaacggcatcgacgtgtacccccagaaggaatttgatgaggactcggaggaccggctggtgaacgagaagttccgggagatgatcccatttgctgtggtgggcagtgaccacgagtaccaggtcaacggcaagaggatccttgggaggaagaccaagtggggtaccatcgaagttgaaaacaccacacactgtgagtttgcctacctgcgggaccttctcatcaggacgcacatgcagaacatcaaggacatcaccagcagcatccacttcgaggcgtaccgtgtgaagcgcctcaacgagggcagcagcgccatggccaacggcgtggaggagaaggagccagaagccccggagatgtagacgccaccctgcccacccccgggatcctgcccccaagtcatttccgtcccccccccaggccctcccaccaccccattttattttatatgattttctccatttgtcatcgttccccaccccttcgacatgctgccaggaaacaagggaaggggcctccctccgagtgagtcagtgatgaggccgcggcctccccgaggttgtggggaggctgcactggagccacaggcaggggtgagagcacccactgaattgacatgaccctctgtccccaggcctggctccccgagggctcagaagagcagcttcggtgtgcagatcatccgtccgtgtggggttctcagtgccggaggccttggggtgggggccaggcctcgcacttgcagaggagcccagtgggctgcacgctcccctccatccccatcggccctgtcccctggagtgtgtcagagcccaggggagaatgcagcccaccaggagcacctggaccccctgcccgccacatggtgtggccatcactcagcccctacccctgccctgctcctaagggtagaaaactccagggtcccctgccaccgactgcccagccactccaagccccctggcagctgcccctcctggagcagaaagtgcctttatctcagccatccgcagactgctcggccagatgcggggacaggctggaatgagggaggcgtcttcatctccctgccatccccctctcacgccacccccgcccccaccgggctgcaggtgctgctgatgcgctgggatctgattgaggataaaaaggaaggagagatgacccctaccccctcatcccccagttttgaaaaggtctaagcaagtgagtctggtggaggagctgagggagggagccatggaaggtgccagaaggaaggttggcgggggcacgtgtgggccgtggcttgggctggtcagagtggcgtgagctgcccggcgcctgccctgcccaagtgaccagggaagtgtgtgtgtgtccatgtgtatgcgtgtccgtctgtctgtctagtgtctgggtttggcccaagactgggctgtagttacattaatgcccagccagccacccctgccactcacccctcctggcccaggccttgctgactctctgagctggggaggtgggaggccaggcgagcctgactctgttgatctacccgtgcctgggcccctcccctcagagcccatggtaacgaacccctagaaaggagagaacgggcgtcaggggtgcacagtccacagctgaagagcaaggtttcgtggcagcacggcccggcccctcaccctctgtccccacgaggggacccatgggggctgtctttgcagggcacagatgaccaaagtcccttcctgcttcctgttacctgtcttgctcctggggagaaagaggggcctgatgagactccactcaggtgcacacatcaccaggtgcatctgcaggcaccgggctggctgcttgcagccaggagaaggtcagcgagaaggagtgtatgagtgtgagtgtgtgtgcatggaagttggggcactgggcgtctgactccctccccacccaagagaggaaggacccctcaccacccccactggcgagacagtttactttgccgacttgccatgtttttgccaaaaccaagattttgaaggaaatgagtggccagcgccagggcccaggccatgtggcctgcccagcctcaatgtcacttggcggcggggtggggtgggggtgggcagcagcatcccagccttgagatgcttcactttccttctctgtaaccagactttgaaaaattgttcgtttcatcaggctctgttcctcaatggccttttgctacgtgcctcccgagaaatttgtctttttgtataaatgacaaagtgttgaaaatgtatttcctgaaataaatgtttcaaatgcagaaaccca

SEQ ID NO: 309701 - DNA, 3250 bp, Homo sapiens
agtagggtcaatggccagggtaagctgtgggggctcctccccgccggcccctctctgcagccctcaccttaacacagagcatcgataccacctgggctttgggaagacctggaggctgaccaccctggaggctcccagcgtcccacagccactctttggggaagaggcttcctgagggacttgtggcccttggctgggactctagtcccagagttctgccttccggcgccgagctttgatttgtttattgagtgccagcccggttcccggacagccactgaggcggctcccagctgcgttggcgacatggccgacacccccagagatgccgggctcaagcaggcgcctgcatcacggaacgagaaggccccggtggacttcggctacgtggggattgactccatcctggagcagatgcgccggaaggccatgaagcagggcttcgagttcaacatcatggtggtcgggcagagcggcttgggtaaatccaccttaatcaacaccctcttcaaatccaaaatcagccggaagtcggtgcagcccacctcagaggagcgcatccccaagaccatcgagatcaagtccatcacgcacgatattgaggagaaaggcgtccggatgaagctgacagtgattgacacaccagggttcggggaccacatcaacaacgagaactgctggcagcccatcatgaagttcatcaatgaccagtacgagaaatacctgcaggaggaggtcaacatcaaccgcaagaagcgcatcccggacacccgcgtccactgctgcctctacttcatccccgccaccggccactccctcaggcccctggacatcgagtttatgaaacgcctgagcaaggtggtcaacatcgtccctgtcatcgccaaggcggacacactcaccctggaggagagggtccacttcaaacagcggatcaccgcagacctgctgtccaacggcatcgacgtgtacccccagaaggaatttgatgaggactcggaggaccggctggtgaacgagaagttccgggagatgatcccatttgctgtggtgggcagtgaccacgagtaccaggtcaacggcaagaggatccttgggaggaagaccaagtggggtaccatcgaagttgaaaacaccacacactgtgagtttgcctacctgcgggaccttctcatcaggacgcacatgcagaacatcaaggacatcaccagcagcatccacttcgaggcgtaccgtgtgaagcgcctcaacgagggcagcagcgccatggccaacggcgtggaggagaaggagccagaagccccggagatgtagacgccaccctgcccacccccgggatcctgcccccaagtcatttccgtcccccccccaggccctcccaccaccccattttattttatatgattttctccatttgtcatcgttccccaccccttcgacatgctgccaggaaacaagggaaggggcctccctccgagtgagtcagtgatgaggccgcggcctccccgaggttgtggggaggctgcactggagccacaggcaggggtgagagcacccactgaattgacatgaccctctgtccccaggcctggctccccgagggctcagaagagcagcttcggtgtgcagatcatccgtccgtgtggggttctcagtgccggaggccttggggtgggggccaggcctcgcacttgcagaggagcccagtgggctgcacgctcccctccatccccatcggccctgtcccctggagtgtgtcagagcccaggggagaatgcagcccaccaggagcacctggaccccctgcccgccacatggtgtggccatcactcagcccctacccctgccctgctcctaagggtagaaaactccagggtcccctgccaccgactgcccagccactccaagccccctggcagctgcccctcctggagcagaaagtgcctttatctcagccatccgcagactgctcggccagatgcggggacaggctggaatgagggaggcgtcttcatctccctgccatccccctctcacgccacccccgcccccaccgggctgcaggtgctgctgatgcgctgggatctgattgaggataaaaaggaaggagagatgacccctaccccctcatcccccagttttgaaaaggtctaagcaagtgagtctggtggaggagctgagggagggagccatggaaggtgccagaaggaaggttggcgggggcacgtgtgggccgtggcttgggctggtcagagtggcgtgagctgcccggcgcctgccctgcccaagtgaccagggaagtgtgtgtgtgtccatgtgtatgcgtgtccgtctgtctgtctagtgtctgggtttggcccaagactgggctgtagttacattaatgcccagccagccacccctgccactcacccctcctggcccaggccttgctgactctctgagctggggaggtgggaggccaggcgagcctgactctgttgatctacccgtgcctgggcccctcccctcagagcccatggtaacgaacccctagaaaggagagaacgggcgtcaggggtgcacagtccacagctgaagagcaaggtttcgtggcagcacggcccggcccctcaccctctgtccccacgaggggacccatgggggctgtctttgcagggcacagatgaccaaagtcccttcctgcttcctgttacctgtcttgctcctggggagaaagaggggcctgatgagactccactcaggtgcacacatcaccaggtgcatctgcaggcaccgggctggctgcttgcagccaggagaaggtcagcgagaaggagtgtatgagtgtgagtgtgtgtgcatggaagttggggcactgggcgtctgactccctccccacccaagagaggaaggacccctcaccacccccactggcgagacagtttactttgccgacttgccatgtttttgccaaaaccaagattttgaaggaaatgagtggccagcgccagggcccaggccatgtggcctgcccagcctcaatgtcacttggcggcggggtggggtgggggtgggcagcagcatcccagccttgagatgcttcactttccttctctgtaaccagactttgaaaaattgttcgtttcatcaggctctgttcctcaatggccttttgctacgtgcctcccgagaaatttgtctttttgtataaatgacaaagtgttgaaaatgtatttcctgaaataaatgtttcaaatgcagaaaccca

SEQ ID NO: 309702 - DNA, 3016 bp, Homo sapiens
gctggatgcacagggacgtggtcctggctctgggggacagccactgaggcggctcccagctgcgttggcgacatggccgacacccccagagatgccgggctcaagcaggcgcctgcatcacggaacgagaaggccccggtggacttcggctacgtggggattgactccatcctggagcagatgcgccggaaggccatgaagcagggcttcgagttcaacatcatggtggtcgggcagagcggcttgggtaaatccaccttaatcaacaccctcttcaaatccaaaatcagccggaagtcggtgcagcccacctcagaggagcgcatccccaagaccatcgagatcaagtccatcacgcacgatattgaggagaaaggcgtccggatgaagctgacagtgattgacacaccagggttcggggaccacatcaacaacgagaactgctggcagcccatcatgaagttcatcaatgaccagtacgagaaatacctgcaggaggaggtcaacatcaaccgcaagaagcgcatcccggacacccgcgtccactgctgcctctacttcatccccgccaccggccactccctcaggcccctggacatcgagtttatgaaacgcctgagcaaggtggtcaacatcgtccctgtcatcgccaaggcggacacactcaccctggaggagagggtccacttcaaacagcggatcaccgcagacctgctgtccaacggcatcgacgtgtacccccagaaggaatttgatgaggactcggaggaccggctggtgaacgagaagttccgggagatgatcccatttgctgtggtgggcagtgaccacgagtaccaggtcaacggcaagaggatccttgggaggaagaccaagtggggtaccatcgaagttgaaaacaccacacactgtgagtttgcctacctgcgggaccttctcatcaggacgcacatgcagaacatcaaggacatcaccagcagcatccacttcgaggcgtaccgtgtgaagcgcctcaacgagggcagcagcgccatggccaacggcgtggaggagaaggagccagaagccccggagatgtagacgccaccctgcccacccccgggatcctgcccccaagtcatttccgtcccccccccaggccctcccaccaccccattttattttatatgattttctccatttgtcatcgttccccaccccttcgacatgctgccaggaaacaagggaaggggcctccctccgagtgagtcagtgatgaggccgcggcctccccgaggttgtggggaggctgcactggagccacaggcaggggtgagagcacccactgaattgacatgaccctctgtccccaggcctggctccccgagggctcagaagagcagcttcggtgtgcagatcatccgtccgtgtggggttctcagtgccggaggccttggggtgggggccaggcctcgcacttgcagaggagcccagtgggctgcacgctcccctccatccccatcggccctgtcccctggagtgtgtcagagcccaggggagaatgcagcccaccaggagcacctggaccccctgcccgccacatggtgtggccatcactcagcccctacccctgccctgctcctaagggtagaaaactccagggtcccctgccaccgactgcccagccactccaagccccctggcagctgcccctcctggagcagaaagtgcctttatctcagccatccgcagactgctcggccagatgcggggacaggctggaatgagggaggcgtcttcatctccctgccatccccctctcacgccacccccgcccccaccgggctgcaggtgctgctgatgcgctgggatctgattgaggataaaaaggaaggagagatgacccctaccccctcatcccccagttttgaaaaggtctaagcaagtgagtctggtggaggagctgagggagggagccatggaaggtgccagaaggaaggttggcgggggcacgtgtgggccgtggcttgggctggtcagagtggcgtgagctgcccggcgcctgccctgcccaagtgaccagggaagtgtgtgtgtgtccatgtgtatgcgtgtccgtctgtctgtctagtgtctgggtttggcccaagactgggctgtagttacattaatgcccagccagccacccctgccactcacccctcctggcccaggccttgctgactctctgagctggggaggtgggaggccaggcgagcctgactctgttgatctacccgtgcctgggcccctcccctcagagcccatggtaacgaacccctagaaaggagagaacgggcgtcaggggtgcacagtccacagctgaagagcaaggtttcgtggcagcacggcccggcccctcaccctctgtccccacgaggggacccatgggggctgtctttgcagggcacagatgaccaaagtcccttcctgcttcctgttacctgtcttgctcctggggagaaagaggggcctgatgagactccactcaggtgcacacatcaccaggtgcatctgcaggcaccgggctggctgcttgcagccaggagaaggtcagcgagaaggagtgtatgagtgtgagtgtgtgtgcatggaagttggggcactgggcgtctgactccctccccacccaagagaggaaggacccctcaccacccccactggcgagacagtttactttgccgacttgccatgtttttgccaaaaccaagattttgaaggaaatgagtggccagcgccagggcccaggccatgtggcctgcccagcctcaatgtcacttggcggcggggtggggtgggggtgggcagcagcatcccagccttgagatgcttcactttccttctctgtaaccagactttgaaaaattgttcgtttcatcaggctctgttcctcaatggccttttgctacgtgcctcccgagaaatttgtctttttgtataaatgacaaagtgttgaaaatgtatttcctgaaataaatgtttcaaatgcagaaaccca

SEQ ID NO: 309703 - DNA, 3537 bp, Homo sapiens
agcagggatctgaaggactttgcaggcacccagggagataggagaggaggagggagcagccctggccggacactgtcctcctagcattgcctgcatcagggactcactcagctttaagaagcccctttgtgggggacagggagcatctgttagtttataggacctgaagtgcccccatgggctcaagtttctgggaaggcctgcaggtggccgtagggctgccgcaggggtgctggccccagggtctggattcaggggagcctgcagagggagggcagctggaggctgctccagtgtgcattgttacgaggcaaagtaaggagactgctgggcccacgctgggccggggtggatggaggcaaggaagtcttcgccggggcaagggcaccagctgtagatgccggcagctttctcctggacacgggcctggaaggctgacagggtgtggtgagtgccaccggctcccctgccgtggcctggtcagtggcttcacaggcctccgtgggcaggaggaggatgaccttgcattctgcttggccaccattggcagtgacagacaagccactgaggcggctcccagctgcgttggcgacatggccgacacccccagagatgccgggctcaagcaggcgcctgcatcacggaacgagaaggccccggtggacttcggctacgtggggattgactccatcctggagcagatgcgccggaaggccatgaagcagggcttcgagttcaacatcatggtggtcgggcagagcggcttgggtaaatccaccttaatcaacaccctcttcaaatccaaaatcagccggaagtcggtgcagcccacctcagaggagcgcatccccaagaccatcgagatcaagtccatcacgcacgatattgaggagaaaggcgtccggatgaagctgacagtgattgacacaccagggttcggggaccacatcaacaacgagaactgctggcagcccatcatgaagttcatcaatgaccagtacgagaaatacctgcaggaggaggtcaacatcaaccgcaagaagcgcatcccggacacccgcgtccactgctgcctctacttcatccccgccaccggccactccctcaggcccctggacatcgagtttatgaaacgcctgagcaaggtggtcaacatcgtccctgtcatcgccaaggcggacacactcaccctggaggagagggtccacttcaaacagcggatcaccgcagacctgctgtccaacggcatcgacgtgtacccccagaaggaatttgatgaggactcggaggaccggctggtgaacgagaagttccgggagatgatcccatttgctgtggtgggcagtgaccacgagtaccaggtcaacggcaagaggatccttgggaggaagaccaagtggggtaccatcgaagttgaaaacaccacacactgtgagtttgcctacctgcgggaccttctcatcaggacgcacatgcagaacatcaaggacatcaccagcagcatccacttcgaggcgtaccgtgtgaagcgcctcaacgagggcagcagcgccatggccaacggcgtggaggagaaggagccagaagccccggagatgtagacgccaccctgcccacccccgggatcctgcccccaagtcatttccgtcccccccccaggccctcccaccaccccattttattttatatgattttctccatttgtcatcgttccccaccccttcgacatgctgccaggaaacaagggaaggggcctccctccgagtgagtcagtgatgaggccgcggcctccccgaggttgtggggaggctgcactggagccacaggcaggggtgagagcacccactgaattgacatgaccctctgtccccaggcctggctccccgagggctcagaagagcagcttcggtgtgcagatcatccgtccgtgtggggttctcagtgccggaggccttggggtgggggccaggcctcgcacttgcagaggagcccagtgggctgcacgctcccctccatccccatcggccctgtcccctggagtgtgtcagagcccaggggagaatgcagcccaccaggagcacctggaccccctgcccgccacatggtgtggccatcactcagcccctacccctgccctgctcctaagggtagaaaactccagggtcccctgccaccgactgcccagccactccaagccccctggcagctgcccctcctggagcagaaagtgcctttatctcagccatccgcagactgctcggccagatgcggggacaggctggaatgagggaggcgtcttcatctccctgccatccccctctcacgccacccccgcccccaccgggctgcaggtgctgctgatgcgctgggatctgattgaggataaaaaggaaggagagatgacccctaccccctcatcccccagttttgaaaaggtctaagcaagtgagtctggtggaggagctgagggagggagccatggaaggtgccagaaggaaggttggcgggggcacgtgtgggccgtggcttgggctggtcagagtggcgtgagctgcccggcgcctgccctgcccaagtgaccagggaagtgtgtgtgtgtccatgtgtatgcgtgtccgtctgtctgtctagtgtctgggtttggcccaagactgggctgtagttacattaatgcccagccagccacccctgccactcacccctcctggcccaggccttgctgactctctgagctggggaggtgggaggccaggcgagcctgactctgttgatctacccgtgcctgggcccctcccctcagagcccatggtaacgaacccctagaaaggagagaacgggcgtcaggggtgcacagtccacagctgaagagcaaggtttcgtggcagcacggcccggcccctcaccctctgtccccacgaggggacccatgggggctgtctttgcagggcacagatgaccaaagtcccttcctgcttcctgttacctgtcttgctcctggggagaaagaggggcctgatgagactccactcaggtgcacacatcaccaggtgcatctgcaggcaccgggctggctgcttgcagccaggagaaggtcagcgagaaggagtgtatgagtgtgagtgtgtgtgcatggaagttggggcactgggcgtctgactccctccccacccaagagaggaaggacccctcaccacccccactggcgagacagtttactttgccgacttgccatgtttttgccaaaaccaagattttgaaggaaatgagtggccagcgccagggcccaggccatgtggcctgcccagcctcaatgtcacttggcggcggggtggggtgggggtgggcagcagcatcccagccttgagatgcttcactttccttctctgtaaccagactttgaaaaattgttcgtttcatcaggctctgttcctcaatggccttttgctacgtgcctcccgagaaatttgtctttttgtataaatgacaaagtgttgaaaatgtatttcctgaaataaatgtttcaaatgcagaaaccca

SEQ ID NO: 309704 - DNA, 2989 bp, Homo sapiens
tggggcttagttgtatattactgtgccctttgttttacaattaacatggccgacacccccagagatgccgggctcaagcaggcgcctgcatcacggaacgagaaggccccggtggacttcggctacgtggggattgactccatcctggagcagatgcgccggaaggccatgaagcagggcttcgagttcaacatcatggtggtcgggcagagcggcttgggtaaatccaccttaatcaacaccctcttcaaatccaaaatcagccggaagtcggtgcagcccacctcagaggagcgcatccccaagaccatcgagatcaagtccatcacgcacgatattgaggagaaaggcgtccggatgaagctgacagtgattgacacaccagggttcggggaccacatcaacaacgagaactgctggcagcccatcatgaagttcatcaatgaccagtacgagaaatacctgcaggaggaggtcaacatcaaccgcaagaagcgcatcccggacacccgcgtccactgctgcctctacttcatccccgccaccggccactccctcaggcccctggacatcgagtttatgaaacgcctgagcaaggtggtcaacatcgtccctgtcatcgccaaggcggacacactcaccctggaggagagggtccacttcaaacagcggatcaccgcagacctgctgtccaacggcatcgacgtgtacccccagaaggaatttgatgaggactcggaggaccggctggtgaacgagaagttccgggagatgatcccatttgctgtggtgggcagtgaccacgagtaccaggtcaacggcaagaggatccttgggaggaagaccaagtggggtaccatcgaagttgaaaacaccacacactgtgagtttgcctacctgcgggaccttctcatcaggacgcacatgcagaacatcaaggacatcaccagcagcatccacttcgaggcgtaccgtgtgaagcgcctcaacgagggcagcagcgccatggccaacggcgtggaggagaaggagccagaagccccggagatgtagacgccaccctgcccacccccgggatcctgcccccaagtcatttccgtcccccccccaggccctcccaccaccccattttattttatatgattttctccatttgtcatcgttccccaccccttcgacatgctgccaggaaacaagggaaggggcctccctccgagtgagtcagtgatgaggccgcggcctccccgaggttgtggggaggctgcactggagccacaggcaggggtgagagcacccactgaattgacatgaccctctgtccccaggcctggctccccgagggctcagaagagcagcttcggtgtgcagatcatccgtccgtgtggggttctcagtgccggaggccttggggtgggggccaggcctcgcacttgcagaggagcccagtgggctgcacgctcccctccatccccatcggccctgtcccctggagtgtgtcagagcccaggggagaatgcagcccaccaggagcacctggaccccctgcccgccacatggtgtggccatcactcagcccctacccctgccctgctcctaagggtagaaaactccagggtcccctgccaccgactgcccagccactccaagccccctggcagctgcccctcctggagcagaaagtgcctttatctcagccatccgcagactgctcggccagatgcggggacaggctggaatgagggaggcgtcttcatctccctgccatccccctctcacgccacccccgcccccaccgggctgcaggtgctgctgatgcgctgggatctgattgaggataaaaaggaaggagagatgacccctaccccctcatcccccagttttgaaaaggtctaagcaagtgagtctggtggaggagctgagggagggagccatggaaggtgccagaaggaaggttggcgggggcacgtgtgggccgtggcttgggctggtcagagtggcgtgagctgcccggcgcctgccctgcccaagtgaccagggaagtgtgtgtgtgtccatgtgtatgcgtgtccgtctgtctgtctagtgtctgggtttggcccaagactgggctgtagttacattaatgcccagccagccacccctgccactcacccctcctggcccaggccttgctgactctctgagctggggaggtgggaggccaggcgagcctgactctgttgatctacccgtgcctgggcccctcccctcagagcccatggtaacgaacccctagaaaggagagaacgggcgtcaggggtgcacagtccacagctgaagagcaaggtttcgtggcagcacggcccggcccctcaccctctgtccccacgaggggacccatgggggctgtctttgcagggcacagatgaccaaagtcccttcctgcttcctgttacctgtcttgctcctggggagaaagaggggcctgatgagactccactcaggtgcacacatcaccaggtgcatctgcaggcaccgggctggctgcttgcagccaggagaaggtcagcgagaaggagtgtatgagtgtgagtgtgtgtgcatggaagttggggcactgggcgtctgactccctccccacccaagagaggaaggacccctcaccacccccactggcgagacagtttactttgccgacttgccatgtttttgccaaaaccaagattttgaaggaaatgagtggccagcgccagggcccaggccatgtggcctgcccagcctcaatgtcacttggcggcggggtggggtgggggtgggcagcagcatcccagccttgagatgcttcactttccttctctgtaaccagactttgaaaaattgttcgtttcatcaggctctgttcctcaatggccttttgctacgtgcctcccgagaaatttgtctttttgtataaatgacaaagtgttgaaaatgtatttcctgaaataaatgtttcaaatgcagaaaccca

SEQ ID NO: 309705 - DNA, 4390 bp, Homo sapiens
tgcctctgtcactgcagactaatgggacggaggggggtgacttctcagggttcctcctgggcaggtgctccggaaccttttctcagcacgctggcctggggcacggccgttcctcctgcccagccacgttggggtacagggtgaagaagggctggggccagcccaggacagaggaaggcgaggcaggcacgcaggaactgggctttttaaacccttaagcccaaggaaatcgtagcatcgcgggacagggaaaatgaaagactttggaagtcgtcaggaatttgactctgtgagttggtttccaagagtctaagttaagcatctccaagtggatattaaaaaggagcagcaagcctcggggcggcgggggctggaggaggtggagagaggaggctgccggaagccgcactcgggacctctgcagccaccgaccagaccgggcggccgggactctgggactctcgcaggcagacccggtggtctgccggactcctcggggcccacttcgggccctctctcctgcctcctatttttggatttctctcctttgctccctttttcctcccgttttgaagagacaatgctacttcagtttggagcacaaacatatgatcagcacatggaaatgtggtaattcggatgcattcgtgattgcaacagattgaagaaattagaccagacaaagagtgtttttagaggaggaggaggaggaggaggaggctgagagagggagggcgacgggggtgagaaaggggaggccgcctctgagcgggacgccgggactcccgccgctgctaaatatatccgtaggaatggagagggaccggatctcagccttgaaaagatcttttgaggtcgaggaggtcgagacacccaactccaccccaccccggagggtccagactcccctactccgagccactgtggccagctccacccagaaattccaggacctgggcgtgaagaactcagaaccctcggcccgccatgtggactccctaagccaacgctcccccaaggcgtccctgcggagggtggagctctcgggccccaaggcggccgagccggtgtcccggcgcactgagctgtccattgacatctcgtccaagcaggtggagaacgccggggccatcggcccgtcccggttcgggctcaagagggccgaggtgttgggccacaagacgccagaaccggcccctcggaggacggagatcaccatcgtcaaaccccaggagtcagcccaccggaggatggagccccctgcctccaaggtccccgaggtgcccactgcccctgccaccgacgcagcccccaagagggtggagatccagatgcccaagcctgctgaggcgcccaccgcccccagcccagcccagaccttggagaattcagagcctgcccctgtgtctcagctgcagagcaggctggagcccaagccccagccccctgtggctgaggctacaccccggagccaggaggccactgaggcggctcccagctgcgttggcgacatggccgacacccccagagatgccgggctcaagcaggcgcctgcatcacggaacgagaaggccccggtggacttcggctacgtggggattgactccatcctggagcagatgcgccggaaggccatgaagcagggcttcgagttcaacatcatggtggtcgggcagagcggcttgggtaaatccaccttaatcaacaccctcttcaaatccaaaatcagccggaaatattgaggagaaaggcgtccggatgaagctgacagtgattgacacaccagggttcggggaccacatcaacaacgagaactgctggcagcccatcatgaagttcatcaatgaccagtacgagaaatacctgcaggaggaggtcaacatcaaccgcaagaagcgcatcccggacacccgcgtccactgctgcctctacttcatccccgccaccggccactccctcaggcccctggacatcgagtttatgaaacgcctgagcaaggtggtcaacatcgtccctgtcatcgccaaggcggacacactcaccctggaggagagggtccacttcaaacagcggatcaccgcagacctgctgtccaacggcatcgacgtgtacccccagaaggaatttgatgaggactcggaggaccggctggtgaacgagaagttccgggagatgatcccatttgctgtggtgggcagtgaccacgagtaccaggtcaacggcaagaggatccttgggaggaagaccaagtggggtaccatcgaagttgaaaacaccacacactgtgagtttgcctacctgcgggaccttctcatcaggacgcacatgcagaacatcaaggacatcaccagcagcatccacttcgaggcgtaccgtgtgaagcgcctcaacgagggcagcagcgccatggccaacggcgtggaggagaaggagccagaagccccggagatgtagacgccaccctgcccacccccgggatcctgcccccaagtcatttccgtcccccccccaggccctcccaccaccccattttattttatatgattttctccatttgtcatcgttccccaccccttcgacatgctgccaggaaacaagggaaggggcctccctccgagtgagtcagtgatgaggccgcggcctccccgaggttgtggggaggctgcactggagccacaggcaggggtgagagcacccactgaattgacatgaccctctgtccccaggcctggctccccgagggctcagaagagcagcttcggtgtgcagatcatccgtccgtgtggggttctcagtgccggaggccttggggtgggggccaggcctcgcacttgcagaggagcccagtgggctgcacgctcccctccatccccatcggccctgtcccctggagtgtgtcagagcccaggggagaatgcagcccaccaggagcacctggaccccctgcccgccacatggtgtggccatcactcagcccctacccctgccctgctcctaagggtagaaaactccagggtcccctgccaccgactgcccagccactccaagccccctggcagctgcccctcctggagcagaaagtgcctttatctcagccatccgcagactgctcggccagatgcggggacaggctggaatgagggaggcgtcttcatctccctgccatccccctctcacgccacccccgcccccaccgggctgcaggtgctgctgatgcgctgggatctgattgaggataaaaaggaaggagagatgacccctaccccctcatcccccagttttgaaaaggtctaagcaagtgagtctggtggaggagctgagggagggagccatggaaggtgccagaaggaaggttggcgggggcacgtgtgggccgtggcttgggctggtcagagtggcgtgagctgcccggcgcctgccctgcccaagtgaccagggaagtgtgtgtgtgtccatgtgtatgcgtgtccgtctgtctgtctagtgtctgggtttggcccaagactgggctgtagttacattaatgcccagccagccacccctgccactcacccctcctggcccaggccttgctgactctctgagctggggaggtgggaggccaggcgagcctgactctgttgatctacccgtgcctgggcccctcccctcagagcccatggtaacgaacccctagaaaggagagaacgggcgtcaggggtgcacagtccacagctgaagagcaaggtttcgtggcagcacggcccggcccctcaccctctgtccccacgaggggacccatgggggctgtctttgcagggcacagatgaccaaagtcccttcctgcttcctgttacctgtcttgctcctggggagaaagaggggcctgatgagactccactcaggtgcacacatcaccaggtgcatctgcaggcaccgggctggctgcttgcagccaggagaaggtcagcgagaaggagtgtatgagtgtgagtgtgtgtgcatggaagttggggcactgggcgtctgactccctccccacccaagagaggaaggacccctcaccacccccactggcgagacagtttactttgccgacttgccatgtttttgccaaaaccaagattttgaaggaaatgagtggccagcgccagggcccaggccatgtggcctgcccagcctcaatgtcacttggcggcggggtggggtgggggtgggcagcagcatcccagccttgagatgcttcactttccttctctgtaaccagactttgaaaaattgttcgtttcatcaggctctgttcctcaatggccttttgctacgtgcctcccgagaaatttgtctttttgtataaatgacaaagtgttgaaaatgtatttcctgaaataaatgtttcaaatgcagaaaccca

SEQ ID NO: 309706 - DNA, 2844 bp, Homo sapiens
ttgttattgggcgttgttttgcagtgtctctgagtgtgcgagacctggtgatggtggtcgggcagagcggcttgggtaaatccaccttaatcaacaccctcttcaaatccaaaatcagccggaagtcggtgcagcccacctcagaggagcgcatccccaagaccatcgagatcaagtccatcacgcacgatattgaggagaaaggcgtccggatgaagctgacagtgattgacacaccagggttcggggaccacatcaacaacgagaactgctggcagcccatcatgaagttcatcaatgaccagtacgagaaatacctgcaggaggaggtcaacatcaaccgcaagaagcgcatcccggacacccgcgtccactgctgcctctacttcatccccgccaccggccactccctcaggcccctggacatcgagtttatgaaacgcctgagcaaggtggtcaacatcgtccctgtcatcgccaaggcggacacactcaccctggaggagagggtccacttcaaacagcggatcaccgcagacctgctgtccaacggcatcgacgtgtacccccagaaggaatttgatgaggactcggaggaccggctggtgaacgagaagttccgggagatgatcccatttgctgtggtgggcagtgaccacgagtaccaggtcaacggcaagaggatccttgggaggaagaccaagtggggtaccatcgaagttgaaaacaccacacactgtgagtttgcctacctgcgggaccttctcatcaggacgcacatgcagaacatcaaggacatcaccagcagcatccacttcgaggcgtaccgtgtgaagcgcctcaacgagggcagcagcgccatggccaacggcgtggaggagaaggagccagaagccccggagatgtagacgccaccctgcccacccccgggatcctgcccccaagtcatttccgtcccccccccaggccctcccaccaccccattttattttatatgattttctccatttgtcatcgttccccaccccttcgacatgctgccaggaaacaagggaaggggcctccctccgagtgagtcagtgatgaggccgcggcctccccgaggttgtggggaggctgcactggagccacaggcaggggtgagagcacccactgaattgacatgaccctctgtccccaggcctggctccccgagggctcagaagagcagcttcggtgtgcagatcatccgtccgtgtggggttctcagtgccggaggccttggggtgggggccaggcctcgcacttgcagaggagcccagtgggctgcacgctcccctccatccccatcggccctgtcccctggagtgtgtcagagcccaggggagaatgcagcccaccaggagcacctggaccccctgcccgccacatggtgtggccatcactcagcccctacccctgccctgctcctaagggtagaaaactccagggtcccctgccaccgactgcccagccactccaagccccctggcagctgcccctcctggagcagaaagtgcctttatctcagccatccgcagactgctcggccagatgcggggacaggctggaatgagggaggcgtcttcatctccctgccatccccctctcacgccacccccgcccccaccgggctgcaggtgctgctgatgcgctgggatctgattgaggataaaaaggaaggagagatgacccctaccccctcatcccccagttttgaaaaggtctaagcaagtgagtctggtggaggagctgagggagggagccatggaaggtgccagaaggaaggttggcgggggcacgtgtgggccgtggcttgggctggtcagagtggcgtgagctgcccggcgcctgccctgcccaagtgaccagggaagtgtgtgtgtgtccatgtgtatgcgtgtccgtctgtctgtctagtgtctgggtttggcccaagactgggctgtagttacattaatgcccagccagccacccctgccactcacccctcctggcccaggccttgctgactctctgagctggggaggtgggaggccaggcgagcctgactctgttgatctacccgtgcctgggcccctcccctcagagcccatggtaacgaacccctagaaaggagagaacgggcgtcaggggtgcacagtccacagctgaagagcaaggtttcgtggcagcacggcccggcccctcaccctctgtccccacgaggggacccatgggggctgtctttgcagggcacagatgaccaaagtcccttcctgcttcctgttacctgtcttgctcctggggagaaagaggggcctgatgagactccactcaggtgcacacatcaccaggtgcatctgcaggcaccgggctggctgcttgcagccaggagaaggtcagcgagaaggagtgtatgagtgtgagtgtgtgtgcatggaagttggggcactgggcgtctgactccctccccacccaagagaggaaggacccctcaccacccccactggcgagacagtttactttgccgacttgccatgtttttgccaaaaccaagattttgaaggaaatgagtggccagcgccagggcccaggccatgtggcctgcccagcctcaatgtcacttggcggcggggtggggtgggggtgggcagcagcatcccagccttgagatgcttcactttccttctctgtaaccagactttgaaaaattgttcgtttcatcaggctctgttcctcaatggccttttgctacgtgcctcccgagaaatttgtctttttgtataaatgacaaagtgttgaaaatgtatttcctgaaataaatgtttcaaatgcagaaaccca

SEQ ID NO: 309707 - DNA, 2735 bp, Homo sapiens
tctactccacctcttgatcttctctcaccttatgcaggagcgcatccccaagaccatcgagatcaagtccatcacgcacgatattgaggagaaaggcgtccggatgaagctgacagtgattgacacaccagggttcggggaccacatcaacaacgagaactgctggcagcccatcatgaagttcatcaatgaccagtacgagaaatacctgcaggaggaggtcaacatcaaccgcaagaagcgcatcccggacacccgcgtccactgctgcctctacttcatccccgccaccggccactccctcaggcccctggacatcgagtttatgaaacgcctgagcaaggtggtcaacatcgtccctgtcatcgccaaggcggacacactcaccctggaggagagggtccacttcaaacagcggatcaccgcagacctgctgtccaacggcatcgacgtgtacccccagaaggaatttgatgaggactcggaggaccggctggtgaacgagaagttccgggagatgatcccatttgctgtggtgggcagtgaccacgagtaccaggtcaacggcaagaggatccttgggaggaagaccaagtggggtaccatcgaagttgaaaacaccacacactgtgagtttgcctacctgcgggaccttctcatcaggacgcacatgcagaacatcaaggacatcaccagcagcatccacttcgaggcgtaccgtgtgaagcgcctcaacgagggcagcagcgccatggccaacggcgtggaggagaaggagccagaagccccggagatgtagacgccaccctgcccacccccgggatcctgcccccaagtcatttccgtcccccccccaggccctcccaccaccccattttattttatatgattttctccatttgtcatcgttccccaccccttcgacatgctgccaggaaacaagggaaggggcctccctccgagtgagtcagtgatgaggccgcggcctccccgaggttgtggggaggctgcactggagccacaggcaggggtgagagcacccactgaattgacatgaccctctgtccccaggcctggctccccgagggctcagaagagcagcttcggtgtgcagatcatccgtccgtgtggggttctcagtgccggaggccttggggtgggggccaggcctcgcacttgcagaggagcccagtgggctgcacgctcccctccatccccatcggccctgtcccctggagtgtgtcagagcccaggggagaatgcagcccaccaggagcacctggaccccctgcccgccacatggtgtggccatcactcagcccctacccctgccctgctcctaagggtagaaaactccagggtcccctgccaccgactgcccagccactccaagccccctggcagctgcccctcctggagcagaaagtgcctttatctcagccatccgcagactgctcggccagatgcggggacaggctggaatgagggaggcgtcttcatctccctgccatccccctctcacgccacccccgcccccaccgggctgcaggtgctgctgatgcgctgggatctgattgaggataaaaaggaaggagagatgacccctaccccctcatcccccagttttgaaaaggtctaagcaagtgagtctggtggaggagctgagggagggagccatggaaggtgccagaaggaaggttggcgggggcacgtgtgggccgtggcttgggctggtcagagtggcgtgagctgcccggcgcctgccctgcccaagtgaccagggaagtgtgtgtgtgtccatgtgtatgcgtgtccgtctgtctgtctagtgtctgggtttggcccaagactgggctgtagttacattaatgcccagccagccacccctgccactcacccctcctggcccaggccttgctgactctctgagctggggaggtgggaggccaggcgagcctgactctgttgatctacccgtgcctgggcccctcccctcagagcccatggtaacgaacccctagaaaggagagaacgggcgtcaggggtgcacagtccacagctgaagagcaaggtttcgtggcagcacggcccggcccctcaccctctgtccccacgaggggacccatgggggctgtctttgcagggcacagatgaccaaagtcccttcctgcttcctgttacctgtcttgctcctggggagaaagaggggcctgatgagactccactcaggtgcacacatcaccaggtgcatctgcaggcaccgggctggctgcttgcagccaggagaaggtcagcgagaaggagtgtatgagtgtgagtgtgtgtgcatggaagttggggcactgggcgtctgactccctccccacccaagagaggaaggacccctcaccacccccactggcgagacagtttactttgccgacttgccatgtttttgccaaaaccaagattttgaaggaaatgagtggccagcgccagggcccaggccatgtggcctgcccagcctcaatgtcacttggcggcggggtggggtgggggtgggcagcagcatcccagccttgagatgcttcactttccttctctgtaaccagactttgaaaaattgttcgtttcatcaggctctgttcctcaatggccttttgctacgtgcctcccgagaaatttgtctttttgtataaatgacaaagtgttgaaaatgtatttcctgaaataaatgtttcaaatgcagaaaccca

SEQ ID NO: 309708 - DNA, 2717 bp, Homo sapiens
tgctctagaggataaaattccggctttgggcttcccatcgagatcaagaccatcacgcacggatattgaggagaaaggcgtccggatgaagctgacagtgattgacacaccagggttcggggaccacatcaacaacgagaactgctggcagcccatcatgaagttcatcaatgaccagtacgagaaatacctgcaggaggaggtcaacatcaaccgcaagaagcgcatcccggacacccgcgtccactgctgcctctacttcatccccgccaccggccactccctcaggcccctggacatcgagtttatgaaacgcctgagcaaggtggtcaacatcgtccctgtcatcgccaaggcggacacactcaccctggaggagagggtccacttcaaacagcggatcaccgcagacctgctgtccaacggcatcgacgtgtacccccagaaggaatttgatgaggactcggaggaccggctggtgaacgagaagttccgggagatgatcccatttgctgtggtgggcagtgaccacgagtaccaggtcaacggcaagaggatccttgggaggaagaccaagtggggtaccatcgaagttgaaaacaccacacactgtgagtttgcctacctgcgggaccttctcatcaggacgcacatgcagaacatcaaggacatcaccagcagcatccacttcgaggcgtaccgtgtgaagcgcctcaacgagggcagcagcgccatggccaacggcgtggaggagaaggagccagaagccccggagatgtagacgccaccctgcccacccccgggatcctgcccccaagtcatttccgtcccccccccaggccctcccaccaccccattttattttatatgattttctccatttgtcatcgttccccaccccttcgacatgctgccaggaaacaagggaaggggcctccctccgagtgagtcagtgatgaggccgcggcctccccgaggttgtggggaggctgcactggagccacaggcaggggtgagagcacccactgaattgacatgaccctctgtccccaggcctggctccccgagggctcagaagagcagcttcggtgtgcagatcatccgtccgtgtggggttctcagtgccggaggccttggggtgggggccaggcctcgcacttgcagaggagcccagtgggctgcacgctcccctccatccccatcggccctgtcccctggagtgtgtcagagcccaggggagaatgcagcccaccaggagcacctggaccccctgcccgccacatggtgtggccatcactcagcccctacccctgccctgctcctaagggtagaaaactccagggtcccctgccaccgactgcccagccactccaagccccctggcagctgcccctcctggagcagaaagtgcctttatctcagccatccgcagactgctcggccagatgcggggacaggctggaatgagggaggcgtcttcatctccctgccatccccctctcacgccacccccgcccccaccgggctgcaggtgctgctgatgcgctgggatctgattgaggataaaaaggaaggagagatgacccctaccccctcatcccccagttttgaaaaggtctaagcaagtgagtctggtggaggagctgagggagggagccatggaaggtgccagaaggaaggttggcgggggcacgtgtgggccgtggcttgggctggtcagagtggcgtgagctgcccggcgcctgccctgcccaagtgaccagggaagtgtgtgtgtgtccatgtgtatgcgtgtccgtctgtctgtctagtgtctgggtttggcccaagactgggctgtagttacattaatgcccagccagccacccctgccactcacccctcctggcccaggccttgctgactctctgagctggggaggtgggaggccaggcgagcctgactctgttgatctacccgtgcctgggcccctcccctcagagcccatggtaacgaacccctagaaaggagagaacgggcgtcaggggtgcacagtccacagctgaagagcaaggtttcgtggcagcacggcccggcccctcaccctctgtccccacgaggggacccatgggggctgtctttgcagggcacagatgaccaaagtcccttcctgcttcctgttacctgtcttgctcctggggagaaagaggggcctgatgagactccactcaggtgcacacatcaccaggtgcatctgcaggcaccgggctggctgcttgcagccaggagaaggtcagcgagaaggagtgtatgagtgtgagtgtgtgtgcatggaagttggggcactgggcgtctgactccctccccacccaagagaggaaggacccctcaccacccccactggcgagacagtttactttgccgacttgccatgtttttgccaaaaccaagattttgaaggaaatgagtggccagcgccagggcccaggccatgtggcctgcccagcctcaatgtcacttggcggcggggtggggtgggggtgggcagcagcatcccagccttgagatgcttcactttccttctctgtaaccagactttgaaaaattgttcgtttcatcaggctctgttcctcaatggccttttgctacgtgcctcccgagaaatttgtctttttgtataaatgacaaagtgttgaaaatgtatttcctgaaataaatgtttcaaatgcagaaaccca

SEQ ID NO: 309709 - DNA, 4126 bp, Homo sapiens
tgcctctgtcactgcagactaatgggacggaggggggtgacttctcagggttcctcctgggcaggtgctccggaaccttttctcagcacgctggcctggggcacggccgttcctcctgcccagccacgttggggtacagggtgaagaagggctggggccagcccaggacagaggaaggcgaggcaggcacgcaggaactgggctttttaaacccttaagcccaaggaaatcgtagcatcgcgggacagggaaaatgaaagactttggaagtcgtcaggaatttgactctgtgagttggtttccaagagtctaagttaagcatctccaagtggatattaaaaaggagcagcaagcctcggggcggcgggggctggaggaggtggagagaggaggctgccggaagccgcactcgggacctctgcagccaccgaccagaccgggcggccgggactctgggactctcgcaggcagacccggtggtctgccggactcctcggggcccacttcgggccctctctcctgcctcctatttttggatttctctcctttgctccctttttcctcccgttttgaagagacaatgctacttcagtttggagcacaaacatatgatcagcacatggaaatgtggtaattcggatgcattcgtgattgcaacagattgaagaaattagaccagacaaagagtgtttttagaggaggaggaggaggaggaggaggctgagagagggagggcgacgggggtgagaaaggggaggccgcctctgagcgggacgccgggactcccgccgctgctaaatatatccgtaggaatggagagggaccggatctcagccttgaaaagatcttttgaggtcgaggaggtcgagacacccaactccaccccaccccggagggtccagactcccctactccgagccactgtggccagctccacccagaaattccaggacctgggcgtgaagaactcagaaccctcggcccgccatgtggactccctaagccaacgctcccccaaggcgtccctgcggagggtggagctctcgggccccaaggcggccgagccggtgtcccggcgcactgagctgtccattgacatctcgtccaagcaggtggagaacgccggggccatcggcccgtcccggttcgggctcaagagggccgaggtgttgggccacaagacgccagaaccggcccctcggaggacggagatcaccatcgtcaaaccccaggagtcagcccaccggaggatggagccccctgcctccaaggtccccgaggtgcccactgcccctgccaccgacgcagcccccaagagggtggagatccagatgcccaagcctgctgaggcgcccaccgcccccagcccagcccagaccttggagaattcagagcctgcccctgtgtctcagctgcagagcaggctggagcccaagccccagccccctgtggctgaggctacaccccggagccaggaggccactgaggcggctcccagctgcgttggcgacatggccgacacccccagagatgccgggctcaagcaggcgcctgcatcacggaacgagaaggccccggtggacttcggctacgtggggattgactccatcctggagcagatgcgccggaaggccatgaagcagggcttcgagttcaacatcatggtggtcgggcagagcggcttgggtaaatccaccttaatcaacaccctcttcaaatccaaaatcagccggaagtcggtgcagcccacctcagaggagcgcatccccaagaccatcgagatcaagtccatcacgcacgatattgaggagaaaggcgtccggatgaagctgacagtgattgacacaccagggttcggggaccacatcaacaacgagaactgctggcagcccatcatgaagttcatcaatgaccagtacgagaaatacctgcaggaggaggtcaacatcaaccgcaagaagcgcatcccggacacccgcgtccactgctgcctctacttcatccccgccaccggccactccctcaggcccctggacatcgagtttatgaaacgcctgagcaaggtggtcaacatcgtccctgtcatcgccaaggcggacacactcaccctggaggagagggtccacttcaaacagcggatcaccgcagacctgctgtccaacggcatcgacgtgtacccccagaaggaatttgatgaggactcggaggaccggctggtgaacgagaagttccgggagatgatcccatttgctgtggtgggcagtgaccacgagtaccaggtcaacggcaagaggatccttgggaggaagaccaagtggggtaccatcgaagttgaaaacaccacacactgtgagtttgcctacctgcgggaccttctcatcaggacgcacatgcagaacatcaaggacatcaccagcagcatccacttcgaggcgtaccgtgtgaagcgcctcaacgagggcagcagcgccatggccaacggcgtggaggagaaggagccagaagccccggagatgtagacgccaccctgcccacccccgggatcctgcccccaagtcatttccgtcccccccccaggccctcccaccaccccattttattttatatgattttctccatttgtcatcgttccccaccccttcgacatgctgccaggaaacaagggaaggggcctccctccgagtgagtcagtgatgaggccgcggcctccccgaggttgtggggaggctgcactggagccacaggcaggggtgagagcacccacgactgcccagccactccaagccccctggcagctgcccctcctggagcagaaagtgcctttatctcagccatccgcagactgctcggccagatgcggggacaggctggaatgagggaggcgtcttcatctccctgccatccccctctcacgccacccccgcccccaccgggctgcaggtgctgctgatgcgctgggatctgattgaggataaaaaggaaggagagatgacccctaccccctcatcccccagttttgaaaaggtctaagcaagtgagtctggtggaggagctgagggagggagccatggaaggtgccagaaggaaggttggcgggggcacgtgtgggccgtggcttgggctggtcagagtggcgtgagctgcccggcgcctgccctgcccaagtgaccagggaagtgtgtgtgtgtccatgtgtatgcgtgtccgtctgtctgtctagtgtctgggtttggcccaagactgggctgtagttacattaatgcccagccagccacccctgccactcacccctcctggcccaggccttgctgactctctgagctggggaggtgggaggccaggcgagcctgactctgttgatctacccgtgcctgggcccctcccctcagagcccatggtaacgaacccctagaaaggagagaacgggcgtcaggggtgcacagtccacagctgaagagcaaggtttcgtggcagcacggcccggcccctcaccctctgtccccacgaggggacccatgggggctgtctttgcagggcacagatgaccaaagtcccttcctgcttcctgttacctgtcttgctcctggggagaaagaggggcctgatgagactccactcaggtgcacacatcaccaggtgcatctgcaggcaccgggctggctgcttgcagccaggagaaggtcagcgagaaggagtgtatgagtgtgagtgtgtgtgcatggaagttggggcactgggcgtctgactccctccccacccaagagaggaaggacccctcaccacccccactggcgagacagtttactttgccgacttgccatgtttttgccaaaaccaagattttgaaggaaatgagtggccagcgccagggcccaggccatgtggcctgcccagcctcaatgtcacttggcggcggggtggggtgggggtgggcagcagcatcccagccttgagatgcttcactttccttctctgtaaccagactttgaaaaattgttcgtttcatcaggctctgttcctcaatggccttttgctacgtgcctcccgagaaatttgtctttttgtataaatgacaaagtgttgaaaatgtatttcctgaaataaatgtttcaaatgcagaaaccca

SEQ ID NO: 309710 - DNA, 2616 bp, Homo sapiens
cagaagaaagaaacaacttacggctaggtacgaggctgggtgtctggcagcccatcatgaagttcatcaatgaccagtacgagaaatacctgcaggaggaggtcaacatcaaccgcaagaagcgcatcccggacacccgcgtccactgctgcctctacttcatccccgccaccggccactccctcaggcccctggacatcgagtttatgaaacgcctgagcaaggtggtcaacatcgtccctgtcatcgccaaggcggacacactcaccctggaggagagggtccacttcaaacagcggatcaccgcagacctgctgtccaacggcatcgacgtgtacccccagaaggaatttgatgaggactcggaggaccggctggtgaacgagaagttccgggagatgatcccatttgctgtggtgggcagtgaccacgagtaccaggtcaacggcaagaggatccttgggaggaagaccaagtggggtaccatcgaagttgaaaacaccacacactgtgagtttgcctacctgcgggaccttctcatcaggacgcacatgcagaacatcaaggacatcaccagcagcatccacttcgaggcgtaccgtgtgaagcgcctcaacgagggcagcagcgccatggccaacggcgtggaggagaaggagccagaagccccggagatgtagacgccaccctgcccacccccgggatcctgcccccaagtcatttccgtcccccccccaggccctcccaccaccccattttattttatatgattttctccatttgtcatcgttccccaccccttcgacatgctgccaggaaacaagggaaggggcctccctccgagtgagtcagtgatgaggccgcggcctccccgaggttgtggggaggctgcactggagccacaggcaggggtgagagcacccactgaattgacatgaccctctgtccccaggcctggctccccgagggctcagaagagcagcttcggtgtgcagatcatccgtccgtgtggggttctcagtgccggaggccttggggtgggggccaggcctcgcacttgcagaggagcccagtgggctgcacgctcccctccatccccatcggccctgtcccctggagtgtgtcagagcccaggggagaatgcagcccaccaggagcacctggaccccctgcccgccacatggtgtggccatcactcagcccctacccctgccctgctcctaagggtagaaaactccagggtcccctgccaccgactgcccagccactccaagccccctggcagctgcccctcctggagcagaaagtgcctttatctcagccatccgcagactgctcggccagatgcggggacaggctggaatgagggaggcgtcttcatctccctgccatccccctctcacgccacccccgcccccaccgggctgcaggtgctgctgatgcgctgggatctgattgaggataaaaaggaaggagagatgacccctaccccctcatcccccagttttgaaaaggtctaagcaagtgagtctggtggaggagctgagggagggagccatggaaggtgccagaaggaaggttggcgggggcacgtgtgggccgtggcttgggctggtcagagtggcgtgagctgcccggcgcctgccctgcccaagtgaccagggaagtgtgtgtgtgtccatgtgtatgcgtgtccgtctgtctgtctagtgtctgggtttggcccaagactgggctgtagttacattaatgcccagccagccacccctgccactcacccctcctggcccaggccttgctgactctctgagctggggaggtgggaggccaggcgagcctgactctgttgatctacccgtgcctgggcccctcccctcagagcccatggtaacgaacccctagaaaggagagaacgggcgtcaggggtgcacagtccacagctgaagagcaaggtttcgtggcagcacggcccggcccctcaccctctgtccccacgaggggacccatgggggctgtctttgcagggcacagatgaccaaagtcccttcctgcttcctgttacctgtcttgctcctggggagaaagaggggcctgatgagactccactcaggtgcacacatcaccaggtgcatctgcaggcaccgggctggctgcttgcagccaggagaaggtcagcgagaaggagtgtatgagtgtgagtgtgtgtgcatggaagttggggcactgggcgtctgactccctccccacccaagagaggaaggacccctcaccacccccactggcgagacagtttactttgccgacttgccatgtttttgccaaaaccaagattttgaaggaaatgagtggccagcgccagggcccaggccatgtggcctgcccagcctcaatgtcacttggcggcggggtggggtgggggtgggcagcagcatcccagccttgagatgcttcactttccttctctgtaaccagactttgaaaaattgttcgtttcatcaggctctgttcctcaatggccttttgctacgtgcctcccgagaaatttgtctttttgtataaatgacaaagtgttgaaaatgtatttcctgaaataaatgtttcaaatgcagaaaccca

SEQ ID NO: 309711 - DNA, 2519 bp, Homo sapiens
ctggctgttctagaggatcccgaagcgcacgatggacacccgcgtccactgctgcctctacttcatccccgccaccggccactccctcaggcccctggacatcgagtttatgaaacgcctgagcaaggtggtcaacatcgtccctgtcatcgccaaggcggacacactcaccctggaggagagggtccacttcaaacagcggatcaccgcagacctgctgtccaacggcatcgacgtgtacccccagaaggaatttgatgaggactcggaggaccggctggtgaacgagaagttccgggagatgatcccatttgctgtggtgggcagtgaccacgagtaccaggtcaacggcaagaggatccttgggaggaagaccaagtggggtaccatcgaagttgaaaacaccacacactgtgagtttgcctacctgcgggaccttctcatcaggacgcacatgcagaacatcaaggacatcaccagcagcatccacttcgaggcgtaccgtgtgaagcgcctcaacgagggcagcagcgccatggccaacggcgtggaggagaaggagccagaagccccggagatgtagacgccaccctgcccacccccgggatcctgcccccaagtcatttccgtcccccccccaggccctcccaccaccccattttattttatatgattttctccatttgtcatcgttccccaccccttcgacatgctgccaggaaacaagggaaggggcctccctccgagtgagtcagtgatgaggccgcggcctccccgaggttgtggggaggctgcactggagccacaggcaggggtgagagcacccactgaattgacatgaccctctgtccccaggcctggctccccgagggctcagaagagcagcttcggtgtgcagatcatccgtccgtgtggggttctcagtgccggaggccttggggtgggggccaggcctcgcacttgcagaggagcccagtgggctgcacgctcccctccatccccatcggccctgtcccctggagtgtgtcagagcccaggggagaatgcagcccaccaggagcacctggaccccctgcccgccacatggtgtggccatcactcagcccctacccctgccctgctcctaagggtagaaaactccagggtcccctgccaccgactgcccagccactccaagccccctggcagctgcccctcctggagcagaaagtgcctttatctcagccatccgcagactgctcggccagatgcggggacaggctggaatgagggaggcgtcttcatctccctgccatccccctctcacgccacccccgcccccaccgggctgcaggtgctgctgatgcgctgggatctgattgaggataaaaaggaaggagagatgacccctaccccctcatcccccagttttgaaaaggtctaagcaagtgagtctggtggaggagctgagggagggagccatggaaggtgccagaaggaaggttggcgggggcacgtgtgggccgtggcttgggctggtcagagtggcgtgagctgcccggcgcctgccctgcccaagtgaccagggaagtgtgtgtgtgtccatgtgtatgcgtgtccgtctgtctgtctagtgtctgggtttggcccaagactgggctgtagttacattaatgcccagccagccacccctgccactcacccctcctggcccaggccttgctgactctctgagctggggaggtgggaggccaggcgagcctgactctgttgatctacccgtgcctgggcccctcccctcagagcccatggtaacgaacccctagaaaggagagaacgggcgtcaggggtgcacagtccacagctgaagagcaaggtttcgtggcagcacggcccggcccctcaccctctgtccccacgaggggacccatgggggctgtctttgcagggcacagatgaccaaagtcccttcctgcttcctgttacctgtcttgctcctggggagaaagaggggcctgatgagactccactcaggtgcacacatcaccaggtgcatctgcaggcaccgggctggctgcttgcagccaggagaaggtcagcgagaaggagtgtatgagtgtgagtgtgtgtgcatggaagttggggcactgggcgtctgactccctccccacccaagagaggaaggacccctcaccacccccactggcgagacagtttactttgccgacttgccatgtttttgccaaaaccaagattttgaaggaaatgagtggccagcgccagggcccaggccatgtggcctgcccagcctcaatgtcacttggcggcggggtggggtgggggtgggcagcagcatcccagccttgagatgcttcactttccttctctgtaaccagactttgaaaaattgttcgtttcatcaggctctgttcctcaatggccttttgctacgtgcctcccgagaaatttgtctttttgtataaatgacaaagtgttgaaaatgtatttcctgaaataaatgtttcaaatgcagaaaccca

SEQ ID NO: 309712 - DNA, 2716 bp, Homo sapiens
gtgtggttgggaccccagaactcatggacgagggtgcttggagctggccctggcccgcctggcctgtgcagtggtgtcacctgtgtctgggacacacccgtgtccttcctctgccccacactcacagcgtggccgacttggcccggggccctgtccttgccagcagggacccccgtgagccccgagccagcacctgagagtgtcgacacctgcttgggggtgggtgcccccccactgccccgctcccccagatgagcctcacgcacatccctctgcttcagcctcaggcccctggacatcgagtttatgaaacgcctgagcaaggtggtcaacatcgtccctgtcatcgccaaggcggacacactcaccctggaggagagggtccacttcaaacagcggatcaccgcagacctgctgtccaacggcatcgacgtgtacccccagaaggaatttgatgaggactcggaggaccggctggtgaacgagaagttccgggagatgatcccatttgctgtggtgggcagtgaccacgagtaccaggtcaacggcaagaggatccttgggaggaagaccaagtggggtaccatcgaagttgaaaacaccacacactgtgagtttgcctacctgcgggaccttctcatcaggacgcacatgcagaacatcaaggacatcaccagcagcatccacttcgaggcgtaccgtgtgaagcgcctcaacgagggcagcagcgccatggccaacggcgtggaggagaaggagccagaagccccggagatgtagacgccaccctgcccacccccgggatcctgcccccaagtcatttccgtcccccccccaggccctcccaccaccccattttattttatatgattttctccatttgtcatcgttccccaccccttcgacatgctgccaggaaacaagggaaggggcctccctccgagtgagtcagtgatgaggccgcggcctccccgaggttgtggggaggctgcactggagccacaggcaggggtgagagcacccactgaattgacatgaccctctgtccccaggcctggctccccgagggctcagaagagcagcttcggtgtgcagatcatccgtccgtgtggggttctcagtgccggaggccttggggtgggggccaggcctcgcacttgcagaggagcccagtgggctgcacgctcccctccatccccatcggccctgtcccctggagtgtgtcagagcccaggggagaatgcagcccaccaggagcacctggaccccctgcccgccacatggtgtggccatcactcagcccctacccctgccctgctcctaagggtagaaaactccagggtcccctgccaccgactgcccagccactccaagccccctggcagctgcccctcctggagcagaaagtgcctttatctcagccatccgcagactgctcggccagatgcggggacaggctggaatgagggaggcgtcttcatctccctgccatccccctctcacgccacccccgcccccaccgggctgcaggtgctgctgatgcgctgggatctgattgaggataaaaaggaaggagagatgacccctaccccctcatcccccagttttgaaaaggtctaagcaagtgagtctggtggaggagctgagggagggagccatggaaggtgccagaaggaaggttggcgggggcacgtgtgggccgtggcttgggctggtcagagtggcgtgagctgcccggcgcctgccctgcccaagtgaccagggaagtgtgtgtgtgtccatgtgtatgcgtgtccgtctgtctgtctagtgtctgggtttggcccaagactgggctgtagttacattaatgcccagccagccacccctgccactcacccctcctggcccaggccttgctgactctctgagctggggaggtgggaggccaggcgagcctgactctgttgatctacccgtgcctgggcccctcccctcagagcccatggtaacgaacccctagaaaggagagaacgggcgtcaggggtgcacagtccacagctgaagagcaaggtttcgtggcagcacggcccggcccctcaccctctgtccccacgaggggacccatgggggctgtctttgcagggcacagatgaccaaagtcccttcctgcttcctgttacctgtcttgctcctggggagaaagaggggcctgatgagactccactcaggtgcacacatcaccaggtgcatctgcaggcaccgggctggctgcttgcagccaggagaaggtcagcgagaaggagtgtatgagtgtgagtgtgtgtgcatggaagttggggcactgggcgtctgactccctccccacccaagagaggaaggacccctcaccacccccactggcgagacagtttactttgccgacttgccatgtttttgccaaaaccaagattttgaaggaaatgagtggccagcgccagggcccaggccatgtggcctgcccagcctcaatgtcacttggcggcggggtggggtgggggtgggcagcagcatcccagccttgagatgcttcactttccttctctgtaaccagactttgaaaaattgttcgtttcatcaggctctgttcctcaatggccttttgctacgtgcctcccgagaaatttgtctttttgtataaatgacaaagtgttgaaaatgtatttcctgaaataaatgtttcaaatgcagaaaccca

SEQ ID NO: 309713 - DNA, 4566 bp, Homo sapiens
tgcctctgtcactgcagactaatgggacggaggggggtgacttctcagggttcctcctgggcaggtgctccggaaccttttctcagcacgctggcctggggcacggccgttcctcctgcccagccacgttggggtacagggtgaagaagggctggggccagcccaggacagaggaaggcgaggcaggcacgcaggaactgggctttttaaacccttaagcccaaggaaatcgtagcatcgcgggacagggaaaatgaaagactttggaagtcgtcaggaatttgactctgtgagttggtttccaagagtctaagttaagcatctccaagtggatattaaaaaggagcagcaagcctcggggcggcgggggctggaggaggtggagagaggaggctgccggaagccgcactcgggacctctgcagccaccgaccagaccgggcggccgggactctgggactctcgcaggcagacccggtggtctgccggactcctcggggcccacttcgggccctctctcctgcctcctatttttggatttctctcctttgctccctttttcctcccgttttgaagagacaatgctacttcagtttggagcacaaacatatgatcagcacatggaaatgtggtaattcggatgcattcgtgattgcaacagattgaagaaattagaccagacaaagagtgtttttagaggaggaggaggaggaggaggaggctgagagagggagggcgacgggggtgagaaaggggaggccgcctctgagcgggacgccgggactcccgccgctgctaaatatatccgtaggaatggagagggaccggatctcagccttgaaaagatcttttgaggtcgaggaggtcgagacacccaactccaccccaccccggagggtccagactcccctactccgagccactgtggccagctccacccagaaattccaggacctgggcgtgaagaactcagaaccctcggcccgccatgtggactccctaagccaacgctcccccaaggcgtccctgcggagggtggagctctcgggccccaaggcggccgagccggtgtcccggcgcactgagctgtccattgacatctcgtccaagcaggtggagaacgccggggccatcggcccgtcccggttcgggctcaagagggccgaggtgttgggccacaagacgccagaaccggcccctcggaggacggagatcaccatcgtcaaaccccaggagtcagcccaccggaggatggagccccctgcctccaaggtccccgaggtgcccactgcccctgccaccgacgcagcccccaagagggtggagatccagatgcccaagcctgctgaggcgcccaccgcccccagcccagcccagaccttggagaattcagagcctgcccctgtgtctcagctgcagagcaggctggagcccaagccccagccccctgtggctgaggctacaccccggagccaggaggccactgaggcggctcccagctgcgttggcgacatggccgacacccccagagatgccgggctcaagcaggcgcctgcatcacggaacgagaaggccccggtggacttcggctacgtggggattgactccatcctggagcagatgcgccggaaggccatgaagcagggcttcgagttcaacatcatggtggtcgggcagagcggcttgggtaaatccaccttaatcaacaccctcttcaaatccaaaatcagccggaagtcggtgcagcccacctcagaggagcgcatccccaagaccatcgagatcaagtccatcacgcacgatattgaggagaaaggcgtccggatgaagctgacagtgattgacacaccagggttcggggaccacatcaacaacgagaactgctggcagcccatcatgaagttcatcaatgaccagtacgagaaatacctgcaggaggaggtcaacatcaaccgcaagaagcgcatcccggacacccgcgtccactgctgcctctacttcatccccgccaccggccactccctcaggcccctggacatcgagtttatgaaacgcctgagcaaggtggtcaacatcgtccctgtcatcgccaaggcggacacactcaccctggaggagagggtccacttcaaacagcggatcaccgcagacctgctgtccaacggcatcgacgtgtacccccagaaggaatttgatgaggactcggaggaccggctggtgaacgagaagttccgggagatgatcccatttgctgtggtgggcagtgaccacgagtaccaggtcaacggcaagaggatccttgggaggaagaccaagtggggtaccatcgaagttgaaaacaccacacactgtgagtttgcctacctgcgggaccttctcatcaggacgcacatgcagaacatcaaggacatcaccagcagcatccacttcgaggcgtaccgtgtgaagcgcctcaacgagggcagcagcgccatggccaacggcgtggaggagaaggagccagaagccccggagatgtagacgccaccctgcccacccccgggatcctgcccccaagtcatttccgtcccccccccaggccctcccaccaccccattttattttatatgattttctccatttgtcatcgttccccaccccttcgacatgctgccaggaaacaagggaaggggcctccctccgagtgagtcagtgatgaggccgcggcctccccgaggttgtggggaggctgcactggagccacaggcaggggtgagagcacccactgaattgacatgaccctctgtccccaggcctggctccccgagggctcagaagagcagcttcggtgtgcagatcatccgtccgtgtggggttctcagtgccggaggccttggggtgggggccaggcctcgcacttgcagaggagcccagtgggctgcacgctcccctccatccccatcggccctgtcccctggagtgtgtcagagcccaggggagaatgcagcccaccaggagcacctggaccccctgcccgccacatggtgtggccatcactcagcccctacccctgccctgctcctaagggtagaaaactccagggtcccctgccaccgactgcccagccactccaagccccctggcagctgcccctcctggagcagaaagtgcctttatctcagccatccgcagactgctcggccagatgcggggacaggctggaatgagggaggcgtcttcatctccctgccatccccctctcacgccacccccgcccccaccgggctgcaggtgctgctgatgcgctgggatctgattgaggataaaaaggaaggagagatgacccctaccccctcatcccccagttttgaaaaggtctaagcaagtgagtctggtggaggagctgagggagggagccatggaaggtgccagaaggaaggttggcgggggcacgtgtgggccgtggcttgggctggtcagagtggcgtgagctgcccggcgcctgccctgcccaagtgaccagggaagtgtgtgtgtgtccatgtgtatgcgtgtccgtctgtctgtctagtgtctgggtttggcccaagactgggctgtagttacattaatgcccagccagccacccctgccactcacccctcctggcccaggccttgctgactctctgagctggggaggtgggaggccaggcgagcctgactctgttgatctacccgtgcctgggcccctcccctcagagcccatggtaacgaacccctagaaaggagagaacgggcgtcaggggtgcacagtccacagctgaagagcaaggtttcgtggcagcacggcccggcccctcaccctctgtccccacgaggggacccatgggggctgtctttgcagggcacagatgaccaaagtcccttcctgcttcctgttacctgtcttgctcctggggagaaagaggggcctgatgagactccactcaggtgcacacatcaccaggtgcatctgcaggcaccgggctggctgcttgcagccaggagaaggtcagcgagaaggagtgtatgagtgtgagtgtgtgtgcatggaagttggggcactgggcgtctgactccctccccacccaagagaggaaggacccctcaccacccccactggcgagacagtttactttgccgacttgccatgtttttgccaaaaccaagattttgaaggaaatgagtggccagcgccagggcccaggccatgtggcctgcccagcctcaatgtcacttggcggcggggtggggtgggggtgggcagcagcatcccagccttgagatgcttcactttccttctctgtaaccagactttgaaaaattgttcgtttcatcaggctctgttcctcaatggccttttgctacgtgcctcccgagaaatttgtctttttgtataaatgacaaagtgttgaaaatgtatttcctgaaataaatgtttcaaatgcagaaacccaaaaaaaaaaaacaaattgaggggatatatgaggggggacgaagcggtctgaatggcatgtgcataggcggtttctggacaagttttggccacgtggaaattggcggtccaa

SEQ ID NO: 309714 - DNA, 2434 bp, Homo sapiens
tcaggaggacagctcaccactcctgctctgcccctctgcattgggggcatgtccgtgaaagagcagatggagaccatccgacacggtgtacacatgatggtggccatcccggggcgcctcatggatttgctgcagaagaagatggtcagcctagacatctgtcgctacctggccctggacgaggctgaccggctggtgaacgagaagttccgggagatgatcccatttgctgtggtgggcagtgaccacgagtaccaggtcaacggcaagaggatccttgggaggaagaccaagtggggtaccatcgaagttgaaaacaccacacactgtgagtttgcctacctgcgggaccttctcatcaggacgcacatgcagaacatcaaggacatcaccagcagcatccacttcgaggcgtaccgtgtgaagcgcctcaacgagggcagcagcgccatggccaacggcgtggaggagaaggagccagaagccccggagatgtagacgccaccctgcccacccccgggatcctgcccccaagtcatttccgtcccccccccaggccctcccaccaccccattttattttatatgattttctccatttgtcatcgttccccaccccttcgacatgctgccaggaaacaagggaaggggcctccctccgagtgagtcagtgatgaggccgcggcctccccgaggttgtggggaggctgcactggagccacaggcaggggtgagagcacccactgaattgacatgaccctctgtccccaggcctggctccccgagggctcagaagagcagcttcggtgtgcagatcatccgtccgtgtggggttctcagtgccggaggccttggggtgggggccaggcctcgcacttgcagaggagcccagtgggctgcacgctcccctccatccccatcggccctgtcccctggagtgtgtcagagcccaggggagaatgcagcccaccaggagcacctggaccccctgcccgccacatggtgtggccatcactcagcccctacccctgccctgctcctaagggtagaaaactccagggtcccctgccaccgactgcccagccactccaagccccctggcagctgcccctcctggagcagaaagtgcctttatctcagccatccgcagactgctcggccagatgcggggacaggctggaatgagggaggcgtcttcatctccctgccatccccctctcacgccacccccgcccccaccgggctgcaggtgctgctgatgcgctgggatctgattgaggataaaaaggaaggagagatgacccctaccccctcatcccccagttttgaaaaggtctaagcaagtgagtctggtggaggagctgagggagggagccatggaaggtgccagaaggaaggttggcgggggcacgtgtgggccgtggcttgggctggtcagagtggcgtgagctgcccggcgcctgccctgcccaagtgaccagggaagtgtgtgtgtgtccatgtgtatgcgtgtccgtctgtctgtctagtgtctgggtttggcccaagactgggctgtagttacattaatgcccagccagccacccctgccactcacccctcctggcccaggccttgctgactctctgagctggggaggtgggaggccaggcgagcctgactctgttgatctacccgtgcctgggcccctcccctcagagcccatggtaacgaacccctagaaaggagagaacgggcgtcaggggtgcacagtccacagctgaagagcaaggtttcgtggcagcacggcccggcccctcaccctctgtccccacgaggggacccatgggggctgtctttgcagggcacagatgaccaaagtcccttcctgcttcctgttacctgtcttgctcctggggagaaagaggggcctgatgagactccactcaggtgcacacatcaccaggtgcatctgcaggcaccgggctggctgcttgcagccaggagaaggtcagcgagaaggagtgtatgagtgtgagtgtgtgtgcatggaagttggggcactgggcgtctgactccctccccacccaagagaggaaggacccctcaccacccccactggcgagacagtttactttgccgacttgccatgtttttgccaaaaccaagattttgaaggaaatgagtggccagcgccagggcccaggccatgtggcctgcccagcctcaatgtcacttggcggcggggtggggtgggggtgggcagcagcatcccagccttgagatgcttcactttccttctctgtaaccagactttgaaaaattgttcgtttcatcaggctctgttcctcaatggccttttgctacgtgcctcccgagaaatttgtctttttgtataaatgacaaagtgttgaaaatgtatttcctgaaataaatgtttcaaatgcagaaaccca

SEQ ID NO: 309715 - DNA, 2257 bp, Homo sapiens
  misc_feature (13)..(13): n is a, c, g, or t
caggctggtactncccggaattatgggatgttccgggagatgatcccatttgctgtggtgggcagtgaccacgagtaccaggtcaacggcaagaggatccttgggaggaagaccaagtggggtaccatcgaagttgaaaacaccacacactgtgagtttgcctacctgcgggaccttctcatcaggacgcacatgcagaacatcaaggacatcaccagcagcatccacttcgaggcgtaccgtgtgaagcgcctcaacgagggcagcagcgccatggccaacggcgtggaggagaaggagccagaagccccggagatgtagacgccaccctgcccacccccgggatcctgcccccaagtcatttccgtcccccccccaggccctcccaccaccccattttattttatatgattttctccatttgtcatcgttccccaccccttcgacatgctgccaggaaacaagggaaggggcctccctccgagtgagtcagtgatgaggccgcggcctccccgaggttgtggggaggctgcactggagccacaggcaggggtgagagcacccactgaattgacatgaccctctgtccccaggcctggctccccgagggctcagaagagcagcttcggtgtgcagatcatccgtccgtgtggggttctcagtgccggaggccttggggtgggggccaggcctcgcacttgcagaggagcccagtgggctgcacgctcccctccatccccatcggccctgtcccctggagtgtgtcagagcccaggggagaatgcagcccaccaggagcacctggaccccctgcccgccacatggtgtggccatcactcagcccctacccctgccctgctcctaagggtagaaaactccagggtcccctgccaccgactgcccagccactccaagccccctggcagctgcccctcctggagcagaaagtgcctttatctcagccatccgcagactgctcggccagatgcggggacaggctggaatgagggaggcgtcttcatctccctgccatccccctctcacgccacccccgcccccaccgggctgcaggtgctgctgatgcgctgggatctgattgaggataaaaaggaaggagagatgacccctaccccctcatcccccagttttgaaaaggtctaagcaagtgagtctggtggaggagctgagggagggagccatggaaggtgccagaaggaaggttggcgggggcacgtgtgggccgtggcttgggctggtcagagtggcgtgagctgcccggcgcctgccctgcccaagtgaccagggaagtgtgtgtgtgtccatgtgtatgcgtgtccgtctgtctgtctagtgtctgggtttggcccaagactgggctgtagttacattaatgcccagccagccacccctgccactcacccctcctggcccaggccttgctgactctctgagctggggaggtgggaggccaggcgagcctgactctgttgatctacccgtgcctgggcccctcccctcagagcccatggtaacgaacccctagaaaggagagaacgggcgtcaggggtgcacagtccacagctgaagagcaaggtttcgtggcagcacggcccggcccctcaccctctgtccccacgaggggacccatgggggctgtctttgcagggcacagatgaccaaagtcccttcctgcttcctgttacctgtcttgctcctggggagaaagaggggcctgatgagactccactcaggtgcacacatcaccaggtgcatctgcaggcaccgggctggctgcttgcagccaggagaaggtcagcgagaaggagtgtatgagtgtgagtgtgtgtgcatggaagttggggcactgggcgtctgactccctccccacccaagagaggaaggacccctcaccacccccactggcgagacagtttactttgccgacttgccatgtttttgccaaaaccaagattttgaaggaaatgagtggccagcgccagggcccaggccatgtggcctgcccagcctcaatgtcacttggcggcggggtggggtgggggtgggcagcagcatcccagccttgagatgcttcactttccttctctgtaaccagactttgaaaaattgttcgtttcatcaggctctgttcctcaatggccttttgctacgtgcctcccgagaaatttgtctttttgtataaatgacaaagtgttgaaaatgtatttcctgaaataaatgtttcaaatgcagaaaccca

SEQ ID NO: 309716 - DNA, 4561 bp, Homo sapiens
  misc_feature (4461)..(4461): n is a, c, g, or t
tgcctctgtcactgcagactaatgggacggaggggggtgacttctcagggttcctcctgggcaggtgctccggaaccttttctcagcacgctggcctggggcacggccgttcctcctgcccagccacgttggggtacagggtgaagaagggctggggccagcccaggacagaggaaggcgaggcaggcacgcaggaactgggctttttaaacccttaagcccaaggaaatcgtagcatcgcgggacagggaaaatgaaagactttggaagtcgtcaggaatttgactctgtgagttggtttccaagagtctaagttaagcatctccaagtggatattaaaaaggagcagcaagcctcggggcggcgggggctggaggaggtggagagaggaggctgccggaagccgcactcgggacctctgcagccaccgaccagaccgggcggccgggactctgggactctcgcaggcagacccggtggtctgccggactcctcggggcccacttcgggccctctctcctgcctcctatttttggatttctctcctttgctccctttttcctcccgttttgaagagacaatgctacttcagtttggagcacaaacatatgatcagcacatggaaatgtggtaattcggatgcattcgtgattgcaacagattgaagaaattagaccagacaaagagtgtttttagaggaggaggaggaggaggaggaggctgagagagggagggcgacgggggtgagaaaggggaggccgcctctgagcgggacgccgggactcccgccgctgctaaatatatccgtaggaatggagagggaccggatctcagccttgaaaagatcttttgaggtcgaggaggtcgagacacccaactccaccccaccccggagggtccagactcccctactccgagccactgtggccagctccacccagaaattccaggacctgggcgtgaagaactcagaaccctcggcccgccatgtggactccctaagccaacgctcccccaaggcgtccctgcggagggtggagctctcgggccccaaggcggccgagccggtgtcccggcgcactgagctgtccattgacatctcgtccaagcaggtggagaacgccggggccatcggcccgtcccggttcgggctcaagagggccgaggtgttgggccacaagacgccagaaccggcccctcggaggacggagatcaccatcgtcaaaccccaggagtcagcccaccggaggatggagccccctgcctccaaggtccccgaggtgcccactgcccctgccaccgacgcagcccccaagagggtggagatccagatgcccaagcctgctgaggcgcccaccgcccccagcccagcccagaccttggagaattcagagcctgcccctgtgtctcagctgcagagcaggctggagcccaagccccagccccctgtggctgaggctacaccccggagccaggaggccactgaggcggctcccagctgcgttggcgacatggccgacacccccagagatgccgggctcaagcaggcgcctgcatcacggaacgagaaggccccggtggacttcggctacgtggggattgactccatcctggagcagatgcgccggaaggccatgaagcagggcttcgagttcaacatcatggtggtcgggcagagcggcttgggtaaatccaccttaatcaacaccctcttcaaatccaaaatcagccggaagtcggtgcagcccacctcagaggagcgcatccccaagaccatcgagatcaagtccatcacgcacgatattgaggagaaaggcgtccggatgaagctgacagtgattgacacaccagggttcggggaccacatcaacaacgagaactgctggcagcccatcatgaagttcatcaatgaccagtacgagaaatacctgcaggaggaggtcaacatcaaccgcaagaagcgcatcccggacacccgcgtccactgctgcctctacttcatccccgccaccggccactccctcaggcccctggacatcgagtttatgaaacgcctgagcaaggtggtcaacatcgtccctgtcatcgccaaggcggacacactcaccctggaggagagggtccacttcaaacagcggatcaccgcagacctgctgtccaacggcatcgacgtgtacccccagaaggaatttgatgaggactcggaggaccggctggtgaacgagaagttccgggagatgatcccatttgctgtggtgggcagtgaccacgagtaccaggtcaacggcaagaggatccttgggaggaagaccaagtggggtaccatcgaagttgaaaacaccacacactgtgagtttgcctacctgcgggaccttctcatcaggacgcacatgcagaacatcaaggacatcaccagcagcatccacttcgaggcgtaccgtgtgaagcgcctcaacgagggcagcagcgccatggccaacggcgtggaggagaaggagccagaagccccggagatgtagacgccaccctgcccacccccgggatcctgcccccaagtcatttccgtcccccccccaggccctcccaccaccccattttattttatatgattttctccatttgtcatcgttccccaccccttcgacatgctgccaggaaacaagggaaggggcctccctccgagtgagtcagtgatgaggccgcggcctccccgaggttgtggggaggctgcactggagccacaggcaggggtgagagcacccactgaattgacatgaccctctgtccccaggcctggctccccgagggctcagaagagcagcttcggtgtgcagatcatccgtccgtgtggggttctcagtgccggaggccttggggtgggggccaggcctcgcacttgcagaggagcccagtgggctgcacgctcccctccatccccatcggccctgtcccctggagtgtgtcagagcccaggggagaatgcagcccaccaggagcacctggaccccctgcccgccacatggtgtggccatcactcagcccctacccctgccctgctcctaagggtagaaaactccagggtcccctgccaccgactgcccagccactccaagccccctggcagctgcccctcctggagcagaaagtgcctttatctcagccatccgcagactgctcggccagatgcggggacaggctggaatgagggaggcgtcttcatctccctgccatccccctctcacgccacccccgcccccaccgggctgcaggtgctgctgatgcgctgggatctgattgaggataaaaaggaaggagagatgacccctaccccctcatcccccagttttgaaaaggtctaagcaagtgagtctggtggaggagctgagggagggagccatggaaggtgccagaaggaaggttggcgggggcacgtgtgggccgtggcttgggctggtcagagtggcgtgagctgcccggcgcctgccctgcccaagtgaccagggaagtgtgtgtgtgtccatgtgtatgcgtgtccgtctgtctgtctagtgtctgggtttggcccaagactgggctgtagttacattaatgcccagccagccacccctgccactcacccctcctggcccaggccttgctgactctctgagctggggaggtgggaggccaggcgagcctgactctgttgatctacccgtgcctgggcccctcccctcagagcccatggtaacgaacccctagaaaggagagaacgggcgtcaggggtgcacagtccacagctgaagagcaaggtttcgtggcagcacggcccggcccctcaccctctgtccccacgaggggacccatgggggctgtctttgcagggcacagatgaccaaagtcccttcctgcttcctgttacctgtcttgctcctggggagaaagaggggcctgatgagactccactcaggtgcacacatcaccaggtgcatctgcaggcaccgggctggctgcttgcagccaggagaaggtcagcgagaaggagtgtatgagtgtgagtgtgtgtgcatggaagttggggcactgggcgtctgactccctccccacccaagagaggaaggacccctcaccacccccactggcgagacagtttactttgccgacttgccatgtttttgccaaaaccaagattttgaaggaaatgagtggccagcgccagggcccaggccatgtggcctgcccagcctcaatgtcacttggcggcggggtggggtgggggtgggcagcagcatcccagccttgagatgcttcactttccttctctgtaaccagactttgaaaaattgttcgtttcatcaggctctgttcctcaatggccttttgctacgtgcctcccgagaaatttgtctttttgtataaatgacaaagtgttgaaaatgtatttcctgaaataaatgtttcaaatgcagaaacccaaaaaanaaaggaatcggggcacaagtgcgcgcggcaacgcggaacaagccactgcgcatagtgtcgggccttctgacaagggaccgcggcccaaggacgaaacaac

SEQ ID NO: 309717 - DNA, 4631 bp, Homo sapiens
  misc_feature (4545)..(4545): n is a, c, g, or t
  misc_feature (4553)..(4553): n is a, c, g, or t
  misc_feature (4572)..(4572): n is a, c, g, or t
  misc_feature (4595)..(4595): n is a, c, g, or t
  misc_feature (4610)..(4610): n is a, c, g, or t
  misc_feature (4631)..(4631): n is a, c, g, or t
tgcctctgtcactgcagactaatgggacggaggggggtgacttctcagggttcctcctgggcaggtgctccggaaccttttctcagcacgctggcctggggcacggccgttcctcctgcccagccacgttggggtacagggtgaagaagggctggggccagcccaggacagaggaaggcgaggcaggcacgcaggaactgggctttttaaacccttaagcccaaggaaatcgtagcatcgcgggacagggaaaatgaaagactttggaagtcgtcaggaatttgactctgtgagttggtttccaagagtctaagttaagcatctccaagtggatattaaaaaggagcagcaagcctcggggcggcgggggctggaggaggtggagagaggaggctgccggaagccgcactcgggacctctgcagccaccgaccagaccgggcggccgggactctgggactctcgcaggcagacccggtggtctgccggactcctcggggcccacttcgggccctctctcctgcctcctatttttggatttctctcctttgctccctttttcctcccgttttgaagagacaatgctacttcagtttggagcacaaacatatgatcagcacatggaaatgtggtaattcggatgcattcgtgattgcaacagattgaagaaattagaccagacaaagagtgtttttagaggaggaggaggaggaggaggaggctgagagagggagggcgacgggggtgagaaaggggaggccgcctctgagcgggacgccgggactcccgccgctgctaaatatatccgtaggaatggagagggaccggatctcagccttgaaaagatcttttgaggtcgaggaggtcgagacacccaactccaccccaccccggagggtccagactcccctactccgagccactgtggccagctccacccagaaattccaggacctgggcgtgaagaactcagaaccctcggcccgccatgtggactccctaagccaacgctcccccaaggcgtccctgcggagggtggagctctcgggccccaaggcggccgagccggtgtcccggcgcactgagctgtccattgacatctcgtccaagcaggtggagaacgccggggccatcggcccgtcccggttcgggctcaagagggccgaggtgttgggccacaagacgccagaaccggcccctcggaggacggagatcaccatcgtcaaaccccaggagtcagcccaccggaggatggagccccctgcctccaaggtccccgaggtgcccactgcccctgccaccgacgcagcccccaagagggtggagatccagatgcccaagcctgctgaggcgcccaccgcccccagcccagcccagaccttggagaattcagagcctgcccctgtgtctcagctgcagagcaggctggagcccaagccccagccccctgtggctgaggctacaccccggagccaggaggccactgaggcggctcccagctgcgttggcgacatggccgacacccccagagatgccgggctcaagcaggcgcctgcatcacggaacgagaaggccccggtggacttcggctacgtggggattgactccatcctggagcagatgcgccggaaggccatgaagcagggcttcgagttcaacatcatggtggtcgggcagagcggcttgggtaaatccaccttaatcaacaccctcttcaaatccaaaatcagccggaagtcggtgcagcccacctcagaggagcgcatccccaagaccatcgagatcaagtccatcacgcacgatattgaggagaaaggcgtccggatgaagctgacagtgattgacacaccagggttcggggaccacatcaacaacgagaactgctggcagcccatcatgaagttcatcaatgaccagtacgagaaatacctgcaggaggaggtcaacatcaaccgcaagaagcgcatcccggacacccgcgtccactgctgcctctacttcatccccgccaccggccactccctcaggcccctggacatcgagtttatgaaacgcctgagcaaggtggtcaacatcgtccctgtcatcgccaaggcggacacactcaccctggaggagagggtccacttcaaacagcggatcaccgcagacctgctgtccaacggcatcgacgtgtacccccagaaggaatttgatgaggactcggaggaccggctggtgaacgagaagttccgggagatgatcccatttgctgtggtgggcagtgaccacgagtaccaggtcaacggcaagaggatccttgggaggaagaccaagtggggtaccatcgaagttgaaaacaccacacactgtgagtttgcctacctgcgggaccttctcatcaggacgcacatgcagaacatcaaggacatcaccagcagcatccacttcgaggcgtaccgtgtgaagcgcctcaacgagggcagcagcgccatggccaacggcgtggaggagaaggagccagaagccccggagatgtagacgccaccctgcccacccccgggatcctgcccccaagtcatttccgtcccccccccaggccctcccaccaccccattttattttatatgattttctccatttgtcatcgttccccaccccttcgacatgctgccaggaaacaagggaaggggcctccctccgagtgagtcagtgatgaggccgcggcctccccgaggttgtggggaggctgcactggagccacaggcaggggtgagagcacccactgaattgacatgaccctctgtccccaggcctggctccccgagggctcagaagagcagcttcggtgtgcagatcatccgtccgtgtggggttctcagtgccggaggccttggggtgggggccaggcctcgcacttgcagaggagcccagtgggctgcacgctcccctccatccccatcggccctgtcccctggagtgtgtcagagcccaggggagaatgcagcccaccaggagcacctggaccccctgcccgccacatggtgtggccatcactcagcccctacccctgccctgctcctaagggtagaaaactccagggtcccctgccaccgactgcccagccactccaagccccctggcagctgcccctcctggagcagaaagtgcctttatctcagccatccgcagactgctcggccagatgcggggacaggctggaatgagggaggcgtcttcatctccctgccatccccctctcacgccacccccgcccccaccgggctgcaggtgctgctgatgcgctgggatctgattgaggataaaaaggaaggagagatgacccctaccccctcatcccccagttttgaaaaggtctaagcaagtgagtctggtggaggagctgagggagggagccatggaaggtgccagaaggaaggttggcgggggcacgtgtgggccgtggcttgggctggtcagagtggcgtgagctgcccggcgcctgccctgcccaagtgaccagggaagtgtgtgtgtgtccatgtgtatgcgtgtccgtctgtctgtctagtgtctgggtttggcccaagactgggctgtagttacattaatgcccagccagccacccctgccactcacccctcctggcccaggccttgctgactctctgagctggggaggtgggaggccaggcgagcctgactctgttgatctacccgtgcctgggcccctcccctcagagcccatggtaacgaacccctagaaaggagagaacgggcgtcaggggtgcacagtccacagctgaagagcaaggtttcgtggcagcacggcccggcccctcaccctctgtccccacgaggggacccatgggggctgtctttgcagggcacagatgaccaaagtcccttcctgcttcctgttacctgtcttgctcctggggagaaagaggggcctgatgagactccactcaggtgcacacatcaccaggtgcatctgcaggcaccgggctggctgcttgcagccaggagaaggtcagcgagaaggagtgtatgagtgtgagtgtgtgtgcatggaagttggggcactgggcgtctgactccctccccacccaagagaggaaggacccctcaccacccccactggcgagacagtttactttgccgacttgccatgtttttgccaaaaccaagattttgaaggaaatgagtggccagcgccagggcccaggccatgtggcctgcccagcctcaatgtcacttggcggcggggtggggtgggggtgggcagcagcatcccagccttgagatgcttcactttccttctctgtaaccagactttgaaaaattgttcgtttcatcaggctctgttcctcaatggccttttgctacgtgcctcccgagaaatttgtctttttgtataaatgacaaagtgttgaaaatgtatttcctgaaataaatgtttcaaatgcagaaacccagctagtaaagagggtccctcccacagagctgtgctgaccctgggttcacatagcagggactgggggtgtacaaaaggggtcctgctgtgnttgttaantcagtttcccctcttggtnaccctagctggaagagggggggncccggtacccaattngcctataggtgagccgatttn

SEQ ID NO: 309718 - DNA, 4521 bp, Homo sapiens
  misc_feature (4514)..(4514): n is a, c, g, or t
tgcctctgtcactgcagactaatgggacggaggggggtgacttctcagggttcctcctgggcaggtgctccggaaccttttctcagcacgctggcctggggcacggccgttcctcctgcccagccacgttggggtacagggtgaagaagggctggggccagcccaggacagaggaaggcgaggcaggcacgcaggaactgggctttttaaacccttaagcccaaggaaatcgtagcatcgcgggacagggaaaatgaaagactttggaagtcgtcaggaatttgactctgtgagttggtttccaagagtctaagttaagcatctccaagtggatattaaaaaggagcagcaagcctcggggcggcgggggctggaggaggtggagagaggaggctgccggaagccgcactcgggacctctgcagccaccgaccagaccgggcggccgggactctgggactctcgcaggcagacccggtggtctgccggactcctcggggcccacttcgggccctctctcctgcctcctatttttggatttctctcctttgctccctttttcctcccgttttgaagagacaatgctacttcagtttggagcacaaacatatgatcagcacatggaaatgtggtaattcggatgcattcgtgattgcaacagattgaagaaattagaccagacaaagagtgtttttagaggaggaggaggaggaggaggaggctgagagagggagggcgacgggggtgagaaaggggaggccgcctctgagcgggacgccgggactcccgccgctgctaaatatatccgtaggaatggagagggaccggatctcagccttgaaaagatcttttgaggtcgaggaggtcgagacacccaactccaccccaccccggagggtccagactcccctactccgagccactgtggccagctccacccagaaattccaggacctgggcgtgaagaactcagaaccctcggcccgccatgtggactccctaagccaacgctcccccaaggcgtccctgcggagggtggagctctcgggccccaaggcggccgagccggtgtcccggcgcactgagctgtccattgacatctcgtccaagcaggtggagaacgccggggccatcggcccgtcccggttcgggctcaagagggccgaggtgttgggccacaagacgccagaaccggcccctcggaggacggagatcaccatcgtcaaaccccaggagtcagcccaccggaggatggagccccctgcctccaaggtccccgaggtgcccactgcccctgccaccgacgcagcccccaagagggtggagatccagatgcccaagcctgctgaggcgcccaccgcccccagcccagcccagaccttggagaattcagagcctgcccctgtgtctcagctgcagagcaggctggagcccaagccccagccccctgtggctgaggctacaccccggagccaggaggccactgaggcggctcccagctgcgttggcgacatggccgacacccccagagatgccgggctcaagcaggcgcctgcatcacggaacgagaaggccccggtggacttcggctacgtggggattgactccatcctggagcagatgcgccggaaggccatgaagcagggcttcgagttcaacatcatggtggtcgggcagagcggcttgggtaaatccaccttaatcaacaccctcttcaaatccaaaatcagccggaagtcggtgcagcccacctcagaggagcgcatccccaagaccatcgagatcaagtccatcacgcacgatattgaggagaaaggcgtccggatgaagctgacagtgattgacacaccagggttcggggaccacatcaacaacgagaactgctggcagcccatcatgaagttcatcaatgaccagtacgagaaatacctgcaggaggaggtcaacatcaaccgcaagaagcgcatcccggacacccgcgtccactgctgcctctacttcatccccgccaccggccactccctcaggcccctggacatcgagtttatgaaacgcctgagcaaggtggtcaacatcgtccctgtcatcgccaaggcggacacactcaccctggaggagagggtccacttcaaacagcggatcaccgcagacctgctgtccaacggcatcgacgtgtacccccagaaggaatttgatgaggactcggaggaccggctggtgaacgagaagttccgggagatgatcccatttgctgtggtgggcagtgaccacgagtaccaggtcaacggcaagaggatccttgggaggaagaccaagtggggtaccatcgaagttgaaaacaccacacactgtgagtttgcctacctgcgggaccttctcatcaggacgcacatgcagaacatcaaggacatcaccagcagcatccacttcgaggcgtaccgtgtgaagcgcctcaacgagggcagcagcgccatggccaacggcgtggaggagaaggagccagaagccccggagatgtagacgccaccctgcccacccccgggatcctgcccccaagtcatttccgtcccccccccaggccctcccaccaccccattttattttatatgattttctccatttgtcatcgttccccaccccttcgacatgctgccaggaaacaagggaaggggcctccctccgagtgagtcagtgatgaggccgcggcctccccgaggttgtggggaggctgcactggagccacaggcaggggtgagagcacccactgaattgacatgaccctctgtccccaggcctggctccccgagggctcagaagagcagcttcggtgtgcagatcatccgtccgtgtggggttctcagtgccggaggccttggggtgggggccaggcctcgcacttgcagaggagcccagtgggctgcacgctcccctccatccccatcggccctgtcccctggagtgtgtcagagcccaggggagaatgcagcccaccaggagcacctggaccccctgcccgccacatggtgtggccatcactcagcccctacccctgccctgctcctaagggtagaaaactccagggtcccctgccaccgactgcccagccactccaagccccctggcagctgcccctcctggagcagaaagtgcctttatctcagccatccgcagactgctcggccagatgcggggacaggctggaatgagggaggcgtcttcatctccctgccatccccctctcacgccacccccgcccccaccgggctgcaggtgctgctgatgcgctgggatctgattgaggataaaaaggaaggagagatgacccctaccccctcatcccccagttttgaaaaggtctaagcaagtgagtctggtggaggagctgagggagggagccatggaaggtgccagaaggaaggttggcgggggcacgtgtgggccgtggcttgggctggtcagagtggcgtgagctgcccggcgcctgccctgcccaagtgaccagggaagtgtgtgtgtgtccatgtgtatgcgtgtccgtctgtctgtctagtgtctgggtttggcccaagactgggctgtagttacattaatgcccagccagccacccctgccactcacccctcctggcccaggccttgctgactctctgagctggggaggtgggaggccaggcgagcctgactctgttgatctacccgtgcctgggcccctcccctcagagcccatggtaacgaacccctagaaaggagagaacgggcgtcaggggtgcacagtccacagctgaagagcaaggtttcgtggcagcacggcccggcccctcaccctctgtccccacgaggggacccatgggggctgtctttgcagggcacagatgaccaaagtcccttcctgcttcctgttacctgtcttgctcctggggagaaagaggggcctgatgagactccactcaggtgcacacatcaccaggtgcatctgcaggcaccgggctggctgcttgcagccaggagaaggtcagcgagaaggagtgtatgagtgtgagtgtgtgtgcatggaagttggggcactgggcgtctgactccctccccacccaagagaggaaggacccctcaccacccccactggcgagacagtttactttgccgacttgccatgtttttgccaaaaccaagattttgaaggaaatgagtggccagcgccagggcccaggccatgtggcctgcccagcctcaatgtcacttggcggcggggtggggtgggggtgggcagcagcatcccagccttgagatgcttcactttccttctctgtaaccagactttgaaaaattgttcgtttcatcaggctctgttcctcaatggccttttgctacgtgcctcccgagaaatttgtctttttgtataaatgacaaagtgttgaaaatgtatttcctgaaataaatgtttcaaatgcagaaacccaaaaaaaaaaaaaaaaaaaaaaaattaaaattaaaaaaaaaaaaaaaaaaacaaaaaacnaacaaaa

SEQ ID NO: 309719 - DNA, 1825 bp, Homo sapiens
gccgggcgtgtaatcggacgaggaggaaacaagggaaggggcctccctccgagtgagtcagtgatgaggccgcggcctccccgaggttgtggggaggctgcactggagccacaggcaggggtgagagcacccactgaattgacatgaccctctgtccccaggcctggctccccgagggctcagaagagcagcttcggtgtgcagatcatccgtccgtgtggggttctcagtgccggaggccttggggtgggggccaggcctcgcacttgcagaggagcccagtgggctgcacgctcccctccatccccatcggccctgtcccctggagtgtgtcagagcccaggggagaatgcagcccaccaggagcacctggaccccctgcccgccacatggtgtggccatcactcagcccctacccctgccctgctcctaagggtagaaaactccagggtcccctgccaccgactgcccagccactccaagccccctggcagctgcccctcctggagcagaaagtgcctttatctcagccatccgcagactgctcggccagatgcggggacaggctggaatgagggaggcgtcttcatctccctgccatccccctctcacgccacccccgcccccaccgggctgcaggtgctgctgatgcgctgggatctgattgaggataaaaaggaaggagagatgacccctaccccctcatcccccagttttgaaaaggtctaagcaagtgagtctggtggaggagctgagggagggagccatggaaggtgccagaaggaaggttggcgggggcacgtgtgggccgtggcttgggctggtcagagtggcgtgagctgcccggcgcctgccctgcccaagtgaccagggaagtgtgtgtgtgtccatgtgtatgcgtgtccgtctgtctgtctagtgtctgggtttggcccaagactgggctgtagttacattaatgcccagccagccacccctgccactcacccctcctggcccaggccttgctgactctctgagctggggaggtgggaggccaggcgagcctgactctgttgatctacccgtgcctgggcccctcccctcagagcccatggtaacgaacccctagaaaggagagaacgggcgtcaggggtgcacagtccacagctgaagagcaaggtttcgtggcagcacggcccggcccctcaccctctgtccccacgaggggacccatgggggctgtctttgcagggcacagatgaccaaagtcccttcctgcttcctgttacctgtcttgctcctggggagaaagaggggcctgatgagactccactcaggtgcacacatcaccaggtgcatctgcaggcaccgggctggctgcttgcagccaggagaaggtcagcgagaaggagtgtatgagtgtgagtgtgtgtgcatggaagttggggcactgggcgtctgactccctccccacccaagagaggaaggacccctcaccacccccactggcgagacagtttactttgccgacttgccatgtttttgccaaaaccaagattttgaaggaaatgagtggccagcgccagggcccaggccatgtggcctgcccagcctcaatgtcacttggcggcggggtggggtgggggtgggcagcagcatcccagccttgagatgcttcactttccttctctgtaaccagactttgaaaaattgttcgtttcatcaggctctgttcctcaatggccttttgctacgtgcctcccgagaaatttgtctttttgtataaatgacaaagtgttgaaaatgtatttcctgaaataaatgtttcaaatgcagaaaccca

SEQ ID NO: 309720 - DNA, 1848 bp, Homo sapiens
ggaaggggcctccctcccttgtttcctggcagcatgtcgaaggggtgggaaacaagggaaggggcctccctccgagtgagtcagtgatgaggccgcggcctccccgaggttgtggggaggctgcactggagccacaggcaggggtgagagcacccactgaattgacatgaccctctgtccccaggcctggctccccgagggctcagaagagcagcttcggtgtgcagatcatccgtccgtgtggggttctcagtgccggaggccttggggtgggggccaggcctcgcacttgcagaggagcccagtgggctgcacgctcccctccatccccatcggccctgtcccctggagtgtgtcagagcccaggggagaatgcagcccaccaggagcacctggaccccctgcccgccacatggtgtggccatcactcagcccctacccctgccctgctcctaagggtagaaaactccagggtcccctgccaccgactgcccagccactccaagccccctggcagctgcccctcctggagcagaaagtgcctttatctcagccatccgcagactgctcggccagatgcggggacaggctggaatgagggaggcgtcttcatctccctgccatccccctctcacgccacccccgcccccaccgggctgcaggtgctgctgatgcgctgggatctgattgaggataaaaaggaaggagagatgacccctaccccctcatcccccagttttgaaaaggtctaagcaagtgagtctggtggaggagctgagggagggagccatggaaggtgccagaaggaaggttggcgggggcacgtgtgggccgtggcttgggctggtcagagtggcgtgagctgcccggcgcctgccctgcccaagtgaccagggaagtgtgtgtgtgtccatgtgtatgcgtgtccgtctgtctgtctagtgtctgggtttggcccaagactgggctgtagttacattaatgcccagccagccacccctgccactcacccctcctggcccaggccttgctgactctctgagctggggaggtgggaggccaggcgagcctgactctgttgatctacccgtgcctgggcccctcccctcagagcccatggtaacgaacccctagaaaggagagaacgggcgtcaggggtgcacagtccacagctgaagagcaaggtttcgtggcagcacggcccggcccctcaccctctgtccccacgaggggacccatgggggctgtctttgcagggcacagatgaccaaagtcccttcctgcttcctgttacctgtcttgctcctggggagaaagaggggcctgatgagactccactcaggtgcacacatcaccaggtgcatctgcaggcaccgggctggctgcttgcagccaggagaaggtcagcgagaaggagtgtatgagtgtgagtgtgtgtgcatggaagttggggcactgggcgtctgactccctccccacccaagagaggaaggacccctcaccacccccactggcgagacagtttactttgccgacttgccatgtttttgccaaaaccaagattttgaaggaaatgagtggccagcgccagggcccaggccatgtggcctgcccagcctcaatgtcacttggcggcggggtggggtgggggtgggcagcagcatcccagccttgagatgcttcactttccttctctgtaaccagactttgaaaaattgttcgtttcatcaggctctgttcctcaatggccttttgctacgtgcctcccgagaaatttgtctttttgtataaatgacaaagtgttgaaaatgtatttcctgaaataaatgtttcaaatgcagaaaccca

SEQ ID NO: 309721 - DNA, 1501 bp, Homo sapiens
gctagctaggtacgagcctgggtgttagcagcccaccaggagcacctggaccccctgcccgccacatggtgtggccatcactcagcccctacccctgccctgctcctaagggtagaaaactccagggtcccctgccaccgactgcccagccactccaagccccctggcagctgcccctcctggagcagaaagtgcctttatctcagccatccgcagactgctcggccagatgcggggacaggctggaatgagggaggcgtcttcatctccctgccatccccctctcacgccacccccgcccccaccgggctgcaggtgctgctgatgcgctgggatctgattgaggataaaaaggaaggagagatgacccctaccccctcatcccccagttttgaaaaggtctaagcaagtgagtctggtggaggagctgagggagggagccatggaaggtgccagaaggaaggttggcgggggcacgtgtgggccgtggcttgggctggtcagagtggcgtgagctgcccggcgcctgccctgcccaagtgaccagggaagtgtgtgtgtgtccatgtgtatgcgtgtccgtctgtctgtctagtgtctgggtttggcccaagactgggctgtagttacattaatgcccagccagccacccctgccactcacccctcctggcccaggccttgctgactctctgagctggggaggtgggaggccaggcgagcctgactctgttgatctacccgtgcctgggcccctcccctcagagcccatggtaacgaacccctagaaaggagagaacgggcgtcaggggtgcacagtccacagctgaagagcaaggtttcgtggcagcacggcccggcccctcaccctctgtccccacgaggggacccatgggggctgtctttgcagggcacagatgaccaaagtcccttcctgcttcctgttacctgtcttgctcctggggagaaagaggggcctgatgagactccactcaggtgcacacatcaccaggtgcatctgcaggcaccgggctggctgcttgcagccaggagaaggtcagcgagaaggagtgtatgagtgtgagtgtgtgtgcatggaagttggggcactgggcgtctgactccctccccacccaagagaggaaggacccctcaccacccccactggcgagacagtttactttgccgacttgccatgtttttgccaaaaccaagattttgaaggaaatgagtggccagcgccagggcccaggccatgtggcctgcccagcctcaatgtcacttggcggcggggtggggtgggggtgggcagcagcatcccagccttgagatgcttcactttccttctctgtaaccagactttgaaaaattgttcgtttcatcaggctctgttcctcaatggccttttgctacgtgcctcccgagaaatttgtctttttgtataaatgacaaagtgttgaaaatgtatttcctgaaataaatgtttcaaatgcagaaaccca

SEQ ID NO: 309722 - DNA, 4272 bp, Homo sapiens
tgcctctgtcactgcagactaatgggacggaggggggtgacttctcagggttcctcctgggcaggtgctccggaaccttttctcagcacgctggcctggggcacggccgttcctcctgcccagccacgttggggtacagggtgaagaagggctggggccagcccaggacagaggaaggcgaggcaggcacgcaggaactgggctttttaaacccttaagcccaaggaaatcgtagcatcgcgggacagggaaaatgaaagactttggaagtcgtcaggaatttgactctgtgagttggtttccaagagtctaagttaagcatctccaagtggatattaaaaaggagcagcaagcctcggggcggcgggggctggaggaggtggagagaggaggctgccggaagccgcactcgggacctctgcagccaccgaccagaccgggcggccgggactctgggactctcgcaggcagacccggtggtctgccggactcctcggggcccacttcgggccctctctcctgcctcctatttttggatttctctcctttgctccctttttcctcccgttttgaagagacaatgctacttcagtttggagcacaaacatatgatcagcacatggaaatgtggtaattcggatgcattcgtgattgcaacagattgaagaaattagaccagacaaagagtgtttttagaggaggaggaggaggaggaggaggctgagagagggagggcgacgggggtgagaaaggggaggccgcctctgagcgggacgccgggactcccgccgctgctaaatatatccgtaggaatggagagggaccggatctcagccttgaaaagatcttttgaggtcgaggaggtcgagacacccaactccaccccaccccggagggtccagactcccctactccgagccactgtggccagctccacccagaaattccaggacctgggcgtgaagaactcagaaccctcggcccgccatgtggactccctaagccaacgctcccccaaggcgtccctgcggagggtggagctctcgggccccaaggcggccgagccggtgtcccggcgcactgagctgtccattgacatctcgtccaagcaggtggagaacgccggggccatcggcccgtcccggttcgggctcaagagggccgaggtgttgggccacaagacgccagaaccggcccctcggaggacggagatcaccatcgtcaaaccccaggagtcagcccaccggaggatggagccccctgcctccaaggtccccgaggtgcccactgcccctgccaccgacgcagcccccaagagggtggagatccagatgcccaagcctgctgaggcgcccaccgcccccagcccagcccagaccttggagaattcagagcctgcccctgtgtctcagctgcagagcaggctggagcccaagccccagccccctgtggctgaggctacaccccggagccaggaggccactgaggcggctcccagctgcgttggcgacatggccgacacccccagagatgccgggctcaagcaggcgcctgcatcacggaacgagaaggccccggtggacttcggctacgtggggattgactccatcctggagcagatgcgccggaaggccatgaagcagggcttcgagttcaacatcatggtggtcgggcagagcggcttgggtaaatccaccttaatcaacaccctcttcaaatccaaaatcagccggaagtcggtgcagcccacctcagaggagcgcatccccaagaccatcgagatcaagtccatcacgcacgatattgaggagaaaggcgtccggatgaagctgacagtgattgacacaccagggttcggggaccacatcaacaacgagaactgctggcagcccatcatgaagttcatcaatgaccagtacgagaaatacctgcaggaggaggtcaacatcaaccgcaagaagcgcatcccggacacccgcgtccactgctgcctctacttcatccccgccaccggccactccctcaggcccctggacatcgagtttatgaaacgcctgagcaaggtggtcaacatcgtccctgtcatcgccaaggcggacacactcaccctggaggagagggtccacttcaaacagcggatcaccgcagacctgctgtccaacggcatcgacgtgtacccccagaaggaatttgatgaggactcggaggaccggctggtgaacgagaagttccgggagatgatcccatttgctgtggtgggcagtgaccacgagtaccaggtcaacggcaagaggatccttgggaggaagaccaagtggggtaccatcgaagttgaaaacaccacacactgtgagtttgcctacctgcgggaccttctcatcaggacgcacatgcagaacatcaaggacatcaccagcagcatccacttcgaggcgtaccgtgtgaagcgcctcaacgagggcagcagcgccatggccaacggcgtggaggagaaggagccagaagccccggagatgtagacgccaccctgcccacccccgggatcctgcccccaagtcatttccgtcccccccccaggccctcccaccaccccattttattttatatgattttctccatttgtcatcgttccccaccccttcgacatgctgccaggaaacaagggaaggggcctccctccgagtgagtcagtgatgaggccgcggcctccccgaggttgtggggaggctgcactggagccacaggcaggggtgagagcacccactgaattgacatgaccctctgtccccaggcctggctccccgagggctcagaagagcagcttcggtgtgcagatcatccgtccgtgtggggttctcagtgccggaggccttggggtgggggccaggcctcgcacttgcagaggagcccagtgggctgcacgctcccctccatccccatcggccctgtcccctggagtgtgtcagagcccaggggagaatgcagcccaccaggagcacctggaccccctgcccgccacatggtgtggccatcactcagcccctacccctgccctgctcctaagggtagaaaactccagggtcccctgccaccgactgcccagccactccaagccccctggcagctgcccctcctggagcagaaagtgcctttatctcagccatccgcagactgctcggccagatgcggggacaggctggaatgagggaggcgtcttcatctccctgccatccccctctcacgccacccccgcccccaccgggctgcaggtgctgctgatgcgctgggatctgattgaggataaaaaggaaggagagatgacccctaccccctcatcccccagttttgaaaaggtctaagcaagtgagtctggtggaggagctgagggagggagccatggaaggtgccagaaggaaggttggcgggggcacgtgtgggccgtggcttgggctggtcagagtggcgtgagctgcccggcgcctgccctgcccaagtgaccagggaagtgtgtgtgtgtccatgtgtatgcgtgtccgtctgtctgtctagtgtctgggtttggcccaagactgggctgtagttacattaatgcccagccagccacccctgccactcacccctcctggcccaggccttgctgactctctgagctggggaggtgggaggccaggcgagcctgactctgttgatctacccgtgcctgggcccctcccctcagagcccatggtaacgaacccctagaaaggagagaacgggcgtcaggggtgcacagtccacagctgaagagcaaggtttcgtggcagcacggcccggcccctcaccctctgtccccacgaggggacccatgggggctgtctttgcagggcacagatgaccaaagtcccttcctgcttcctgttacctccaagagaggaaggacccctcaccacccccactggcgagacagtttactttgccgacttgccatgtttttgccaaaaccaagattttgaaggaaatgagtggccagcgccagggcccaggccatgtggcctgcccagcctcaatgtcacttggcggcggggtggggtgggggtgggcagcagcatcccagccttgagatgcttcactttccttctctgtaaccagactttgaaaaattgttcgtttcatcaggctctgttcctcaatggccttttgctacgtgcctcccgagaaatttgtctttttgtataaatgacaaagtgttgaaaatgtatttcctgaaataaatgtttcaaatgcagaaaccca

SEQ ID NO: 309723 - DNA, 4156 bp, Homo sapiens
tgcctctgtcactgcagactaatgggacggaggggggtgacttctcagggttcctcctgggcaggtgctccggaaccttttctcagcacgctggcctggggcacggccgttcctcctgcccagccacgttggggtacagggtgaagaagggctggggccagcccaggacagaggaaggcgaggcaggcacgcaggaactgggctttttaaacccttaagcccaaggaaatcgtagcatcgcgggacagggaaaatgaaagactttggaagtcgtcaggaatttgactctgtgagttggtttccaagagtctaagttaagcatctccaagtggatattaaaaaggagcagcaagcctcggggcggcgggggctggaggaggtggagagaggaggctgccggaagccgcactcgggacctctgcagccaccgaccagaccgggcggccgggactctgggactctcgcaggcagacccggtggtctgccggactcctcggggcccacttcgggccctctctcctgcctcctatttttggatttctctcctttgctccctttttcctcccgttttgaagagacaatgctacttcagtttggagcacaaacatatgatcagcacatggaaatgtggtaattcggatgcattcgtgattgcaacagattgaagaaattagaccagacaaagagtgtttttagaggaggaggaggaggaggaggaggctgagagagggagggcgacgggggtgagaaaggggaggccgcctctgagcgggacgccgggactcccgccgctgctaaatatatccgtaggaatggagagggaccggatctcagccttgaaaagatcttttgaggtcgaggaggtcgagacacccaactccaccccaccccggagggtccagactcccctactccgagccactgtggccagctccacccagaaattccaggacctgggcgtgaagaactcagaaccctcggcccgccatgtggactccctaagccaacgctcccccaaggcgtccctgcggagggtggagctctcgggccccaaggcggccgagccggtgtcccggcgcactgagctgtccattgacatctcgtccaagcaggtggagaacgccggggccatcggcccgtcccggttcgggctcaagagggccgaggtgttgggccacaagacgccagaaccggcccctcggaggacggagatcaccatcgtcaaaccccaggagtcagcccaccggaggatggagccccctgcctccaaggtccccgaggtgcccactgcccctgccaccgacgcagcccccaagagggtggagatccagatgcccaagcctgctgaggcgcccaccgcccccagcccagcccagaccttggagaattcagagcctgcccctgtgtctcagctgcagagcaggctggagcccaagccccagccccctgtggctgaggctacaccccggagccaggaggccactgaggcggctcccagctgcgttggcgacatggccgacacccccagagatgccgggctcaagcaggcgcctgcatcacggaacgagaaggccccggtggacttcggctacgtggggattgactccatcctggagcagatgcgccggaaggccatgaagcagggcttcgagttcaacatcatggtggtcgggcagagcggcttgggtaaatccaccttaatcaacaccctcttcaaatccaaaatcagccggaagtcggtgcagcccacctcagaggagcgcatccccaagaccatcgagatcaagtccatcacgcacgatattgaggagaaaggcgtccggatgaagctgacagtgattgacacaccagggttcggggaccacatcaacaacgagaactgctggcagcccatcatgaagttcatcaatgaccagtacgagaaatacctgcaggaggaggtcaacatcaaccgcaagaagcgcatcccggacacccgcgtccactgctgcctctacttcatccccgccaccggccactccctcaggcccctggacatcgagtttatgaaacgcctgagcaaggtggtcaacatcgtccctgtcatcgccaaggcggacacactcaccctggaggagagggtccacttcaaacagcggatcaccgcagacctgctgtccaacggcatcgacgtgtacccccagaaggaatttgatgaggactcggaggaccggctggtgaacgagaagttccgggagatgatcccatttgctgtggtgggcagtgaccacgagtaccaggtcaacggcaagaggatccttgggaggaagaccaagtggggtaccatcgaagttgaaaacaccacacactgtgagtttgcctacctgcgggaccttctcatcaggacgcacatgcagaacatcaaggacatcaccagcagcatccacttcgaggcgtaccgtgtgaagcgcctcaacgagggcagcagcgccatggccaacggcgtggaggagaaggagccagaagccccggagatgtagacgccaccctgcccacccccgggatcctgcccccaagtcatttccgtcccccccccaggccctcccaccaccccattttattttatatgattttctccatttgtcatcgttccccaccccttcgacatgctgccaggaaacaagggaaggggcctccctccgagtgagtcagtgatgaggccgcggcctccccgaggttgtggggaggctgcactggagccacaggcaggggtgagagcacccactgaattgacatgaccctctgtccccaggcctggctccccgagggctcagaagagcagcttcggtgtgcagatcatccgtccgtgtggggttctcagtgccggaggccttggggtgggggccaggcctcgcacttgcagaggagcccagtgggctgcacgctcccctccatccccatcggccctgtcccctggagtgtgtcagagcccaggggagaatgcagcccaccaggagcacctggaccccctgcccgccacatggtgtggccatcactcagcccctacccctgccctgctcctaagggtagaaaactccagggtcccctgccaccgactgcccagccactccaagccccctggcagctgcccctcctggagcagaaagtgcctttatctcagccatccgcagactgctcggccagatgcggggacaggctggaatgagggaggcgtcttcatctccctgccatccccctctcacgccacccccgcccccaccgggctgcaggtgctgctgatgcgctgggatctgattgaggataaaaaggaaggagagatgacccctaccccctcatcccccagttttgaaaaggtctaagcaagtgagtctggtggaggagctgagggagggagccatggaaggtgccagaaggaaggttggcgggggcacgtgtgggccgtggcttgggctggtcagagtggcgtgagctgcccggcgcctgccctgcccaagtgaccagggaagtgtgtgtgtgtccatgtgtatgcgtgtccgtctgtctgtctagtgtctgggtttggcccaagactgggctgtagttacattaatgcccagccagccacccctgccactcacccctcctggcccaggccttgctgactctctgagctggggaggtgggaggccaggcgagcctgactctgttgatctacccgtgcctgggcccctcccctcagagcccatggtaacgaacccctagaaaggagagaacgggcgtcaggggtgcacagtccacagctgaagagcaaggtttcgtggcagcacggcccggcccctcaccctctgtccccacgaggggacccatgggggctgtctttgcagggcacagatgaccaaagtcccttcctgcttcctgttacctgtcttgctcctggggagaaagaggggcctgatgagactccactcaggtgcacacatcaccaggtgcatctgcaggcaccgggctggctgcttgcagccaggagaaggtcagcgagaaggagtgtatgagtgtgagtgtgtgtgcatggaagttggggcactgggcgtctgactccctccccacggactacagccaagagcgactacagccaagagcgactacagccaagagcgactgaaggggatcctctaag

SEQ ID NO: 309724 - DNA, 1181 bp, Homo sapiens
cagaagaaagaaacaacttacggctaggtacgaggctgggtgtatgacccctaccccctcatcccccagttttgaaaaggtctaagcaagtgagtctggtggaggagctgagggagggagccatggaaggtgccagaaggaaggttggcgggggcacgtgtgggccgtggcttgggctggtcagagtggcgtgagctgcccggcgcctgccctgcccaagtgaccagggaagtgtgtgtgtgtccatgtgtatgcgtgtccgtctgtctgtctagtgtctgggtttggcccaagactgggctgtagttacattaatgcccagccagccacccctgccactcacccctcctggcccaggccttgctgactctctgagctggggaggtgggaggccaggcgagcctgactctgttgatctacccgtgcctgggcccctcccctcagagcccatggtaacgaacccctagaaaggagagaacgggcgtcaggggtgcacagtccacagctgaagagcaaggtttcgtggcagcacggcccggcccctcaccctctgtccccacgaggggacccatgggggctgtctttgcagggcacagatgaccaaagtcccttcctgcttcctgttacctgtcttgctcctggggagaaagaggggcctgatgagactccactcaggtgcacacatcaccaggtgcatctgcaggcaccgggctggctgcttgcagccaggagaaggtcagcgagaaggagtgtatgagtgtgagtgtgtgtgcatggaagttggggcactgggcgtctgactccctccccacccaagagaggaaggacccctcaccacccccactggcgagacagtttactttgccgacttgccatgtttttgccaaaaccaagattttgaaggaaatgagtggccagcgccagggcccaggccatgtggcctgcccagcctcaatgtcacttggcggcggggtggggtgggggtgggcagcagcatcccagccttgagatgcttcactttccttctctgtaaccagactttgaaaaattgttcgtttcatcaggctctgttcctcaatggccttttgctacgtgcctcccgagaaatttgtctttttgtataaatgacaaagtgttgaaaatgtatttcctgaaataaatgtttcaaatgcagaaaccca

SEQ ID NO: 309725 - DNA, 1196 bp, Homo sapiens
ggtgtccaaagtttaaactcccctccacggggttatggtagcgaggcctgggtggcggatgacccctaccccctcatcccccagttttgaaaaggtctaagcaagtgagtctggtggaggagctgagggagggagccatggaaggtgccagaaggaaggttggcgggggcacgtgtgggccgtggcttgggctggtcagagtggcgtgagctgcccggcgcctgccctgcccaagtgaccagggaagtgtgtgtgtgtccatgtgtatgcgtgtccgtctgtctgtctagtgtctgggtttggcccaagactgggctgtagttacattaatgcccagccagccacccctgccactcacccctcctggcccaggccttgctgactctctgagctggggaggtgggaggccaggcgagcctgactctgttgatctacccgtgcctgggcccctcccctcagagcccatggtaacgaacccctagaaaggagagaacgggcgtcaggggtgcacagtccacagctgaagagcaaggtttcgtggcagcacggcccggcccctcaccctctgtccccacgaggggacccatgggggctgtctttgcagggcacagatgaccaaagtcccttcctgcttcctgttacctgtcttgctcctggggagaaagaggggcctgatgagactccactcaggtgcacacatcaccaggtgcatctgcaggcaccgggctggctgcttgcagccaggagaaggtcagcgagaaggagtgtatgagtgtgagtgtgtgtgcatggaagttggggcactgggcgtctgactccctccccacccaagagaggaaggacccctcaccacccccactggcgagacagtttactttgccgacttgccatgtttttgccaaaaccaagattttgaaggaaatgagtggccagcgccagggcccaggccatgtggcctgcccagcctcaatgtcacttggcggcggggtggggtgggggtgggcagcagcatcccagccttgagatgcttcactttccttctctgtaaccagactttgaaaaattgttcgtttcatcaggctctgttcctcaatggccttttgctacgtgcctcccgagaaatttgtctttttgtataaatgacaaagtgttgaaaatgtatttcctgaaataaatgtttcaaatgcagaaaccca

SEQ ID NO: 309726 - DNA, 1107 bp, Homo sapiens
cggacgcgtgggtcgacccacgcgtccgaggagctgagggagggagccatggaaggtgccagaaggaaggttggcgggggcacgtgtgggccgtggcttgggctggtcagagtggcgtgagctgcccggcgcctgccctgcccaagtgaccagggaagtgtgtgtgtgtccatgtgtatgcgtgtccgtctgtctgtctagtgtctgggtttggcccaagactgggctgtagttacattaatgcccagccagccacccctgccactcacccctcctggcccaggccttgctgactctctgagctggggaggtgggaggccaggcgagcctgactctgttgatctacccgtgcctgggcccctcccctcagagcccatggtaacgaacccctagaaaggagagaacgggcgtcaggggtgcacagtccacagctgaagagcaaggtttcgtggcagcacggcccggcccctcaccctctgtccccacgaggggacccatgggggctgtctttgcagggcacagatgaccaaagtcccttcctgcttcctgttacctgtcttgctcctggggagaaagaggggcctgatgagactccactcaggtgcacacatcaccaggtgcatctgcaggcaccgggctggctgcttgcagccaggagaaggtcagcgagaaggagtgtatgagtgtgagtgtgtgtgcatggaagttggggcactgggcgtctgactccctccccacccaagagaggaaggacccctcaccacccccactggcgagacagtttactttgccgacttgccatgtttttgccaaaaccaagattttgaaggaaatgagtggccagcgccagggcccaggccatgtggcctgcccagcctcaatgtcacttggcggcggggtggggtgggggtgggcagcagcatcccagccttgagatgcttcactttccttctctgtaaccagactttgaaaaattgttcgtttcatcaggctctgttcctcaatggccttttgctacgtgcctcccgagaaatttgtctttttgtataaatgacaaagtgttgaaaatgtatttcctgaaataaatgtttcaaatgcagaaaccca

SEQ ID NO: 309727 - DNA, 1250 bp, Homo sapiens
gccttcctactaccggcccaggattagcgccctgggagcgcgcgccccgctgcctcgccgccacactttcctgggagcggcggccacggaggcaccatgaagaagtcttactcaggaggcacgcggacctccagtggccggctccggaggcttggtgactccagtggcccagccttgaaaagatcttttgaggtcgaggaggtcgagacacccaactccaccccaccccggagggtccagactcccctactccgatggcgtgagctgcccggcgcctgccctgcccaagtgaccagggaagtgtgtgtgtgtccatgtgtatgcgtgtccgtctgtctgtctagtgtctgggtttggcccaagactgggctgtagttacattaatgcccagccagccacccctgccactcacccctcctggcccaggccttgctgactctctgagctggggaggtgggaggccaggcgagcctgactctgttgatctacccgtgcctgggcccctcccctcagagcccatggtaacgaacccctagaaaggagagaacgggcgtcaggggtgcacagtccacagctgaagagcaaggtttcgtggcagcacggcccggcccctcaccctctgtccccacgaggggacccatgggggctgtctttgcagggcacagatgaccaaagtcccttcctgcttcctgttacctgtcttgctcctggggagaaagaggggcctgatgagactccactcaggtgcacacatcaccaggtgcatctgcaggcaccgggctggctgcttgcagccaggagaaggtcagcgagaaggagtgtatgagtgtgagtgtgtgtgcatggaagttggggcactgggcgtctgactccctccccacccaagagaggaaggacccctcaccacccccactggcgagacagtttactttgccgacttgccatgtttttgccaaaaccaagattttgaaggaaatgagtggccagcgccagggcccaggccatgtggcctgcccagcctcaatgtcacttggcggcggggtggggtgggggtgggcagcagcatcccagccttgagatgcttcactttccttctctgtaaccagactttgaaaaattgttcgtttcatcaggctctgttcctcaatggccttttgctacgtgcctcccgagaaatttgtctttttgtataaatgacaaagtgttgaaaatgtatttcctgaaataaatgtttcaaatgcagaaaccca

SEQ ID NO: 309728 - DNA, 2742 bp, Homo sapiens
tgcctctgtcactgcagactaatgggacggaggggggtgacttctcagggttcctcctgggcaggtgctccggaaccttttctcagcacgctggcctggggcacggccgttcctcctgcccagccacgttggggtacagggtgaagaagggctggggccagcccaggacagaggaaggcgaggcaggcacgcaggaactgggctttttaaacccttaagcccaaggaaatcgtagcatcgcgggacagggaaaatgaaagactttggaagtcgtcaggaatttgactctgtgagttggtttccaagagtctaagttaagcatctccaagtggatattaaaaaggagcagcaagcctcggggcggcgggggctggaggaggtggagagaggaggctgccggaagccgcactcgggacctctgcagccaccgaccagaccgggcggccgggactctgggactctcgcaggcagacccggtggtctgccggactcctcggggcccacttcgggccctctctcctgcctcctatttttggatttctctcctttgctccctttttcctcccgttttgaagagacaatgctacttcagtttggagcacaaacatatgatcagcacatggaaatgtggtaattcggatgcattcgtgattgcaacagattgaagaaattagaccagacaaagagtgtttttagaggaggaggaggaggaggaggaggctgagagagggagggcgacgggggtgagaaaggggaggccgcctctgagcgggacgccgggactcccgccgctgctaaatatatccgtaggaatggagagggaccggatctcagccttgaaaagatcttttgaggtcgaggaggtcgagacacccaactccaccccaccccggagggtccagactcccctactccgagccactgtggccagctccacccagaaattccaggacctgggcgtgaagaactcagaaccctcggcccgccatgtggactccctaagccaacgctcccccaaggcgtccctgcggagggtggagctctcgggccccaaggcggccgagccggtgtcccggcgcactgagctgtccattgacatctcgtccaagcaggtggagaacgccggggccatcggcccgtcccggttcgggctcaagagggccgaggtgttgggccacaagacgccagaaccggcccctcggaggacggagatcaccatcgtcaaaccccaggagtcagcccaccggaggatggagccccctgcctccaaggtccccgaggtgcccactgcccctgccaccgacgcagcccccaagagggtggagatccagatgcccaagcctgctgaggcgcccaccgcccccagcccagcccagaccttggagaattcagagcctgcccctgtgtctcagctgcagagcaggctggagcccaagccccagccccctgtggctgaggctacaccccggagccaggaggccactgaggcggctcccagctgcgttggcgacatggccgacacccccagagatgccgggctcaagcaggcgcctgcatcacggaacgagaaggccccggtggacttcggctacgtggggattgactccatcctggagcagatgcgccggaaggccatgaagcagggcttcgagttcaacatcatggtggtcgggcagagcggcttgggtaaatccaccttaatcaacaccctcttcaaatccaaaatcagccggaagtcggtgcagcccacctcagaggagcgcatccccaagaccatcgagatcaagtccatcacgcacgatattgaggagaaaggcgtccggatgaagctgacagtgattgacacaccagggttcggggaccacatcaacaacgagaactgctggcagcccatcatgaagttcatcaatgaccagtacgagaaatacctgcaggaggaggtcaacatcaaccgcaagaagcgcatcccggacacccgcgtccactgctgcctctacttcatccccgccaccggccactccctcaggcccctggacatcgagtttatgaaacgcctgagcaaggtggtcaacatcgtccctgtcatcgccaaggcggacacactcacccctctgtccccacgaggggacccatgggggctgtctttgcagggcacagatgaccaaagtcccttcctgcttcctgttacctgtcttgctcctggggagaaagaggggcctgatgagactccactcaggtgcacacatcaccaggtgcatctgcaggcaccgggctggctgcttgcagccaggagaaggtcagcgagaaggagtgtatgagtgtgagtgtgtgtgcatggaagttggggcactgggcgtctgactccctccccacccaagagaggaaggacccctcaccacccccactggcgagacagtttactttgccgacttgccatgtttttgccaaaaccaagattttgaaggaaatgagtggccagcgccagggcccaggccatgtggcctgcccagcctcaatgtcacttggcggcggggtggggtgggggtgggcagcagcatcccagccttgagatgcttcactttccttctctgtaaccagactttgaaaaattgttcgtttcatcaggctctgttcctcaatggccttttgctacgtgcctcccgagaaatttgtctttttgtataaatgacaaagtgttgaaaatgtatttcctgaaataaatgtttcaaatgcagaaaccca

SEQ ID NO: 309729 - DNA, 3470 bp, Homo sapiens
tgcctctgtcactgcagactaatgggacggaggggggtgacttctcagggttcctcctgggcaggtgctccggaaccttttctcagcacgctggcctggggcacggccgttcctcctgcccagccacgttggggtacagggtgaagaagggctggggccagcccaggacagaggaaggcgaggcaggcacgcaggaactgggctttttaaacccttaagcccaaggaaatcgtagcatcgcgggacagggaaaatgaaagactttggaagtcgtcaggaatttgactctgtgagttggtttccaagagtctaagttaagcatctccaagtggatattaaaaaggagcagcaagcctcggggcggcgggggctggaggaggtggagagaggaggctgccggaagccgcactcgggacctctgcagccaccgaccagaccgggcggccgggactctgggactctcgcaggcagacccggtggtctgccggactcctcggggcccacttcgggccctctctcctgcctcctatttttggatttctctcctttgctccctttttcctcccgttttgaagagacaatgctacttcagtttggagcacaaacatatgatcagcacatggaaatgtggtaattcggatgcattcgtgattgcaacagattgaagaaattagaccagacaaagagtgtttttagaggaggaggaggaggaggaggaggctgagagagggagggcgacgggggtgagaaaggggaggccgcctctgagcgggacgccgggactcccgccgctgctaaatatatccgtaggaatggagagggaccggatctcagccttgaaaagatcttttgaggtcgaggaggtcgagacacccaactccaccccaccccggagggtccagactcccctactccgagccactgtggccagctccacccagaaattccaggacctgggcgtgaagaactcagaaccctcggcccgccatgtggactccctaagccaacgctcccccaaggcgtccctgcggagggtggagctctcgggccccaaggcggccgagccggtgtcccggcgcactgagctgtccattgacatctcgtccaagcaggtggagaacgccggggccatcggcccgtcccggttcgggctcaagagggccgaggtgttgggccacaagacgccagaaccggcccctcggaggacggagatcaccatcgtcaaaccccaggagtcagcccaccggaggatggagccccctgcctccaaggtccccgaggtgcccactgcccctgccaccgacgcagcccccaagagggtggagatccagatgcccaagcctgctgaggcgcccaccgcccccagcccagcccagaccttggagaattcagagcctgcccctgtgtctcagctgcagagcaggctggagcccaagccccagccccctgtggctgaggctacaccccggagccaggaggccactgaggcggctcccagctgcgttggcgacatggccgacacccccagagatgccgggctcaagcaggcgcctgcatcacggaacgagaaggccccggtggacttcggctacgtggggattgactccatcctggagcagatgcgccggaaggccatgaagcagggcttcgagttcaacatcatggtggtcgggcagagcggcttgggtaaatccaccttaatcaacaccctcttcaaatccaaaatcagccggaagtcggtgcagcccacctcagaggagcgcatccccaagaccatcgagatcaagtccatcacgcacgatattgaggagaaaggcgtccggatgaagctgacagtgattgacacaccagggttcggggaccacatcaacaacgagaactgctggcagcccatcatgaagttcatcaatgaccagtacgagaaatacctgcaggaggaggtcaacatcaaccgcaagaagcgcatcccggacacccgcgtccactgctgcctctacttcatccccgccaccggccactccctcaggcccctggacatcgagtttatgaaacgcctgagcaaggtggtcaacatcgtccctgtcatcgccaaggcggacacactcaccctggaggagagggtccacttcaaacagcggatcaccgcagacctgctgtccaacggcatcgacgtgtacccccagaaggaatttgatgaggactcggaggaccggctggtgaacgagaagttccgggagatgatcccatttgctgtggtgggcagtgaccacgagtaccaggtcaacggcaagaggatccttgggaggaagaccaagtggggtaccatcgaagttgaaaacaccacacactgtgagtttgcctacctgcgggaccttctcatcaggacgcacatgcagaacatcaaggacatcaccagcagcatccacttcgaggcgtaccgtgtgaagcgcctcaacgagggcagcagcgccatggccaacggcgtggaggagaaggagccagaagccccggagatgtagacgccaccctgcccacccccgggatcctgcccccaagtcatttccgtcccccccccaggccctcccaccaccccattttattttatatgattttctccatttgtcatcgttccccaccccttcgacatgctgccaggaaacaagggaaggggcctccctccgagtgagtcagtgatgaggccgcggcctccccgaggttgtggggaggctgcactggagccacaggcaggggtgagagcacccactgaattgacatgaccctctgtccccaggcctggctccccgagggctcagaagagcagcttcggtgtgcagatcatccgtccgtgtggggttctcagtgccggaggccttggggtgggggccaggcctcgcacttgcagaggagcccagtgggctgcacgctcccctccatccccatcggccctgtcccctggagtgtgtcagagcccaggggagaatgcagcccaccaggagcacctggaccccctgcccgccacatggtgtggccatcactcagcccctacccctgccctgctcctaagggtagaaaactccagggtcccctgccaccgactgcccagccactccaagccccctggcagctgcccctcctggagcagaaagtgcctttatctcagccatccgcagactgctcggccagatgcggggacaggctggaatgagggaggcgtcttcatctccctgccatccccctctcacgccacccccgcccccaccgggctgcaggtgctgctgatgcgctgggatctgattgaggataaaaaggaaggagagatgacccctaccccctcatcccccagttttgaaaaggctctgttcctcaatggccttttgctacgtgcctcccgagaaatttgtctttttgtataaatgacaaagtgttgaaaatgtatttcctgaaataaatgtttcaaatgcagaaaccca

SEQ ID NO: 309730 - DNA, 3268 bp, Homo sapiens
tgcctctgtcactgcagactaatgggacggaggggggtgacttctcagggttcctcctgggcaggtgctccggaaccttttctcagcacgctggcctggggcacggccgttcctcctgcccagccacgttggggtacagggtgaagaagggctggggccagcccaggacagaggaaggcgaggcaggcacgcaggaactgggctttttaaacccttaagcccaaggaaatcgtagcatcgcgggacagggaaaatgaaagactttggaagtcgtcaggaatttgactctgtgagttggtttccaagagtctaagttaagcatctccaagtggatattaaaaaggagcagcaagcctcggggcggcgggggctggaggaggtggagagaggaggctgccggaagccgcactcgggacctctgcagccaccgaccagaccgggcggccgggactctgggactctcgcaggcagacccggtggtctgccggactcctcggggcccacttcgggccctctctcctgcctcctatttttggatttctctcctttgctccctttttcctcccgttttgaagagacaatgctacttcagtttggagcacaaacatatgatcagcacatggaaatgtggtaattcggatgcattcgtgattgcaacagattgaagaaattagaccagacaaagagtgtttttagaggaggaggaggaggaggaggaggctgagagagggagggcgacgggggtgagaaaggggaggccgcctctgagcgggacgccgggactcccgccgctgctaaatatatccgtaggaatggagagggaccggatctcagccttgaaaagatcttttgaggtcgaggaggtcgagacacccaactccaccccaccccggagggtccagactcccctactccgagccactgtggccagctccacccagaaattccaggacctgggcgtgaagaactcagaaccctcggcccgccatgtggactccctaagccaacgctcccccaaggcgtccctgcggagggtggagctctcgggccccaaggcggccgagccggtgtcccggcgcactgagctgtccattgacatctcgtccaagcaggtggagaacgccggggccatcggcccgtcccggttcgggctcaagagggccgaggtgttgggccacaagacgccagaaccggcccctcggaggacggagatcaccatcgtcaaaccccaggagtcagcccaccggaggatggagccccctgcctccaaggtccccgaggtgcccactgcccctgccaccgacgcagcccccaagagggtggagatccagatgcccaagcctgctgaggcgcccaccgcccccagcccagcccagaccttggagaattcagagcctgcccctgtgtctcagctgcagagcaggctggagcccaagccccagccccctgtggctgaggctacaccccggagccaggaggccactgaggcggctcccagctgcgttggcgacatggccgacacccccagagatgccgggctcaagcaggcgcctgcatcacggaacgagaaggccccggtggacttcggctacgtggggattgactccatcctggagcagatgcgccggaaggccatgaagcagggcttcgagttcaacatcatggtggtcgggcagagcggcttgggtaaatccaccttaatcaacaccctcttcaaatccaaaatcagccggaagtcggtgcagcccacctcagaggagcgcatccccaagaccatcgagatcaagtccatcacgcacgatattgaggagaaaggcgtccggatgaagctgacagtgattgacacaccagggttcggggaccacatcaacaacgagaactgctggcagcccatcatgaagttcatcaatgaccagtacgagaaatacctgcaggaggaggtcaacatcaaccgcaagaagcgcatcccggacacccgcgtccactgctgcctctacttcatccccgccaccggccactccctcaggcccctggacatcgagtttatgaaacgcctgagcaaggtggtcaacatcgtccctgtcatcgccaaggcggacacactcaccctggaggagagggtccacttcaaacagcggatcaccgcagacctgctgtccaacggcatcgacgtgtacccccagaaggaatttgatgaggactcggaggaccggctggtgaacgagaagttccgggagatgatcccatttgctgtggtgggcagtgaccacgagtaccaggtcaacggcaagaggatccttgggaggaagaccaagtggggtaccatcgaagttgaaaacaccacacactgtgagtttgcctacctgcgggaccttctcatcaggacgcacatgcagaacatcaaggacatcaccagcagcatccacttcgaggcgtaccgtgtgaagcgcctcaacgagggcagcagcgccatggccaacggcgtggaggagaaggagccagaagccccggagatgtagacgccaccctgcccacccccgggatcctgcccccaagtcatttccgtcccccccccaggccctcccaccaccccattttattttatatgattttctccatttgtcatcgttccccaccccttcgacatgctgccaggaaacaagggaaggggcctccctccgagtgagtcagtgatgaggccgcggcctccccgaggttgtggggaggctgcactggagccacaggcaggggtgagagcacccactgaattgacatgaccctctgtccccaggcctggctccccgagggctcagaagagcagcttcggtgtgcagatcatccgtccgtgtggggttctcagtgccggaggccttggggtgggggccaggcctcgcacttgcagaggagcccagtgggctgcacgctcccctccatccccatcggccctgtcccctggagtgtgtcagagcccaggggagaatattttgaaggaaatgagtggccagcgccagggcccaggccatgtggcctgcccagcctcaatgtcacttggcggcggggtggggtgggggtgggcagcagcatcccagccttgagatgcttcactttccttctctgtaaccagactttgaaaaattgttcgtttcatcaggctctgttcctcaatggccttttgctacgtgcctcccgagaaatttgtctttttgtataaatgacaaagtgttgaaaatgtatttcctgaaataaatgtttcaaatgcagaaaccca

SEQ ID NO: 309731 - DNA, 746 bp, Homo sapiens
caggcatctgcttggacggcatcaagcttgggaaaggagagaacgggcgtcaggggtgcacagtccacagctgaagagcaaggtttcgtggcagcacggcccggcccctcaccctctgtccccacgaggggacccatgggggctgtctttgcagggcacagatgaccaaagtcccttcctgcttcctgttacctgtcttgctcctggggagaaagaggggcctgatgagactccactcaggtgcacacatcaccaggtgcatctgcaggcaccgggctggctgcttgcagccaggagaaggtcagcgagaaggagtgtatgagtgtgagtgtgtgtgcatggaagttggggcactgggcgtctgactccctccccacccaagagaggaaggacccctcaccacccccactggcgagacagtttactttgccgacttgccatgtttttgccaaaaccaagattttgaaggaaatgagtggccagcgccagggcccaggccatgtggcctgcccagcctcaatgtcacttggcggcggggtggggtgggggtgggcagcagcatcccagccttgagatgcttcactttccttctctgtaaccagactttgaaaaattgttcgtttcatcaggctctgttcctcaatggccttttgctacgtgcctcccgagaaatttgtctttttgtataaatgacaaagtgttgaaaatgtatttcctgaaataaatgtttcaaatgcagaaaccca

SEQ ID NO: 309732 - DNA, 2393 bp, Homo sapiens
tgcctctgtcactgcagactaatgggacggaggggggtgacttctcagggttcctcctgggcaggtgctccggaaccttttctcagcacgctggcctggggcacggccgttcctcctgcccagccacgttggggtacagggtgaagaagggctggggccagcccaggacagaggaaggcgaggcaggcacgcaggaactgggctttttaaacccttaagcccaaggaaatcgtagcatcgcgggacagggaaaatgaaagactttggaagtcgtcaggaatttgactctgtgagttggtttccaagagtctaagttaagcatctccaagtggatattaaaaaggagcagcaagcctcggggcggcgggggctggaggaggtggagagaggaggctgccggaagccgcactcgggacctctgcagccaccgaccagaccgggcggccgggactctgggactctcgcaggcagacccggtggtctgccggactcctcggggcccacttcgggccctctctcctgcctcctatttttggatttctctcctttgctccctttttcctcccgttttgaagagacaatgctacttcagtttggagcacaaacatatgatcagcacatggaaatgtggtaattcggatgcattcgtgattgcaacagattgaagaaattagaccagacaaagagtgtttttagaggaggaggaggaggaggaggaggctgagagagggagggcgacgggggtgagaaaggggaggccgcctctgagcgggacgccgggactcccgccgctgctaaatatatccgtaggaatggagagggaccggatctcagccttgaaaagatcttttgaggtcgaggaggtcgagacacccaactccaccccaccccggagggtccagactcccctactccgagccactgtggccagctccacccagaaattccaggacctgggcgtgaagaactcagaaccctcggcccgccatgtggactccctaagccaacgctcccccaaggcgtccctgcggagggtggagctctcgggccccaaggcggccgagccggtgtcccggcgcactgagctgtccattgacatctcgtccaagcaggtggagaacgccggggccatcggcccgtcccggttcgggctcaagagggccgaggtgttgggccacaagacgccagaaccggcccctcggaggacggagatcaccatcgtcaaaccccaggagtcagcccaccggaggatggagccccctgcctccaaggtccccgaggtgcccactgcccctgccaccgacgcagcccccaagagggtggagatccagatgcccaagcctgctgaggcgcccaccgcccccagcccagcccagaccttggagaattcagagcctgcccctgtgtctcagctgcagagcaggctggagcccaagccccagccccctgtggctgaggctacaccccggagccaggaggccactgaggcggctcccagctgcgttggcgacatggccgacacccccagagatgccgggctcaagcaggcgcctgcatcacggaacgagaaggccccggtggacttcggctacgtggggattgactccatcctggagcagatgcgccggaaggccatgaagcagggcttcgagttcaacatcatggtggtcgggcagagcggcttgggtaaatccaccttaatcaacaccctcttcaaatccaaaatcagccggaagtcggtgcagcccacctcagaggagcgcatccccaagaccatcgagatcaagtccatcacgcacgatattgaggagaaaggcgtccggatgaagctgacagtgattgacacaccagggttcggggaccacatcaacaacgagaactgctggcagcccatcatgaagttcatcaatgaccagtacgagaaatactgcttgcagccaggagaaggtcagcgagaaggagtgtatgagtgtgagtgtgtgtgcatggaagttggggcactgggcgtctgactccctccccacccaagagaggaaggacccctcaccacccccactggcgagacagtttactttgccgacttgccatgtttttgccaaaaccaagattttgaaggaaatgagtggccagcgccagggcccaggccatgtggcctgcccagcctcaatgtcacttggcggcggggtggggtgggggtgggcagcagcatcccagccttgagatgcttcactttccttctctgtaaccagactttgaaaaattgttcgtttcatcaggctctgttcctcaatggccttttgctacgtgcctcccgagaaatttgtctttttgtataaatgacaaagtgttgaaaatgtatttcctgaaataaatgtttcaaatgcagaaaccca

SEQ ID NO: 309733 - DNA, 2767 bp, Homo sapiens
tgcctctgtcactgcagactaatgggacggaggggggtgacttctcagggttcctcctgggcaggtgctccggaaccttttctcagcacgctggcctggggcacggccgttcctcctgcccagccacgttggggtacagggtgaagaagggctggggccagcccaggacagaggaaggcgaggcaggcacgcaggaactgggctttttaaacccttaagcccaaggaaatcgtagcatcgcgggacagggaaaatgaaagactttggaagtcgtcaggaatttgactctgtgagttggtttccaagagtctaagttaagcatctccaagtggatattaaaaaggagcagcaagcctcggggcggcgggggctggaggaggtggagagaggaggctgccggaagccgcactcgggacctctgcagccaccgaccagaccgggcggccgggactctgggactctcgcaggcagacccggtggtctgccggactcctcggggcccacttcgggccctctctcctgcctcctatttttggatttctctcctttgctccctttttcctcccgttttgaagagacaatgctacttcagtttggagcacaaacatatgatcagcacatggaaatgtggtaattcggatgcattcgtgattgcaacagattgaagaaattagaccagacaaagagtgtttttagaggaggaggaggaggaggaggaggctgagagagggagggcgacgggggtgagaaaggggaggccgcctctgagcgggacgccgggactcccgccgctgctaaatatatccgtaggaatggagagggaccggatctcagccttgaaaagatcttttgaggtcgaggaggtcgagacacccaactccaccccaccccggagggtccagactcccctactccgagccactgtggccagctccacccagaaattccaggacctgggcgtgaagaactcagaaccctcggcccgccatgtggactccctaagccaacgctcccccaaggcgtccctgcggagggtggagctctcgggccccaaggcggccgagccggtgtcccggcgcactgagctgtccattgacatctcgtccaagcaggtggagaacgccggggccatcggcccgtcccggttcgggctcaagagggccgaggtgttgggccacaagacgccagaaccggcccctcggaggacggagatcaccatcgtcaaaccccaggagtcagcccaccggaggatggagccccctgcctccaaggtccccgaggtgcccactgcccctgccaccgacgcagcccccaagagggtggagatccagatgcccaagcctgctgaggcgcccaccgcccccagcccagcccagaccttggagaattcagagcctgcccctgtgtctcagctgcagagcaggctggagcccaagccccagccccctgtggctgaggctacaccccggagccaggaggccactgaggcggctcccagctgcgttggcgacatggccgacacccccagagatgccgggctcaagcaggcgcctgcatcacggaacgagaaggccccggtggacttcggctacgtggggattgactccatcctggagcagatgcgccggaaggccatgaagcagggcttcgagttcaacatcatggtggtcgggcagagcggcttgggtaaatccaccttaatcaacaccctcttcaaatccaaaatcagccggaagtcggtgcagcccacctcagaggagcgcatccccaagaccatcgagatcaagtccatcacgcacgatattgaggagaaaggcgtccggatgaagctgacagtgattgacacaccagggttcggggaccacatcaacaacgagaactgctggcagcccatcatgaagttcatcaatgaccagtacgagaaatacctgcaggaggaggtcaacatcaaccgcaagaagcgcatcccggacacccgcgtccactgctgcctctacttcatccccgccaccggccactccctcaggcccctggacatcgagtttatgaaacgcctgagcaaggtggtcaacatcgtccctgtcatcgccaaggcggacacactcaccctggaggagagggtccacttcaaacagcggatcaccgcagacctgctgtccaacggcatcgacgtgtacccccagaaggaatttgatgaggactcggaggaccggctggtgaacgagaagttccgggagatgatcccatttgctgtggtgggcagtgaccacgagtaccaggtcaacggcaagaggatccttgggaggaagaccaagtggggtaccatcgaagttgaaaacaccacacactgtgagtttgcctacctgcgggaccttctcatcaggacgcacatgcagaacatcaaggacatcaccagcagcatccacttcgaggcgtaccgtgtgaagcgcctcaacgagggcagcagcgccatggccaacggcgtggaggagaaggagccagaagccccggagatgtagacgccaccctgcccagcctcaatgtcacttggcggcggggtggggtgggggtgggcagcagcatcccagccttgagatgcttcactttccttctctgtaaccagactttgaaaaattgttcgtttcatcaggctctgttcctcaatggccttttgctacgtgcctcccgagaaatttgtctttttgtataaatgacaaagtgttgaaaatgtatttcctgaaataaatgtttcaaatgcagaaaccca

SEQ ID NO: 309734 - DNA, 2558 bp, Homo sapiens
  misc_feature (2531)..(2532): n is a, c, g, or t
tgcctctgtcactgcagactaatgggacggaggggggtgacttctcagggttcctcctgggcaggtgctccggaaccttttctcagcacgctggcctggggcacggccgttcctcctgcccagccacgttggggtacagggtgaagaagggctggggccagcccaggacagaggaaggcgaggcaggcacgcaggaactgggctttttaaacccttaagcccaaggaaatcgtagcatcgcgggacagggaaaatgaaagactttggaagtcgtcaggaatttgactctgtgagttggtttccaagagtctaagttaagcatctccaagtggatattaaaaaggagcagcaagcctcggggcggcgggggctggaggaggtggagagaggaggctgccggaagccgcactcgggacctctgcagccaccgaccagaccgggcggccgggactctgggactctcgcaggcagacccggtggtctgccggactcctcggggcccacttcgggccctctctcctgcctcctatttttggatttctctcctttgctccctttttcctcccgttttgaagagacaatgctacttcagtttggagcacaaacatatgatcagcacatggaaatgtggtaattcggatgcattcgtgattgcaacagattgaagaaattagaccagacaaagagtgtttttagaggaggaggaggaggaggaggaggctgagagagggagggcgacgggggtgagaaaggggaggccgcctctgagcgggacgccgggactcccgccgctgctaaatatatccgtaggaatggagagggaccggatctcagccttgaaaagatcttttgaggtcgaggaggtcgagacacccaactccaccccaccccggagggtccagactcccctactccgagccactgtggccagctccacccagaaattccaggacctgggcgtgaagaactcagaaccctcggcccgccatgtggactccctaagccaacgctcccccaaggcgtccctgcggagggtggagctctcgggccccaaggcggccgagccggtgtcccggcgcactgagctgtccattgacatctcgtccaagcaggtggagaacgccggggccatcggcccgtcccggttcgggctcaagagggccgaggtgttgggccacaagacgccagaaccggcccctcggaggacggagatcaccatcgtcaaaccccaggagtcagcccaccggaggatggagccccctgcctccaaggtccccgaggtgcccactgcccctgccaccgacgcagcccccaagagggtggagatccagatgcccaagcctgctgaggcgcccaccgcccccagcccagcccagaccttggagaattcagagcctgcccctgtgtctcagctgcagagcaggctggagcccaagccccagccccctgtggctgaggctacaccccggagccaggaggccactgaggcggctcccagctgcgttggcgacatggccgacacccccagagatgccgggctcaagcaggcgcctgcatcacggaacgagaaggccccggtggacttcggctacgtggggattgactccatcctggagcagatgcgccggaaggccatgaagcagggcttcgagttcaacatcatggtggtcgggcagagcggcttgggtaaatccaccttaatcaacaccctcttcaaatccaaaatcagccggaagtcggtgcagcccacctcagaggagcgcatccccaagaccatcgagatcaagtccatcacgcacgatattgaggagaaaggcgtccggatgaagctgacagtgattgacacaccagggttcggggaccacatcaacaacgagaactgctggcagcccatcatgaagttcatcaatgaccagtacgagaaatacctgcaggaggaggtcaacatcaaccgcaagaagcgcatcccggacacccgcgtccactgctgcctctacttcatccccgccaccggccactccctcaggcccctggacatcgagtttatgaaacgcctgagcaaggtggtcaacatcgtccctgtcatcgccaaggcggacacactcaccctggaggagagggtccacttcaaacagcggatcaccgcagacctgctgtccaacggcatcgacgtgtacccccagaaggaatttgatgaggactcggaggaccggctggtgaacgagaagttccgggagatgatcccatttgctgtggtgggcagtgaccacgagtaccaggtcaacggcaagaggatccttgggaggaagaccaagtggggtaccatcgaagttgaaaacaccacacactgtgagtttgcctacctgcgggaccttctcatcaggacgcacatgcagaacatcaaggacatcaccagcagcatccacttcgaggcgtaccgtgtgaagcgcctcaacgagggcagcagcgccatggccaacggcgtggaggagaaggagccagaagccccggagatgtagacgccaccaaannaaagaagtgagagagggaaaagaaga

SEQ ID NO: 309735 - DNA, 2833 bp, Homo sapiens
  misc_feature (2826)..(2826): n is a, c, g, or t
tgcctctgtcactgcagactaatgggacggaggggggtgacttctcagggttcctcctgggcaggtgctccggaaccttttctcagcacgctggcctggggcacggccgttcctcctgcccagccacgttggggtacagggtgaagaagggctggggccagcccaggacagaggaaggcgaggcaggcacgcaggaactgggctttttaaacccttaagcccaaggaaatcgtagcatcgcgggacagggaaaatgaaagactttggaagtcgtcaggaatttgactctgtgagttggtttccaagagtctaagttaagcatctccaagtggatattaaaaaggagcagcaagcctcggggcggcgggggctggaggaggtggagagaggaggctgccggaagccgcactcgggacctctgcagccaccgaccagaccgggcggccgggactctgggactctcgcaggcagacccggtggtctgccggactcctcggggcccacttcgggccctctctcctgcctcctatttttggatttctctcctttgctccctttttcctcccgttttgaagagacaatgctacttcagtttggagcacaaacatatgatcagcacatggaaatgtggtaattcggatgcattcgtgattgcaacagattgaagaaattagaccagacaaagagtgtttttagaggaggaggaggaggaggaggaggctgagagagggagggcgacgggggtgagaaaggggaggccgcctctgagcgggacgccgggactcccgccgctgctaaatatatccgtaggaatggagagggaccggatctcagccttgaaaagatcttttgaggtcgaggaggtcgagacacccaactccaccccaccccggagggtccagactcccctactccgagccactgtggccagctccacccagaaattccaggacctgggcgtgaagaactcagaaccctcggcccgccatgtggactccctaagccaacgctcccccaaggcgtccctgcggagggtggagctctcgggccccaaggcggccgagccggtgtcccggcgcactgagctgtccattgacatctcgtccaagcaggtggagaacgccggggccatcggcccgtcccggttcgggctcaagagggccgaggtgttgggccacaagacgccagaaccggcccctcggaggacggagatcaccatcgtcaaaccccaggagtcagcccaccggaggatggagccccctgcctccaaggtccccgaggtgcccactgcccctgccaccgacgcagcccccaagagggtggagatccagatgcccaagcctgctgaggcgcccaccgcccccagcccagcccagaccttggagaattcagagcctgcccctgtgtctcagctgcagagcaggctggagcccaagccccagccccctgtggctgaggctacaccccggagccaggaggccactgaggcggctcccagctgcgttggcgacatggccgacacccccagagatgccgggctcaagcaggcgcctgcatcacggaacgagaaggccccggtggacttcggctacgtggggattgactccatcctggagcagatgcgccggaaggccatgaagcagggcttcgagttcaacatcatggtggtcgggcagagcggcttgggtaaatccaccttaatcaacaccctcttcaaatccaaaatcagccggaagtcggtgcagcccacctcagaggagcgcatccccaagaccatcgagatcaagtccatcacgcacgatattgaggagaaaggcgtccggatgaagctgacagtgattgacacaccagggttcggggaccacatcaacaacgagaactgctggcagcccatcatgaagttcatcaatgaccagtacgagaaatacctgcaggaggaggtcaacatcaaccgcaagaagcgcatcccggacacccgcgtccactgctgcctctacttcatccccgccaccggccactccctcaggcccctggacatcgagtttatgaaacgcctgagcaaggtggtcaacatcgtccctgtcatcgccaaggcggacacactcaccctggaggagagggtccacttcaaacagcggatcaccgcagacctgctgtccaacggcatcgacgtgtacccccagaaggaatttgatgaggactcggaggaccggctggtgaacgagaagttccgggagatgatcccatttgctgtggtgggcagtgaccacgagtaccaggtcaacggcaagaggatccttgggaggaagaccaagtggggtaccatcgaagttgaaaacaccacacactgtgagtttgcctacctgcgggaccttctcatcaggacgcacatgcagaacatcaaggacatcaccagcagcatccacttcgaggcgtaccgtgtgaagcgcctcaacgagggcagcagcgccatggccaacggcgtggaggagaaggagccagaagccccggagatgtagacgccaccctgcccagcctcaatgtcacttggcggcggggtggggtgggggtgggcagcagcatcccagccttgagatgcttcactttccttctctgtaaccagactttgaaaaattgttcgtttcatcaggctctgttcctcaatggccttttgctacgtgcctcccgagaaatttgtctttttgtataaatgacaaagtgttgaaaatgtatttcctgaaataaatgtttcaaatgcagaaacccaaaaaaaaaaaaaaaaaaaaaaaattaaaattaaaaaaaaaaaaaaaaaaacaaaaaacnaacaaaa

SEQ ID NO: 309736 - DNA, 1131 bp, Homo sapiens
gggacgccacacgaggagcaggtgtggtgtgcgtcctcctgcgggttctccacctcttggcttcgttacctgcactaggctttgtggtgagagggcacagagtggaggaaggtgccgtggctagggcaggccacacgctgtgctaatggattgctgttacctgtcgcctctgtggttttgctgtcaggatcctccagcaccaggtccccaccaccagccactgaggcggctcccagctgcgttggcgacatggccgacacccccagagatgccgggctcaagcaggcgcctgcatcacggaacgagaaggccccggtggacttcggctacgtggggattgactccatcctggagcagatgcgccggaaggccatgaagcagggcttcgagttcaacatcatggtggtcgggcagagcggcttgggtaaatccaccttaatcaacaccctcttcaaatccaaaatcagccggaagtcggtgcagcccacctcagaggagcgcatccccaagaccatcgagatcaagtccatcacgcacgatattgaggagaaaggcgtccggatgaagctgacagtgattgacacaccagggttcggggaccacatcaacaacgagaactgctggcagcccatcatgaagttcatcaatgaccagtacgagaaatactgcttgcagccaggagaaggtcagcgagaaggagtgtatgagtgtgagtgtgtgtgcatggaagttggggcactgggcgtctgactccctccccacccaagagaggaaggacccctcaccacccccactggcgagacagtttactttgccgacttgccatgtttttgccaaaaccaagattttgaaggaaatgagtggccagcgccagggcccaggccatgtggcctgcccagcctcaatgtcacttggcggcggggtggggtgggggtgggcagcagcatcccagccttgagatgcttcactttccttctctgtaaccagactttgaaaaattgttcgtttcatcaggctctgttcctcaatggccttttgctacgtgcctcccgagaaatttgtctttttgtataaatgacaaagtgttgaaaatgtatttcctgaaataaatgtttcaaatgcagaaaccca

SEQ ID NO: 309737 - DNA, 2651 bp, Homo sapiens
tgcctctgtcactgcagactaatgggacggaggggggtgacttctcagggttcctcctgggcaggtgctccggaaccttttctcagcacgctggcctggggcacggccgttcctcctgcccagccacgttggggtacagggtgaagaagggctggggccagcccaggacagaggaaggcgaggcaggcacgcaggaactgggctttttaaacccttaagcccaaggaaatcgtagcatcgcgggacagggaaaatgaaagactttggaagtcgtcaggaatttgactctgtgagttggtttccaagagtctaagttaagcatctccaagtggatattaaaaaggagcagcaagcctcggggcggcgggggctggaggaggtggagagaggaggctgccggaagccgcactcgggacctctgcagccaccgaccagaccgggcggccgggactctgggactctcgcaggcagacccggtggtctgccggactcctcggggcccacttcgggccctctctcctgcctcctatttttggatttctctcctttgctccctttttcctcccgttttgaagagacaatgctacttcagtttggagcacaaacatatgatcagcacatggaaatgtggtaattcggatgcattcgtgattgcaacagattgaagaaattagaccagacaaagagtgtttttagaggaggaggaggaggaggaggaggctgagagagggagggcgacgggggtgagaaaggggaggccgcctctgagcgggacgccgggactcccgccgctgctaaatatatccgtaggaatggagagggaccggatctcagccttgaaaagatcttttgaggtcgaggaggtcgagacacccaactccaccccaccccggagggtccagactcccctactccgagccactgtggccagctccacccagaaattccaggacctgggcgtgaagaactcagaaccctcggcccgccatgtggactccctaagccaacgctcccccaaggcgtccctgcggagggtggagctctcgggccccaaggcggccgagccggtgtcccggcgcactgagctgtccattgacatctcgtccaagcaggtggagaacgccggggccatcggcccgtcccggttcgggctcaagagggccgaggtgttgggccacaagacgccagaaccggcccctcggaggacggagatcaccatcgtcaaaccccaggagtcagcccaccggaggatggagccccctgcctccaaggtccccgaggtgcccactgcccctgccaccgacgcagcccccaagagggtggagatccagatgcccaagcctgctgaggcgcccaccgcccccagcccagcccagaccttggagaattcagagcctgcccctgtgtctcagctgcagagcaggctggagcccaagccccagccccctgtggctgaggctacaccccggagccaggaggccactgaggcggctcccagctgcgttggcgacatggccgacacccccagagatgccgggctcaagcaggcgcctgcatcacggaacgagaaggccccggtggacttcggctacgtggggattgactccatcctggagcagatgcgccggaaggccatgaagcagggcttcgagttcaacatcatggtggtcgggcagagcggcttgggtaaatccaccttaatcaacaccctcttcaaatccaaaatcagccggaagtcggtgcagcccacctcagaggagcgcatccccaagaccatcgagatcaagtccatcacgcacgatattgaggagaaaggcgtccggatgaagctgacagtgattgacacaccagggttcggggaccacatcaacaacgagaactgctggcagcccatcatgaagttcatcaatgaccagtacgagaaatacctgcaggaggaggtcaacatcaaccgcaagaagcgcatcccggacacccgcgtccactgctgcctctacttcatccccgccaccggccactccctcaggcccctggacatcgagtttatgaaacgcctgagcaaggtggtcaacatcgtccctgtcatcgccaaggcggacacactcaccctggaggagagggtccacttcaaacagcggatcaccgcagacctgctgtccaacggcatcgacgtgtacccccagaaggaatttgatgaggactcggaggaccggctggtgaacgagaagttccgggagatgatcccatttgctgtggtgggcagtgaccacgagtaccaggtcaacggcaagaggatccttgggaggaagaccaagtggggtaccatcgaagttgaaaacaccacacactgtgagtttgcctacctgcgggaccttctcatcaggacgcacatgcagaacatcaaggacatcaccagcagcatccacttcgaggcgtaccgtgtgaagcgcctcaacgagggcagcatcccagccttgagatgcttcactttccttctctgtaaccagactttgaaaaattgttcgtttcatcaggctctgttcctcaatggccttttgctacgtgcctcccgagaaatttgtctttttgtataaatgacaaagtgttgaaaatgtatttcctgaaataaatgtttcaaatgcagaaaccca

SEQ ID NO: 309738 - DNA, 2603 bp, Homo sapiens
tgcctctgtcactgcagactaatgggacggaggggggtgacttctcagggttcctcctgggcaggtgctccggaaccttttctcagcacgctggcctggggcacggccgttcctcctgcccagccacgttggggtacagggtgaagaagggctggggccagcccaggacagaggaaggcgaggcaggcacgcaggaactgggctttttaaacccttaagcccaaggaaatcgtagcatcgcgggacagggaaaatgaaagactttggaagtcgtcaggaatttgactctgtgagttggtttccaagagtctaagttaagcatctccaagtggatattaaaaaggagcagcaagcctcggggcggcgggggctggaggaggtggagagaggaggctgccggaagccgcactcgggacctctgcagccaccgaccagaccgggcggccgggactctgggactctcgcaggcagacccggtggtctgccggactcctcggggcccacttcgggccctctctcctgcctcctatttttggatttctctcctttgctccctttttcctcccgttttgaagagacaatgctacttcagtttggagcacaaacatatgatcagcacatggaaatgtggtaattcggatgcattcgtgattgcaacagattgaagaaattagaccagacaaagagtgtttttagaggaggaggaggaggaggaggaggctgagagagggagggcgacgggggtgagaaaggggaggccgcctctgagcgggacgccgggactcccgccgctgctaaatatatccgtaggaatggagagggaccggatctcagccttgaaaagatcttttgaggtcgaggaggtcgagacacccaactccaccccaccccggagggtccagactcccctactccgagccactgtggccagctccacccagaaattccaggacctgggcgtgaagaactcagaaccctcggcccgccatgtggactccctaagccaacgctcccccaaggcgtccctgcggagggtggagctctcgggccccaaggcggccgagccggtgtcccggcgcactgagctgtccattgacatctcgtccaagcaggtggagaacgccggggccatcggcccgtcccggttcgggctcaagagggccgaggtgttgggccacaagacgccagaaccggcccctcggaggacggagatcaccatcgtcaaaccccaggagtcagcccaccggaggatggagccccctgcctccaaggtccccgaggtgcccactgcccctgccaccgacgcagcccccaagagggtggagatccagatgcccaagcctgctgaggcgcccaccgcccccagcccagcccagaccttggagaattcagagcctgcccctgtgtctcagctgcagagcaggctggagcccaagccccagccccctgtggctgaggctacaccccggagccaggaggccactgaggcggctcccagctgcgttggcgacatggccgacacccccagagatgccgggctcaagcaggcgcctgcatcacggaacgagaaggccccggtggacttcggctacgtggggattgactccatcctggagcagatgcgccggaaggccatgaagcagggcttcgagttcaacatcatggtggtcgggcagagcggcttgggtaaatccaccttaatcaacaccctcttcaaatccaaaatcagccggaagtcggtgcagcccacctcagaggagcgcatccccaagaccatcgagatcaagtccatcacgcacgatattgaggagaaaggcgtccggatgaagctgacagtgattgacacaccagggttcggggaccacatcaacaacgagaactgctggcagcccatcatgaagttcatcaatgaccagtacgagaaatacctgcaggaggaggtcaacatcaaccgcaagaagcgcatcccggacacccgcgtccactgctgcctctacttcatccccgccaccggccactccctcaggcccctggacatcgagtttatgaaacgcctgagcaaggtggtcaacatcgtccctgtcatcgccaaggcggacacactcaccctggaggagagggtccacttcaaacagcggatcaccgcagacctgctgtccaacggcatcgacgtgtacccccagaaggaatttgatgaggactcggaggaccggctggtgaacgagaagttccgggagatgatcccatttgctgtggtgggcagtgaccacgagtaccaggtcaacggcaagaggatccttgggaggaagaccaagtggggtaccatcgaagttgaaaacaccacacactgtgagtttgcctacctgcgggaccttctcatcaggacgcacatgcagaacatcaaggacatcaccagcatcccagccttgagatgcttcactttccttctctgtaaccagactttgaaaaattgttcgtttcatcaggctctgttcctcaatggccttttgctacgtgcctcccgagaaatttgtctttttgtataaatgacaaagtgttgaaaatgtatttcctgaaataaatgtttcaaatgcagaaaccca

SEQ ID NO: 309739 - DNA, 2548 bp, Homo sapiens
tgcctctgtcactgcagactaatgggacggaggggggtgacttctcagggttcctcctgggcaggtgctccggaaccttttctcagcacgctggcctggggcacggccgttcctcctgcccagccacgttggggtacagggtgaagaagggctggggccagcccaggacagaggaaggcgaggcaggcacgcaggaactgggctttttaaacccttaagcccaaggaaatcgtagcatcgcgggacagggaaaatgaaagactttggaagtcgtcaggaatttgactctgtgagttggtttccaagagtctaagttaagcatctccaagtggatattaaaaaggagcagcaagcctcggggcggcgggggctggaggaggtggagagaggaggctgccggaagccgcactcgggacctctgcagccaccgaccagaccgggcggccgggactctgggactctcgcaggcagacccggtggtctgccggactcctcggggcccacttcgggccctctctcctgcctcctatttttggatttctctcctttgctccctttttcctcccgttttgaagagacaatgctacttcagtttggagcacaaacatatgatcagcacatggaaatgtggtaattcggatgcattcgtgattgcaacagattgaagaaattagaccagacaaagagtgtttttagaggaggaggaggaggaggaggaggctgagagagggagggcgacgggggtgagaaaggggaggccgcctctgagcgggacgccgggactcccgccgctgctaaatatatccgtaggaatggagagggaccggatctcagccttgaaaagatcttttgaggtcgaggaggtcgagacacccaactccaccccaccccggagggtccagactcccctactccgagccactgtggccagctccacccagaaattccaggacctgggcgtgaagaactcagaaccctcggcccgccatgtggactccctaagccaacgctcccccaaggcgtccctgcggagggtggagctctcgggccccaaggcggccgagccggtgtcccggcgcactgagctgtccattgacatctcgtccaagcaggtggagaacgccggggccatcggcccgtcccggttcgggctcaagagggccgaggtgttgggccacaagacgccagaaccggcccctcggaggacggagatcaccatcgtcaaaccccaggagtcagcccaccggaggatggagccccctgcctccaaggtccccgaggtgcccactgcccctgccaccgacgcagcccccaagagggtggagatccagatgcccaagcctgctgaggcgcccaccgcccccagcccagcccagaccttggagaattcagagcctgcccctgtgtctcagctgcagagcaggctggagcccaagccccagccccctgtggctgaggctacaccccggagccaggaggccactgaggcggctcccagctgcgttggcgacatggccgacacccccagagatgccgggctcaagcaggcgcctgcatcacggaacgagaaggccccggtggacttcggctacgtggggattgactccatcctggagcagatgcgccggaaggccatgaagcagggcttcgagttcaacatcatggtggtcgggcagagcggcttgggtaaatccaccttaatcaacaccctcttcaaatccaaaatcagccggaagtcggtgcagcccacctcagaggagcgcatccccaagaccatcgagatcaagtccatcacgcacgatattgaggagaaaggcgtccggatgaagctgacagtgattgacacaccagggttcggggaccacatcaacaacgagaactgctggcagcccatcatgaagttcatcaatgaccagtacgagaaatacctgcaggaggaggtcaacatcaaccgcaagaagcgcatcccggacacccgcgtccactgctgcctctacttcatccccgccaccggccactccctcaggcccctggacatcgagtttatgaaacgcctgagcaaggtggtcaacatcgtccctgtcatcgccaaggcggacacactcaccctggaggagagggtccacttcaaacagcggatcaccgcagacctgctgtccaacggcatcgacgtgtacccccagaaggaatttgatgaggactcggaggaccggctggtgaacgagaagttccgggagatgatcccatttgctgtggtgggcagtgaccacgagtaccaggtcaacggcaagaggatccttgggaggaagaccaagtggggtaccatcgaagttgaaaacaccacacactgtgagtttgcctacctgcgggaccttctcatcaggacgcacatgcagaacatcaaggacatcaccagcagcatccacttcgaggcgtaccgtgtgaagcgcctcaacgagggcagcagcgccatggccaacggcgtggaggagaaggtcccgcaggtaggcaaactcacagtgtgtagtgttttcaacttcgatggtac

SEQ ID NO: 309740 - DNA, 2430 bp, Homo sapiens
tgcctctgtcactgcagactaatgggacggaggggggtgacttctcagggttcctcctgggcaggtgctccggaaccttttctcagcacgctggcctggggcacggccgttcctcctgcccagccacgttggggtacagggtgaagaagggctggggccagcccaggacagaggaaggcgaggcaggcacgcaggaactgggctttttaaacccttaagcccaaggaaatcgtagcatcgcgggacagggaaaatgaaagactttggaagtcgtcaggaatttgactctgtgagttggtttccaagagtctaagttaagcatctccaagtggatattaaaaaggagcagcaagcctcggggcggcgggggctggaggaggtggagagaggaggctgccggaagccgcactcgggacctctgcagccaccgaccagaccgggcggccgggactctgggactctcgcaggcagacccggtggtctgccggactcctcggggcccacttcgggccctctctcctgcctcctatttttggatttctctcctttgctccctttttcctcccgttttgaagagacaatgctacttcagtttggagcacaaacatatgatcagcacatggaaatgtggtaattcggatgcattcgtgattgcaacagattgaagaaattagaccagacaaagagtgtttttagaggaggaggaggaggaggaggaggctgagagagggagggcgacgggggtgagaaaggggaggccgcctctgagcgggacgccgggactcccgccgctgctaaatatatccgtaggaatggagagggaccggatctcagccttgaaaagatcttttgaggtcgaggaggtcgagacacccaactccaccccaccccggagggtccagactcccctactccgagccactgtggccagctccacccagaaattccaggacctgggcgtgaagaactcagaaccctcggcccgccatgtggactccctaagccaacgctcccccaaggcgtccctgcggagggtggagctctcgggccccaaggcggccgagccggtgtcccggcgcactgagctgtccattgacatctcgtccaagcaggtggagaacgccggggccatcggcccgtcccggttcgggctcaagagggccgaggtgttgggccacaagacgccagaaccggcccctcggaggacggagatcaccatcgtcaaaccccaggagtcagcccaccggaggatggagccccctgcctccaaggtccccgaggtgcccactgcccctgccaccgacgcagcccccaagagggtggagatccagatgcccaagcctgctgaggcgcccaccgcccccagcccagcccagaccttggagaattcagagcctgcccctgtgtctcagctgcagagcaggctggagcccaagccccagccccctgtggctgaggctacaccccggagccaggaggccactgaggcggctcccagctgcgttggcgacatggccgacacccccagagatgccgggctcaagcaggcgcctgcatcacggaacgagaaggccccggtggacttcggctacgtggggattgactccatcctggagcagatgcgccggaaggccatgaagcagggcttcgagttcaacatcatggtggtcgggcagagcggcttgggtaaatccaccttaatcaacaccctcttcaaatccaaaatcagccggaagtcggtgcagcccacctcagaggagcgcatccccaagaccatcgagatcaagtccatcacgcacgatattgaggagaaaggcgtccggatgaagctgacagtgattgacacaccagggttcggggaccacatcaacaacgagaactgctggcagcccatcatgaagttcatcaatgaccagtacgagaaatacctgcaggaggaggtcaacatcaaccgcaagaagcgcatcccggacacccgcgtccactgctgcctctacttcatccccgccaccggccactccctcaggcccctggacatcgagtttatgaaacgcctgagcaaggtggtcaacatcgtccctgtcatcgccaaggcggacacactcaccctggaggagagggtccacttcaaacagcggatcaccgcagacctgctgtccaacggcatcgacgtgtacccccagaaggaatttgatgaggactcggaggaccggctggtgaacgagaagttccgggagatgatcccatttgctgtggtgggcagtgaccacgagtaccaggtcaacggcaagaggatccttgggaggaagaccaagtggggtaccatcgaagttgaaaacaccacacactgtgagtttgcctacctgcgggaccttctcatcaggacgcgccatcgtgcgcttcgggatcctctagatcagcctgcgacac

SEQ ID NO: 309741 - DNA, 497 bp, Homo sapiens
  misc_feature (38)..(38): n is a, c, g, or t
gaagaaagaaagaaagaaagaacgaaagaacgaaagancgaaagaaagaaagaaagaaagaaagagtgtatgagtgtgagtgtgtgtgcatggaagttggggcactgggcgtctgactccctccccacccaagagaggaaggacccctcaccacccccactggcgagacagtttactttgccgacttgccatgtttttgccaaaaccaagattttgaaggaaatgagtggccagcgccagggcccaggccatgtggcctgcccagcctcaatgtcacttggcggcggggtggggtgggggtgggcagcagcatcccagccttgagatgcttcactttccttctctgtaaccagactttgaaaaattgttcgtttcatcaggctctgttcctcaatggccttttgctacgtgcctcccgagaaatttgtctttttgtataaatgacaaagtgttgaaaatgtatttcctgaaataaatgtttcaaatgcagaaaccca

SEQ ID NO: 309742 - DNA, 2376 bp, Homo sapiens
tgcctctgtcactgcagactaatgggacggaggggggtgacttctcagggttcctcctgggcaggtgctccggaaccttttctcagcacgctggcctggggcacggccgttcctcctgcccagccacgttggggtacagggtgaagaagggctggggccagcccaggacagaggaaggcgaggcaggcacgcaggaactgggctttttaaacccttaagcccaaggaaatcgtagcatcgcgggacagggaaaatgaaagactttggaagtcgtcaggaatttgactctgtgagttggtttccaagagtctaagttaagcatctccaagtggatattaaaaaggagcagcaagcctcggggcggcgggggctggaggaggtggagagaggaggctgccggaagccgcactcgggacctctgcagccaccgaccagaccgggcggccgggactctgggactctcgcaggcagacccggtggtctgccggactcctcggggcccacttcgggccctctctcctgcctcctatttttggatttctctcctttgctccctttttcctcccgttttgaagagacaatgctacttcagtttggagcacaaacatatgatcagcacatggaaatgtggtaattcggatgcattcgtgattgcaacagattgaagaaattagaccagacaaagagtgtttttagaggaggaggaggaggaggaggaggctgagagagggagggcgacgggggtgagaaaggggaggccgcctctgagcgggacgccgggactcccgccgctgctaaatatatccgtaggaatggagagggaccggatctcagccttgaaaagatcttttgaggtcgaggaggtcgagacacccaactccaccccaccccggagggtccagactcccctactccgagccactgtggccagctccacccagaaattccaggacctgggcgtgaagaactcagaaccctcggcccgccatgtggactccctaagccaacgctcccccaaggcgtccctgcggagggtggagctctcgggccccaaggcggccgagccggtgtcccggcgcactgagctgtccattgacatctcgtccaagcaggtggagaacgccggggccatcggcccgtcccggttcgggctcaagagggccgaggtgttgggccacaagacgccagaaccggcccctcggaggacggagatcaccatcgtcaaaccccaggagtcagcccaccggaggatggagccccctgcctccaaggtccccgaggtgcccactgcccctgccaccgacgcagcccccaagagggtggagatccagatgcccaagcctgctgaggcgcccaccgcccccagcccagcccagaccttggagaattcagagcctgcccctgtgtctcagctgcagagcaggctggagcccaagccccagccccctgtggctgaggctacaccccggagccaggaggccactgaggcggctcccagctgcgttggcgacatggccgacacccccagagatgccgggctcaagcaggcgcctgcatcacggaacgagaaggccccggtggacttcggctacgtggggattgactccatcctggagcagatgcgccggaaggccatgaagcagggcttcgagttcaacatcatggtggtcgggcagagcggcttgggtaaatccaccttaatcaacaccctcttcaaatccaaaatcagccggaagtcggtgcagcccacctcagaggagcgcatccccaagaccatcgagatcaagtccatcacgcacgatattgaggagaaaggcgtccggatgaagctgacagtgattgacacaccagggttcggggaccacatcaacaacgagaactgctggcagcccatcatgaagttcatcaatgaccagtacgagaaatacctgcaggaggaggtcaacatcaaccgcaagaagcgcatcccggacacccgcgtccactgctgcctctacttcatccccgccaccggccactccctcaggcccctggacatcgagtttatgaaacgcctgagcaaggtggtcaacatcgtccctgtcatcgccaaggcggacacactcaccctggaggagagggtccacttcaaacagcggatcaccgcagacctgctgtccaacggcatcgacgtgtacccccagaaggaatttgatgaggactcggaggaccggctggtgaacgagaagttccgggagatgatcccatttgctgtggtgggcagtgaccacgagtaccaggtcaacggcaagaggatccttgggaggaagaccaagtggggtaccatcgaagttgagacacgcacacactgtgagattcactcccgccggcctatct

SEQ ID NO: 309743 - DNA, 2366 bp, Homo sapiens
tgcctctgtcactgcagactaatgggacggaggggggtgacttctcagggttcctcctgggcaggtgctccggaaccttttctcagcacgctggcctggggcacggccgttcctcctgcccagccacgttggggtacagggtgaagaagggctggggccagcccaggacagaggaaggcgaggcaggcacgcaggaactgggctttttaaacccttaagcccaaggaaatcgtagcatcgcgggacagggaaaatgaaagactttggaagtcgtcaggaatttgactctgtgagttggtttccaagagtctaagttaagcatctccaagtggatattaaaaaggagcagcaagcctcggggcggcgggggctggaggaggtggagagaggaggctgccggaagccgcactcgggacctctgcagccaccgaccagaccgggcggccgggactctgggactctcgcaggcagacccggtggtctgccggactcctcggggcccacttcgggccctctctcctgcctcctatttttggatttctctcctttgctccctttttcctcccgttttgaagagacaatgctacttcagtttggagcacaaacatatgatcagcacatggaaatgtggtaattcggatgcattcgtgattgcaacagattgaagaaattagaccagacaaagagtgtttttagaggaggaggaggaggaggaggaggctgagagagggagggcgacgggggtgagaaaggggaggccgcctctgagcgggacgccgggactcccgccgctgctaaatatatccgtaggaatggagagggaccggatctcagccttgaaaagatcttttgaggtcgaggaggtcgagacacccaactccaccccaccccggagggtccagactcccctactccgagccactgtggccagctccacccagaaattccaggacctgggcgtgaagaactcagaaccctcggcccgccatgtggactccctaagccaacgctcccccaaggcgtccctgcggagggtggagctctcgggccccaaggcggccgagccggtgtcccggcgcactgagctgtccattgacatctcgtccaagcaggtggagaacgccggggccatcggcccgtcccggttcgggctcaagagggccgaggtgttgggccacaagacgccagaaccggcccctcggaggacggagatcaccatcgtcaaaccccaggagtcagcccaccggaggatggagccccctgcctccaaggtccccgaggtgcccactgcccctgccaccgacgcagcccccaagagggtggagatccagatgcccaagcctgctgaggcgcccaccgcccccagcccagcccagaccttggagaattcagagcctgcccctgtgtctcagctgcagagcaggctggagcccaagccccagccccctgtggctgaggctacaccccggagccaggaggccactgaggcggctcccagctgcgttggcgacatggccgacacccccagagatgccgggctcaagcaggcgcctgcatcacggaacgagaaggccccggtggacttcggctacgtggggattgactccatcctggagcagatgcgccggaaggccatgaagcagggcttcgagttcaacatcatggtggtcgggcagagcggcttgggtaaatccaccttaatcaacaccctcttcaaatccaaaatcagccggaagtcggtgcagcccacctcagaggagcgcatccccaagaccatcgagatcaagtccatcacgcacgatattgaggagaaaggcgtccggatgaagctgacagtgattgacacaccagggttcggggaccacatcaacaacgagaactgctggcagcccatcatgaagttcatcaatgaccagtacgagaaatacctgcaggaggaggtcaacatcaaccgcaagaagcgcatcccggacacccgcgtccactgctgcctctacttcatccccgccaccggccactccctcaggcccctggacatcgagtttatgaaacgcctgagcaaggtggtcaacatcgtccctgtcatcgccaaggcggacacactcaccctggaggagagggtccacttcaaacagcggatcaccgcagacctgctgtccaacggcatcgacgtgtacccccagaaggaatttgatgaggactcggaggaccggctggtgaacgagaagttccgggagatgatcccatttgctgtggtgggcagtgaccacgagtaccaggtcaacggcaagaggatccttgggaggaagaccaagtggggtaccatcgaaggtactcgccgcaggcgccggggctccagacagatg

SEQ ID NO: 309744 - DNA, 2302 bp, Homo sapiens
tgcctctgtcactgcagactaatgggacggaggggggtgacttctcagggttcctcctgggcaggtgctccggaaccttttctcagcacgctggcctggggcacggccgttcctcctgcccagccacgttggggtacagggtgaagaagggctggggccagcccaggacagaggaaggcgaggcaggcacgcaggaactgggctttttaaacccttaagcccaaggaaatcgtagcatcgcgggacagggaaaatgaaagactttggaagtcgtcaggaatttgactctgtgagttggtttccaagagtctaagttaagcatctccaagtggatattaaaaaggagcagcaagcctcggggcggcgggggctggaggaggtggagagaggaggctgccggaagccgcactcgggacctctgcagccaccgaccagaccgggcggccgggactctgggactctcgcaggcagacccggtggtctgccggactcctcggggcccacttcgggccctctctcctgcctcctatttttggatttctctcctttgctccctttttcctcccgttttgaagagacaatgctacttcagtttggagcacaaacatatgatcagcacatggaaatgtggtaattcggatgcattcgtgattgcaacagattgaagaaattagaccagacaaagagtgtttttagaggaggaggaggaggaggaggaggctgagagagggagggcgacgggggtgagaaaggggaggccgcctctgagcgggacgccgggactcccgccgctgctaaatatatccgtaggaatggagagggaccggatctcagccttgaaaagatcttttgaggtcgaggaggtcgagacacccaactccaccccaccccggagggtccagactcccctactccgagccactgtggccagctccacccagaaattccaggacctgggcgtgaagaactcagaaccctcggcccgccatgtggactccctaagccaacgctcccccaaggcgtccctgcggagggtggagctctcgggccccaaggcggccgagccggtgtcccggcgcactgagctgtccattgacatctcgtccaagcaggtggagaacgccggggccatcggcccgtcccggttcgggctcaagagggccgaggtgttgggccacaagacgccagaaccggcccctcggaggacggagatcaccatcgtcaaaccccaggagtcagcccaccggaggatggagccccctgcctccaaggtccccgaggtgcccactgcccctgccaccgacgcagcccccaagagggtggagatccagatgcccaagcctgctgaggcgcccaccgcccccagcccagcccagaccttggagaattcagagcctgcccctgtgtctcagctgcagagcaggctggagcccaagccccagccccctgtggctgaggctacaccccggagccaggaggccactgaggcggctcccagctgcgttggcgacatggccgacacccccagagatgccgggctcaagcaggcgcctgcatcacggaacgagaaggccccggtggacttcggctacgtggggattgactccatcctggagcagatgcgccggaaggccatgaagcagggcttcgagttcaacatcatggtggtcgggcagagcggcttgggtaaatccaccttaatcaacaccctcttcaaatccaaaatcagccggaagtcggtgcagcccacctcagaggagcgcatccccaagaccatcgagatcaagtccatcacgcacgatattgaggagaaaggcgtccggatgaagctgacagtgattgacacaccagggttcggggaccacatcaacaacgagaactgctggcagcccatcatgaagttcatcaatgaccagtacgagaaatacctgcaggaggaggtcaacatcaaccgcaagaagcgcatcccgcgatggcgcgtcctccttcagcaccacgccccccttcagccagcggtgccctgtgacctctgtggcgctgtcattcaaggagcaggtgaggagtatcttggagccaaggtcttctacggtagtgaagactgtgccaggttccaggactagcacgactgcctgggcgcggacccacttgaccctgggcgcccgggtcaggtggttgcgatccgggtcgttgctggcccggcactcgtaagtgcccgtgtcctcctccacgagcgtgtcgatggaaatggtgctgccgcgtgctggtggtaggtggcgtggatgtgacgcgccttcgtgcgctt

SEQ ID NO: 309745 - DNA, 2069 bp, Homo sapiens
tgcctctgtcactgcagactaatgggacggaggggggtgacttctcagggttcctcctgggcaggtgctccggaaccttttctcagcacgctggcctggggcacggccgttcctcctgcccagccacgttggggtacagggtgaagaagggctggggccagcccaggacagaggaaggcgaggcaggcacgcaggaactgggctttttaaacccttaagcccaaggaaatcgtagcatcgcgggacagggaaaatgaaagactttggaagtcgtcaggaatttgactctgtgagttggtttccaagagtctaagttaagcatctccaagtggatattaaaaaggagcagcaagcctcggggcggcgggggctggaggaggtggagagaggaggctgccggaagccgcactcgggacctctgcagccaccgaccagaccgggcggccgggactctgggactctcgcaggcagacccggtggtctgccggactcctcggggcccacttcgggccctctctcctgcctcctatttttggatttctctcctttgctccctttttcctcccgttttgaagagacaatgctacttcagtttggagcacaaacatatgatcagcacatggaaatgtggtaattcggatgcattcgtgattgcaacagattgaagaaattagaccagacaaagagtgtttttagaggaggaggaggaggaggaggaggctgagagagggagggcgacgggggtgagaaaggggaggccgcctctgagcgggacgccgggactcccgccgctgctaaatatatccgtaggaatggagagggaccggatctcagccttgaaaagatcttttgaggtcgaggaggtcgagacacccaactccaccccaccccggagggtccagactcccctactccgagccactgtggccagctccacccagaaattccaggacctgggcgtgaagaactcagaaccctcggcccgccatgtggactccctaagccaacgctcccccaaggcgtccctgcggagggtggagctctcgggccccaaggcggccgagccggtgtcccggcgcactgagctgtccattgacatctcgtccaagcaggtggagaacgccggggccatcggcccgtcccggttcgggctcaagagggccgaggtgttgggccacaagacgccagaaccggcccctcggaggacggagatcaccatcgtcaaaccccaggagtcagcccaccggaggatggagccccctgcctccaaggtccccgaggtgcccactgcccctgccaccgacgcagcccccaagagggtggagatccagatgcccaagcctgctgaggcgcccaccgcccccagcccagcccagaccttggagaattcagagcctgcccctgtgtctcagctgcagagcaggctggagcccaagccccagccccctgtggctgaggctacaccccggagccaggaggccactgaggcggctcccagctgcgttggcgacatggccgacacccccagagatgccgggctcaagcaggcgcctgcatcacggaacgagaaggccccggtggacttcggctacgtggggattgactccatcctggagcagatgcgccggaaggccatgaagcagggcttcgagttcaacatcatggtggtcgggcagagcggcttgggtaaatccaccttaatcaacaccctcttcaaatccaaaatcagccggaagtcggtgcagcccacctcagaggagcgcatccccaagaccatcgagatcaagtccatcacgcacgatattgaggagaaaggcgtccggatgaagctgacagtgattgacacaccagggttcggggaccacatcaacaacgagaactgcatcccagccttgagatgcttcactttccttctctgtaaccagactttgaaaaattgttcgtttcatcaggctctgttcctcaatggccttttgctacgtgcctcccgagaaatttgtctttttgtataaatgacaaagtgttgaaaatgtatttcctgaaataaatgtttcaaatgcagaaaccca

SEQ ID NO: 309746 - DNA, 1929 bp, Homo sapiens
tgcctctgtcactgcagactaatgggacggaggggggtgacttctcagggttcctcctgggcaggtgctccggaaccttttctcagcacgctggcctggggcacggccgttcctcctgcccagccacgttggggtacagggtgaagaagggctggggccagcccaggacagaggaaggcgaggcaggcacgcaggaactgggctttttaaacccttaagcccaaggaaatcgtagcatcgcgggacagggaaaatgaaagactttggaagtcgtcaggaatttgactctgtgagttggtttccaagagtctaagttaagcatctccaagtggatattaaaaaggagcagcaagcctcggggcggcgggggctggaggaggtggagagaggaggctgccggaagccgcactcgggacctctgcagccaccgaccagaccgggcggccgggactctgggactctcgcaggcagacccggtggtctgccggactcctcggggcccacttcgggccctctctcctgcctcctatttttggatttctctcctttgctccctttttcctcccgttttgaagagacaatgctacttcagtttggagcacaaacatatgatcagcacatggaaatgtggtaattcggatgcattcgtgattgcaacagattgaagaaattagaccagacaaagagtgtttttagaggaggaggaggaggaggaggaggctgagagagggagggcgacgggggtgagaaaggggaggccgcctctgagcgggacgccgggactcccgccgctgctaaatatatccgtaggaatggagagggaccggatctcagccttgaaaagatcttttgaggtcgaggaggtcgagacacccaactccaccccaccccggagggtccagactcccctactccgagccactgtggccagctccacccagaaattccaggacctgggcgtgaagaactcagaaccctcggcccgccatgtggactccctaagccaacgctcccccaaggcgtccctgcggagggtggagctctcgggccccaaggcggccgagccggtgtcccggcgcactgagctgtccattgacatctcgtccaagcaggtggagaacgccggggccatcggcccgtcccggttcgggctcaagagggccgaggtgttgggccacaagacgccagaaccggcccctcggaggacggagatcaccatcgtcaaaccccaggagtcagcccaccggaggatggagccccctgcctccaaggtccccgaggtgcccactgcccctgccaccgacgcagcccccaagagggtggagatccagatgcccaagcctgctgaggcgcccaccgcccccagcccagcccagaccttggagaattcagagcctgcccctgtgtctcagctgcagagcaggctggagcccaagccccagccccctgtggctgaggctacaccccggagccaggaggccactgaggcggctcccagctgcgttggcgacatggccgacacccccagagatgccgggctcaagcaggcgcctgcatcacggaacgagaaggccccggtggacttcggctacgtggggattgactccatcctggagcagatgcgccggaaggccatgaagcagggcttcgagttcaacatcatggtggtcgggcagagcggcttgggtaaatccaccttaatcaacaccctcttcaaatccaaaatcagccggaagtcggtgcagcccacctcagaggagcgcatccccaagaccatcgagatcaagtccatcacgcacgatattgaggagaaaggcgtccggatgaagctgacagtgattgacacaccagggttcggggaccacatcaacaacgagaactggacgcgccatcgtgcgcttcgggatcctctagatcagcctgcgacac

SEQ ID NO: 309747 - DNA, 2150 bp, Homo sapiens
tgcctctgtcactgcagactaatgggacggaggggggtgacttctcagggttcctcctgggcaggtgctccggaaccttttctcagcacgctggcctggggcacggccgttcctcctgcccagccacgttggggtacagggtgaagaagggctggggccagcccaggacagaggaaggcgaggcaggcacgcaggaactgggctttttaaacccttaagcccaaggaaatcgtagcatcgcgggacagggaaaatgaaagactttggaagtcgtcaggaatttgactctgtgagttggtttccaagagtctaagttaagcatctccaagtggatattaaaaaggagcagcaagcctcggggcggcgggggctggaggaggtggagagaggaggctgccggaagccgcactcgggacctctgcagccaccgaccagaccgggcggccgggactctgggactctcgcaggcagacccggtggtctgccggactcctcggggcccacttcgggccctctctcctgcctcctatttttggatttctctcctttgctccctttttcctcccgttttgaagagacaatgctacttcagtttggagcacaaacatatgatcagcacatggaaatgtggtaattcggatgcattcgtgattgcaacagattgaagaaattagaccagacaaagagtgtttttagaggaggaggaggaggaggaggaggctgagagagggagggcgacgggggtgagaaaggggaggccgcctctgagcgggacgccgggactcccgccgctgctaaatatatccgtaggaatggagagggaccggatctcagccttgaaaagatcttttgaggtcgaggaggtcgagacacccaactccaccccaccccggagggtccagactcccctactccgagccactgtggccagctccacccagaaattccaggacctgggcgtgaagaactcagaaccctcggcccgccatgtggactccctaagccaacgctcccccaaggcgtccctgcggagggtggagctctcgggccccaaggcggccgagccggtgtcccggcgcactgagctgtccattgacatctcgtccaagcaggtggagaacgccggggccatcggcccgtcccggttcgggctcaagagggccgaggtgttgggccacaagacgccagaaccggcccctcggaggacggagatcaccatcgtcaaaccccaggagtcagcccaccggaggatggagccccctgcctccaaggtccccgaggtgcccactgcccctgccaccgacgcagcccccaagagggtggagatccagatgcccaagcctgctgaggcgcccaccgcccccagcccagcccagaccttggagaattcagagcctgcccctgtgtctcagctgcagagcaggctggagcccaagccccagccccctgtggctgaggctacaccccggagccaggaggccactgaggcggctcccagctgcgttggcgacatggccgacacccccagagatgccgggctcaagcaggcgcctgcatcacggaacgagaaggccccggtggacttcggctacgtggggattgactccatcctggagcagatgcgccggaaggccatgaagcagggcttcgagttcaacatcatggtggtcgggcagagcggcttgggtaaatccaccttaatcaacaccctcttcaaatccaaaatcagccggaagtcggtgcagcccacctcagaggagcgcatccccaagaccatcgagatcaagtccatcacgcacgatattgaggagaaaggcgtccggatgaagctgacagtgattgacacaccagggttcggggaccacatcaacaacgagaactggtgcccccagtaacccctgaggagcagaagtcagcatcccaactcccctcatacccgatgccagggatggcccccaccttgttgtagtatctcagatgcactgtatgccattgcccgtcactcaagccccctggaactgtggggctgaccacggtgttggattcacctggaggggagatgcatgtggaatcatcaggagcagcggagtcgccccatcccacccgtcatataagcacaaccattcccagggccaccctgatgcacaccg

SEQ ID NO: 309748 - DNA, 1978 bp, Homo sapiens
tgcctctgtcactgcagactaatgggacggaggggggtgacttctcagggttcctcctgggcaggtgctccggaaccttttctcagcacgctggcctggggcacggccgttcctcctgcccagccacgttggggtacagggtgaagaagggctggggccagcccaggacagaggaaggcgaggcaggcacgcaggaactgggctttttaaacccttaagcccaaggaaatcgtagcatcgcgggacagggaaaatgaaagactttggaagtcgtcaggaatttgactctgtgagttggtttccaagagtctaagttaagcatctccaagtggatattaaaaaggagcagcaagcctcggggcggcgggggctggaggaggtggagagaggaggctgccggaagccgcactcgggacctctgcagccaccgaccagaccgggcggccgggactctgggactctcgcaggcagacccggtggtctgccggactcctcggggcccacttcgggccctctctcctgcctcctatttttggatttctctcctttgctccctttttcctcccgttttgaagagacaatgctacttcagtttggagcacaaacatatgatcagcacatggaaatgtggtaattcggatgcattcgtgattgcaacagattgaagaaattagaccagacaaagagtgtttttagaggaggaggaggaggaggaggaggctgagagagggagggcgacgggggtgagaaaggggaggccgcctctgagcgggacgccgggactcccgccgctgctaaatatatccgtaggaatggagagggaccggatctcagccttgaaaagatcttttgaggtcgaggaggtcgagacacccaactccaccccaccccggagggtccagactcccctactccgagccactgtggccagctccacccagaaattccaggacctgggcgtgaagaactcagaaccctcggcccgccatgtggactccctaagccaacgctcccccaaggcgtccctgcggagggtggagctctcgggccccaaggcggccgagccggtgtcccggcgcactgagctgtccattgacatctcgtccaagcaggtggagaacgccggggccatcggcccgtcccggttcgggctcaagagggccgaggtgttgggccacaagacgccagaaccggcccctcggaggacggagatcaccatcgtcaaaccccaggagtcagcccaccggaggatggagccccctgcctccaaggtccccgaggtgcccactgcccctgccaccgacgcagcccccaagagggtggagatccagatgcccaagcctgctgaggcgcccaccgcccccagcccagcccagaccttggagaattcagagcctgcccctgtgtctcagctgcagagcaggctggagcccaagccccagccccctgtggctgaggctacaccccggagccaggaggccactgaggcggctcccagctgcgttggcgacatggccgacacccccagagatgccgggctcaagcaggcgcctgcatcacggaacgagaaggccccggtggacttcggctacgtggggattgactccatcctggagcagatgcgccggaaggccatgaagcagggcttcgagttcaacatcatggtggtcgggcagagcggcttgggtaaatccaccttaatcaacaccctcttcaaatccaaaatcagccggaagtcggtgcagcccacctcagaggagcgcatccccaagaccatcgagatcaagtccatcacgcacgatattgaggagaaaggcgtccggatgaagctgacagtgattgacacaccagggttcggggaccacatcaacaacgagaactgctggcagcccatcctctccccagggcagagcggcttgggtaaatccaccttaatcaacaccctcttcaaatccaaaatcagccggaagtatgtagt

SEQ ID NO: 309749 - DNA, 524 bp, Homo sapiens
tacgagctcgaggttgaaaccttcgcagggcaagtggcatcgacgtgtacccccagaaggaatttgatgaggactcggaggaccggctggtgaacgagaagttccgggagatgatcccatttgctgtggtgggcagtgaccacgagtaccaggtcaacggcaagaggatccttgggaggaagaccaagtggggtaccatcgaagttgaaaacaccacacactgtgagtttgcctacctgcgggaccttctcatcaggacgcacatgcagaacatcaaggacatcaccagcagcatccacttcgaggcgtaccgtgtgaagcgcctcaacgagggcagcatcccagccttgagatgcttcactttccttctctgtaaccagactttgaaaaattgttcgtttcatcaggctctgttcctcaatggccttttgctacgtgcctcccgagaaatttgtctttttgtataaatgacaaagtgttgaaaatgtatttcctgaaataaatgtttcaaatgcagaaaccca

SEQ ID NO: 309750 - DNA, 388 bp, Homo sapiens
accccaccccggcctggggtttcagagaaggggtccaggcaggagtgtcatcttttctcaatggggatgtggcttcagtctctgtccaggtgggtgcattgctctctttccggctcctcccaggctgcttaaatgacctgtgacgaggcctgcgccatggccggggccctctgcttttcccagcgctgcacctgggaaccaggggttgggccccggaagccgaggatgtccctgaatgccatgcctgggcacctgtcctggccaggcgaggcgtgttggggcagcggctgagatgggagcagcagcattgcctgccaggtttgagatgggccccgggtgagtgtggttaccaggaagggctgggcagagcaggcgggtgggccgcccc

SEQ ID NO: 309751 - DNA, 372 bp, Homo sapiens
gaggcagagtctcactctgttgcccaggctggagtgcagtggcgcaatctcggctcactgcaacctccgcctcccagattcaagtgattctcctgcctcagcctcccgagtagctgggattataggcacccaccaccacacccagctaatttttgtatttttagtagagacaggatttcaccatgttggccaggctggtcttgaactcctggtctcaagtgatctgccctcctcagcctcccaaagtgctgggattacaggcgtgagccaccgcgcctggccaactctctcacattttaaaacactactttctgctacaaaagtggcgtgtacaatgggaaatgtcacaaataaataccccaggaagacact

SEQ ID NO: 309752 - DNA, 262 bp, Homo sapiens
actggctgggccgtccctgtccctcctcccagatgacagaggtgcctggtgtttggcaaactcacttagaaggagcaagaagcaactgggatggctcagaagcccatggtggaatagtctgttgtaaacgaagagacaagaggaggccgagggctggtttccccttctccttcccgctcccagccctcccctctttcccatcgagtctctggtctctgccttcaggcccatggatgggcaaagcatctttcgagagcttgcc

SEQ ID NO: 309753 - DNA, 2345 bp, Homo sapiens
cgcgtaaataagacgccgaccggcgcggcgctaccgcggggcttgacgggattgtggcggtcctctctcccaattcggaagctacagctacctccggacgctctcaagatggcgacctctctgggttccaacacctacaacaggcagaactgggaggatgcggacttccccattctgtgccagacatgtcttggagaaaacccatatatccgaatgaccaaagaaaagtatgggaaggaatgcaaaatctgtgccaggccattcacagtgtttcgctggtgccctggagtccgcatgcgtttcaagaagactgaagtgtgccaaacctgcagtaaattgaagaatgtctgtcagacctgcctcttagacctagagtatggcctgcccatccaggttcgtgacgcaggattgtcttttaaagatgacatgccaaagtcagatgtcaacaaagagtactatacacagaatatggagagagagatttctaactctgatggaacacggccagttggcatgctggggaaagccacatctaccagtgacatgctgctcaaactggcccggaccacaccctactacaaaaggaatcgaccccacatttgctccttctgggtgaaaggagagtgtaagagaggagaggaatgtccatacagacatgagaagcctacagatccagatgacccccttgctgatcagaatattaaagaccgttattacggaatcaatgatcctgtagctgacaagcttctaaagcgggcttcaacaatgcctcggctggacccaccagaggataaaactatcaccacactatatgttggtggtctaggtgataccattactgagacagatttaagaaatcatttctaccagttcggagagatccggacgatcactgttgtgcagagacagcagtgtgctttcatccagtttgccacacggcaggctgcagaagtggctgctgagaagtcctttaataagttgattgtaaatggccgcagactgaatgtgaaatggggaagatcccaggcagccagaggaaaagaaaaagagaaagatggaactacagactctgggatcaaactagaacctgttccaggattgccaggagctcttcctcctcctcctgcagcagaagaagaagcctctgccaactacttcaacttgcccccaagtggtcctccagctgtggtgaacattgctctgccaccgccccctggcattgctccacccccacccccaggttttgggccacacatgttccacccaatgggaccaccccctcctttcatgcgggctccaggaccaatccactatccttctcaggaccctcagaggatgggagctcatgctggaaaacacagcagcccctagcaccttgtcaccactctggggctctgtggaagaaagggcacttaaaactcccagtaaatcttggaataaatatatttttccttcccttgtagtttccatggtagctgaatgtgctcagatgtgagcagtcagagactgacagccatgctttcctatacttgttcaaaggatcgatggaccgtaaataagctgccattaacacatctggttactgctgtaacatgactaataaaaccgaacgcctgttccccttacccgtgtgggggacacgcagatgagtgaattggaatgtccagcagagttaccctcccaattatatgttcattttgtatattttttggtcgggggaaaaattgacctgcagtaaaaaaacctttgaccatttttatgtccattggatactttcctttttatcatcttaaaaaaagataactagtactaatcattgtagtggcctaagtgtgatttaactcttgaagtcacaccctccgaaagatgagtagaaaccagcaccagcacagcccagatcttctctttcctctccttttcctcatttattcctaaaggaatctgaccattttacgtctctacggcccaaaaaaagacaaaaataaaaattcctttttattcctgtcaactggatggaaacacaaatttcatggagctgtgtaccatcgaagaaacctggtgtctggcatgaaattactgtaaagaacttcctgtaaaacacgttctttaacaaactgaaatgaaaagcattggagcgtctgaatgaaagacgtgacctcctgctgggactctgatggtcttcagcattcaccttcgtgtgtcttcagtgtctcattgtcatccctgcttctgtttggtcttagagtgtttggatataactgaattgtagatggtaaaggaaatttgatgtgttttttgtttttaaataattaaaacgggtcaatttttcaaaaaaaaagtcatgg

SEQ ID NO: 309754 - DNA, 2520 bp, Homo sapiens
cccaaaaaacatttacccagaatacaaaaaaaggacagtatagtggtcagattcccagtgacaataaacaaatcctcctctcttcaatgtttactgtaaagccagttaactgccatttatttgaaagaagaaaagaaaaacaagcccccagattggtaaacacattggcaagttgctagactccaagctggctacccttgtcaaatctgttcgagttttttcaaaatacttgggctttttaacgcacccagcctgctgggcacagttaagtaaaaggcatttactataatctaagaattccctgctattatcatttttaaatgttttcacatttttaaaactgccttacccttttggatgtatttggattccataaaggtgagtacaatcaacgagaaactgaagtgggagattctacgactgcccagagggacacgcatgcatggggctggttgtgggtgctgtgtgcagtccagaggaatcatgggagaaaggaagtcaagtccttaaacaccctacagaaacaaacactgcaatccagtatggcttattcggatgcatttaccatgaagctaccagaagaaattcaacctacgaggctactcttaaatgtaacaggatcggctatgttgacgatgtacccctcccaggaattatttctaactctgatggaacacggccagttggcatgctggggaaagccacatctaccagtgacatgctgctcaaactggcccggaccacaccctactacaaaaggaatcgaccccacatttgctccttctgggtgaaaggagagtgtaagagaggagaggaatgtccatacagacatgagaagcctacagatccagatgacccccttgctgatcagaatattaaagaccgttattacggaatcaatgatcctgtagctgacaagcttctaaagcgggcttcaacaatgcctcggctggacccaccagaggataaaactatcaccacactatatgttggtggtctaggtgataccattactgagacagatttaagaaatcatttctaccagttcggagagatccggacgatcactgttgtgcagagacagcagtgtgctttcatccagtttgccacacggcaggctgcagaagtggctgctgagaagtcctttaataagttgattgtaaatggccgcagactgaatgtgaaatggggaagatcccaggcagccagaggaaaagaaaaagagaaagatggaactacagactctgggatcaaactagaacctgttccaggattgccaggagctcttcctcctcctcctgcagcagaagaagaagcctctgccaactacttcaacttgcccccaagtggtcctccagctgtggtgaacattgctctgccaccgccccctggcattgctccacccccacccccaggttttgggccacacatgttccacccaatgggaccaccccctcctttcatgcgggctccaggaccaatccactatccttctcaggaccctcagaggatgggagctcatgctggaaaacacagcagcccctagcaccttgtcaccactctggggctctgtggaagaaagggcacttaaaactcccagtaaatcttggaataaatatatttttccttcccttgtagtttccatggtagctgaatgtgctcagatgtgagcagtcagagactgacagccatgctttcctatacttgttcaaaggatcgatggaccgtaaataagctgccattaacacatctggttactgctgtaacatgactaataaaaccgaacgcctgttccccttacccgtgtgggggacacgcagatgagtgaattggaatgtccagcagagttaccctcccaattatatgttcattttgtatattttttggtcgggggaaaaattgacctgcagtaaaaaaacctttgaccatttttatgtccattggatactttcctttttatcatcttaaaaaaagataactagtactaatcattgtagtggcctaagtgtgatttaactcttgaagtcacaccctccgaaagatgagtagaaaccagcaccagcacagcccagatcttctctttcctctccttttcctcatttattcctaaaggaatctgaccattttacgtctctacggcccaaaaaaagacaaaaataaaaattcctttttattcctgtcaactggatggaaacacaaatttcatggagctgtgtaccatcgaagaaacctggtgtctggcatgaaattactgtaaagaacttcctgtaaaacacgttctttaacaaactgaaatgaaaagcattggagcgtctgaatgaaagacgtgacctcctgctgggactctgatggtcttcagcattcaccttcgtgtgtcttcagtgtctcattgtcatccctgcttctgtttggtcttagagtgtttggatataactgaattgtagatggtaaaggaaatttgatgtgttttttgtttttaaataattaaaacgggtcaatttttcaaaaaaaaagtcatgg

SEQ ID NO: 309755 - DNA, 2430 bp, Homo sapiens
cgcgtaaataagacgccgaccggcgcggcgctaccgcggggcttgacgggattgtggcggtcctctctcccaattcggaagctacagctacctccggacgctctcaagatggcgacctctctgggttccaacacctacaacaggcagaactgggaggatgcggacttccccattctgtgccagacatgtcttggagaaaacccatatatccgaatgaccaaagaaaagtatgggaaggaatgcaaaatctgtgccaggccattcacagtgtttcgctggtgccctggagtccgcatgcgtttcaagaagactgaagtgtgccaaacctgcagtaaattgaagaatgtctgtcagacctgcctcttagacctagagtatggcctgcccatccaggttcgtgacgcaggattgtcttttaaagatgacatgccaaagtcagatgtcaacaaagagtactatacacagaatatggagagagaggtatgctgccactttttggataaaaatcctaatgaattgacacagtctgtataatttatcttttgaatttgtcatccccacttagatttctaactctgatggaacacggccagttggcatgctggggaaagccacatctaccagtgacatgctgctcaaactggcccggaccacaccctactacaaaaggaatcgaccccacatttgctccttctgggtgaaaggagagtgtaagagaggagaggaatgtccatacagacatgagaagcctacagatccagatgacccccttgctgatcagaatattaaagaccgttattacggaatcaatgatcctgtagctgacaagcttctaaagcgggcttcaacaatgcctcggctggacccaccagaggataaaactatcaccacactatatgttggtggtctaggtgataccattactgagacagatttaagaaatcatttctaccagttcggagagatccggacgatcactgttgtgcagagacagcagtgtgctttcatccagtttgccacacggcaggctgcagaagtggctgctgagaagtcctttaataagttgattgtaaatggccgcagactgaatgtgaaatggggaagatcccaggcagccagaggaaaagaaaaagagaaagatggaactacagactctgggatcaaactagaacctgttccaggattgccaggagctcttcctcctcctcctgcagcagaagaagaagcctctgccaactacttcaacttgcccccaagtggtcctccagctgtggtgaacattgctctgccaccgccccctggcattgctccacccccacccccaggttttgggccacacatgttccacccaatgggaccaccccctcctttcatgcgggctccaggaccaatccactatccttctcaggaccctcagaggatgggagctcatgctggaaaacacagcagcccctagcaccttgtcaccactctggggctctgtggaagaaagggcacttaaaactcccagtaaatcttggaataaatatatttttccttcccttgtagtttccatggtagctgaatgtgctcagatgtgagcagtcagagactgacagccatgctttcctatacttgttcaaaggatcgatggaccgtaaataagctgccattaacacatctggttactgctgtaacatgactaataaaaccgaacgcctgttccccttacccgtgtgggggacacgcagatgagtgaattggaatgtccagcagagttaccctcccaattatatgttcattttgtatattttttggtcgggggaaaaattgacctgcagtaaaaaaacctttgaccatttttatgtccattggatactttcctttttatcatcttaaaaaaagataactagtactaatcattgtagtggcctaagtgtgatttaactcttgaagtcacaccctccgaaagatgagtagaaaccagcaccagcacagcccagatcttctctttcctctccttttcctcatttattcctaaaggaatctgaccattttacgtctctacggcccaaaaaaagacaaaaataaaaattcctttttattcctgtcaactggatggaaacacaaatttcatggagctgtgtaccatcgaagaaacctggtgtctggcatgaaattactgtaaagaacttcctgtaaaacacgttctttaacaaactgaaatgaaaagcattggagcgtctgaatgaaagacgtgacctcctgctgggactctgatggtcttcagcattcaccttcgtgtgtcttcagtgtctcattgtcatccctgcttctgtttggtcttagagtgtttggatataactgaattgtagatggtaaaggaaatttgatgtgttttttgtttttaaataattaaaacgggtcaatttttcaaaaaaaaagtcatgg

SEQ ID NO: 309756 - DNA, 1909 bp, Homo sapiens
aatgtattcagggggttggtgtataatctactcctttgaaggttcatgtttttgtgactagctattataggccaagtataatgccaggccatgaaaggtgaattttagggtttataaatgaattagacctagattctgcccttagaggctgattgtccagtggagaagataaaacagggaagaatcgctattttaagtttaaaagtgatgattgcataagagagacacaggtgaaagacccagttcaaagggggaacatgtctccaacttggaaccagggaagtgatggctaatagcagcatctgcctttgtggagcgctccctatgtggtaagcactgtgctaaacacgtatgtgttgccttttctggtccttatgatagttctagcagcttttgaacccaggtcttttctggtgtcaaaacctttgctcttgttcactgtgcacagtggcatttatgggaaaagagtgtgtgctgaggaggaggtagagcgaaggaactccattggactggggaatgtaagaagcagaggtgtgagataaggtgggccagagtgccgactgtatgcatgtgtgtttcccagatcccaggcagccagaggaaaagaaaaagagaaagatggaactacagactctgggatcaaactagaacctgttccaggattgccaggagctcttcctcctcctcctgcagcagaagaagaagcctctgccaactacttcaacttgcccccaagtggtcctccagctgtggtgaacattgctctgccaccgccccctggcattgctccacccccacccccaggttttgggccacacatgttccacccaatgggaccaccccctcctttcatgcgggctccaggaccaatccactatccttctcaggaccctcagaggatgggagctcatgctggaaaacacagcagcccctagcaccttgtcaccactctggggctctgtggaagaaagggcacttaaaactcccagtaaatcttggaataaatatatttttccttcccttgtagtttccatggtagctgaatgtgctcagatgtgagcagtcagagactgacagccatgctttcctatacttgttcaaaggatcgatggaccgtaaataagctgccattaacacatctggttactgctgtaacatgactaataaaaccgaacgcctgttccccttacccgtgtgggggacacgcagatgagtgaattggaatgtccagcagagttaccctcccaattatatgttcattttgtatattttttggtcgggggaaaaattgacctgcagtaaaaaaacctttgaccatttttatgtccattggatactttcctttttatcatcttaaaaaaagataactagtactaatcattgtagtggcctaagtgtgatttaactcttgaagtcacaccctccgaaagatgagtagaaaccagcaccagcacagcccagatcttctctttcctctccttttcctcatttattcctaaaggaatctgaccattttacgtctctacggcccaaaaaaagacaaaaataaaaattcctttttattcctgtcaactggatggaaacacaaatttcatggagctgtgtaccatcgaagaaacctggtgtctggcatgaaattactgtaaagaacttcctgtaaaacacgttctttaacaaactgaaatgaaaagcattggagcgtctgaatgaaagacgtgacctcctgctgggactctgatggtcttcagcattcaccttcgtgtgtcttcagtgtctcattgtcatccctgcttctgtttggtcttagagtgtttggatataactgaattgtagatggtaaaggaaatttgatgtgttttttgtttttaaataattaaaacgggtcaatttttcaaaaaaaaagtcatgg

SEQ ID NO: 309757 - DNA, 1791 bp, Homo sapiens
ccaacctcttatctagggtttagggtctttaaagaacctattagaaccccctttcctccatgggaaaaaaccctgagatgtttgagaacctttatttactcattatttttctttccttctctcaatcagcagcacccacagtaggacaagatatggggtggagacctgcgggtagttaggcagataaccttggggcccacctgcctagtggtgtgtcagtgaaagttaatccattttcagtctcctgggtacatcttttttaactcccactttcatttttctctgcctgtttcccttcagaaatcatttctaccagttcggagagatccggacgatcactgttgtgcagagacagcagtgtgctttcatccagtttgccacacggcaggctgcagaagtggctgctgagaagtcctttaataagttgattgtaaatggccgcagactgaatgtgaaatggggaagatcccaggcagccagaggaaaagaaaaagagaaagatggaactacagactctgggatcaaactagaacctgttccaggattgccaggagctcttcctcctcctcctgcagcagaagaagaagcctctgccaactacttcaacttgcccccaagtggtcctccagctgtggtgaacattgctctgccaccgccccctggcattgctccacccccacccccaggttttgggccacacatgttccacccaatgggaccaccccctcctttcatgcgggctccaggaccaatccactatccttctcaggaccctcagaggatgggagctcatgctggaaaacacagcagcccctagcaccttgtcaccactctggggctctgtggaagaaagggcacttaaaactcccagtaaatcttggaataaatatatttttccttcccttgtagtttccatggtagctgaatgtgctcagatgtgagcagtcagagactgacagccatgctttcctatacttgttcaaaggatcgatggaccgtaaataagctgccattaacacatctggttactgctgtaacatgactaataaaaccgaacgcctgttccccttacccgtgtgggggacacgcagatgagtgaattggaatgtccagcagagttaccctcccaattatatgttcattttgtatattttttggtcgggggaaaaattgacctgcagtaaaaaaacctttgaccatttttatgtccattggatactttcctttttatcatcttaaaaaaagataactagtactaatcattgtagtggcctaagtgtgatttaactcttgaagtcacaccctccgaaagatgagtagaaaccagcaccagcacagcccagatcttctctttcctctccttttcctcatttattcctaaaggaatctgaccattttacgtctctacggcccaaaaaaagacaaaaataaaaattcctttttattcctgtcaactggatggaaacacaaatttcatggagctgtgtaccatcgaagaaacctggtgtctggcatgaaattactgtaaagaacttcctgtaaaacacgttctttaacaaactgaaatgaaaagcattggagcgtctgaatgaaagacgtgacctcctgctgggactctgatggtcttcagcattcaccttcgtgtgtcttcagtgtctcattgtcatccctgcttctgtttggtcttagagtgtttggatataactgaattgtagatggtaaaggaaatttgatgtgttttttgtttttaaataattaaaacgggtcaatttttcaaaaaaaaagtcatgg

SEQ ID NO: 309758 - DNA, 1119 bp, Homo sapiens
cgcgtaaataagacgccgaccggcgcggcgctaccgcggggcttgacgggattgtggcggtcctctctcccaattcggaagctacagctacctccggacgctctcaagatggcgacctctctgggttccaacacctacaacaggcagaactgggaggatgcggacttccccattctgtgccagacatgtcttggagaaaacccatatatccgaatgaccaaagaaaagtatgggaaggaatgcaaaatctgtgccaggccattcacagtgtttcgctggtgccctggagtccgcatgcgtttcaagaagactgaagtgtgccaaacctgcagtaaattgaagaatgtctgtcagacctgcctcttagacctagagtatggcctgcccatccaggttcgtgacgcaggattgtcttttaaagatgacatgccaaagtcagatgtcaacaaagagtactatacacagaatatggagagagagatttctaactctgatggaacacggccagttggcatgctggggaaagccacatctaccagtgacatgctgctcaaactggcccggaccacaccctactacaaaaggaatcgaccccacatttgctccttctgggtgaaaggagagtgtaagagaggagaggaatgtccatacagacatgagaagcctacagatccagatgacccccttgctgatcagaatattaaagaccgttattacggaatcaatgatcctgtagctgacaagcttctaaagcgggcttcaacaatgcctcggctggacccaccagaggataaaactatcaccacactatatgttggtggtctaggtgataccattactgagacagatttaaggtttgtgggtataagttagagagttatttttgcctttaactgccctggaataatttatttgcaaaaactgcaagaatgatcattctgtacaaaatacatttttctgtagtctctctattgttagtatcatgctgactggaatttttgtaaaattgtcctttatggtgccacagtaataatgtgcttatgtggctgggcacagtgcctcatgcctgtaatctcaacactttgggaggatctcttgaaccgaggagtttgagaccag

SEQ ID NO: 309759 - DNA, 848 bp, Homo sapiens
tcggccccgcccccgcgccccggatatgctgggacagcccgcgcccctagaacgctttgcgtcccgacgcccgcaggtcctcgcggtgcgcaccgtttgcgacttggtacttggaaaaatggacaaggattgtgaaatgaaacgcaccacactggacagccctttggggaagctggagctgtctggttgtgagcagggtctgcacgaaataaagctcctgggcaaggggacgtctgcagctgatgccgtggaggtcccagcccccgctgcggttctcggaggtccggagcccctgatgcagtgcacagcctggctgaatgcctatttccaccagcccgaggctatcgaagagttccccgtgccggctcttcaccatcccgttttccagcaagagtcgttcaccagacaggtgttatggaagctgctgaaggttgtgaaattcggagaagtgatttcttaccagcaattagcagccctggcaggcaaccccaaagccgcgcgagcagtgggaggagcaatgagaggcaatcctgtccccatcctcatcccgtgccacagagtggtctgcagcagcggagccgtgggcaactactccggaggactggccgtgaaggaatggcttctggcccatgaaggccaccggttggggaagccaggcttgggagggagctcaggtctggcaggggcctggctcaagggagcgggagctacctcgggctccccgcctgctggccgaaactgagtatgtgcagtaggatggatgtttgagcgacacacacgtgtaacactgcatcggatgcggggcgtggaggcaccgctgtattaaaggaagtggcagtgtcctggga

SEQ ID NO: 309760 - DNA, 1129 bp, Homo sapiens
tcggccccgcccccgcgccccggatatgctgggacagcccgcgcccctagaacgctttgcgtcccgacgcccgcaggtcctcgcggtgcgcaccgtttgcgacttggtacttggaaaaatggacaaggattgtgaaatgaaacgcaccacactggacagccctttggggaagctggagctgtctggttgtgagcagggtctgcacgaaataaagctcctgggcaaggggacgtctgcagctgatgccgtggaggtcccagcccccgctgcggttctcggaggtccggagcccctgatgcagtgcacagcctggctgaatgcctatttccaccagcccgaggctatcgaagagttccccgtgccggctcttcaccatcccgttttccagcaagagtcgttcaccagacaggtgttatggaagctgctgaaggttgtgaaattcggagaagtgatttcttaccagcaattagcagccctggcaggcaaccccaaagccgcgcgagcagtgggaggagcaatgagaggcaatcctgtccccatcctcatcccgtgccacagagtggtctgcagcagcggagccgtgggcaactactccggaggactggccgtgaaggaatggcttctggcccatgaaggccaccggttggggaagccaggcttgggagggagctcaggtctggcaggggcctggctcaagggagcgggagctacctcgggctccccgcctgctggccgaaactgagtatgtgcagtaggatggatgtttgagcgacacacacgtgtaacactgcatcggatgcggggcgtggaggcaccgctgtattaaaggaagtggcagtgtcctgggaacaagcgtgtctgccctttctgtttccatattttacagcaggatgagttcagacgcccgcggtcctgcacacatttgtttccttctctaacgctgcccttgctctatttttcatgtccattaaaacaggccaagtgagtgtggaaggcctggctcatgttgggccacagcccaggatggggcagtctggcaccctcaggccacagacggctgccatagccgctgtccagggccagctaaggcccatcccaggccgtccacactagaaagctggccctgccc

SEQ ID NO: 309761 - DNA, 770 bp, Homo sapiens
ccccccccgccccccccgccgccccttggtacttggaaaaatggacaaggattgtgaaatgaaacgcaccacactggacagccctttggggaagctggagctgtctggttgtgagcagggtctgcacgaaataaagctcctgggcaaggggacgtctgcagctgatgccgtggaggtcccagcccccgctgcggttctcggaggtccggagcccctgatgcagtgcacagcctggctgaatgcctatttccaccagcccgaggctatcgaagagttccccgtgccggctcttcaccatcccgttttccagcaagagtcgttcaccagacaggtgttatggaagctgctgaaggttgtgaaattcggagaagtgatttcttaccagcaattagcagccctggcaggcaaccccaaagccgcgcgagcagtgggaggagcaatgagaggcaatcctgtccccatcctcatcccgtgccacagagtggtctgcagcagcggagccgtgggcaactactccggaggactggccgtgaaggaatggcttctggcccatgaaggccaccggttggggaagccaggcttgggagggagctcaggtctggcaggggcctggctcaagggagcgggagctacctcgggctccccgcctgctggccgaaactgagtatgtgcagtaggatggatgtttgagcgacacacacgtgtaacactgcatcggatgcggggcgtggaggcaccgctgtattaaaggaagtggcagtgtcctggga

SEQ ID NO: 309762 - DNA, 629 bp, Homo sapiens
tcggccccgcccccgcgccccggatatgctgggacagcccgcgcccctagaacgctttgcgtcccgacgcccgcaggtcctcgcggtgcgcaccgtttgcgacttggtacttggaaaaatggacaaggattgtgaaatgaaacgcaccacactggacagccctttggggaagctggagctgtctggttgtgagcagggtctgcacgaaataaagctcctgggcaaggggacgtctgcagctgagccccttctggttctcccgtgcctcggtgtgatcattaggaggatggatcaacctggtgctatcgggaacgcactgcgttaatggcctcagtgcccagcaatggagaactttccactgagtatccgcatgcagcgtgcccggcggaaggtgaaagcttcaccctttgtctcccttgccatcctttggccttgtgtgtttggaagtagccagaggtggtggaacagtggtgggctggtttgggtcttgttggcagtgccaaagggacaaaggctggatgtgggcacgacctcagcctcgtgatgggcaagacaggtgggggtgactttctgttctgaaaatgacctcctccccttcttcctcccctcaagcttcctacctttcctcc

SEQ ID NO: 309763 - DNA, 324 bp, Homo sapiens
ggacaggattgctctcattgctcctcccactgctcgcgcggctttggggttgcctgccaggctgctactccggaggactggccgtgaaggaatggcttctggcccatgaaggccaccggttggggaagccaggcttgggagggagctcaggtctggcaggggcctggctcaagggagcgggagctacctcgggctccccgcctgctggccgaaactgagtatgtgcagtaggatggatgtttgagcgacacacacgtgtaacactgcatcggatgcggggcgtggaggcaccgctgtattaaaggaagtggcagtgtcctggga

SEQ ID NO: 309764 - DNA, 1134 bp, Homo sapiens
tatttaatgggaatatatcctgaggatatatgcttacttgcaaatgcttttatgtgtagtcactgtaaattcaggagtcatgaatctagtactaattttttcctttcaagctcttggaataccctttcgtgccaaattacacggcgatgacttgattgtaactccttttgcccaggtccttgccagcttgcgaagtgtgagaaacaacttcactatactgacaaaccttcatggtacatctaacaagaggtccccagctgctagtcagcctcctgtctccagagtcaacccacaaggacagtgcatccacttttcttggtgtgttgagagctgcagagaggaagggccaccttgaaggaacaccatggagttctgttggaactgaaattcttcttcacacaaaatgcaaccagttctatgatatttgttaaagtccaaataatgttttctcctaaatctgttccctactaatgtagcagtagatttgagaaaaaccacaggagaaacaattaagatgaactcacactgagatcacctaatgcctgacacctaacgatgcctcacatgcttttctatttccagcagcgcttcatacttaaaatctttctctcttggttgttgtgttttctttctggtatcctgatcataagtataacggaagtattacaaaagcttagcttctaaaagaagggaacaaaagcagcagattctattggctcattggcttctgaagtatttgtggtgcatgctttttaaaatatttttataaaagaaagattgagaacgagaaaaaaaagtgaaagaaagatactaagtaaaggtgagtttactctagagcctcgtaatatgaaatataaagaagtaaacagtactctatggacttcaaaaacctggtgtgctgcatgtactatttcttttagaacttttataaaaagaaacaaaataggatgttttaacatataactcgtgttacatacttggagatcgaaggaggtagttttgaaactccaatcatttcatcatattggcctaccagtgaggcaatgttgctcacatttctgttagccaaatttacatcaatttgattatttagactatgttttctttttcttgtaataaatactgacaaacatt

SEQ ID NO: 309765 - DNA, 1308 bp, Homo sapiens
agctacctttcaaaaacattctcagcatttcttagcagaagcaaaacaagcgaagaaaggaaatgactgcactgtgttcagcttattcaattttctccattaccttgagcttgttattttgggtccctggaaaacaaattagggggtagaaaggagcagtggtgtcgttcaccgtgagagtctgcatagaactcagcagtgtgccctgctgtgtcttggaccctgccccccacaggagttgtacagtccctggccctgttccctacctcctctcttcaccccgttaggctgttttcaatgtaatgctgccgtccttctcttgcactgccttctgcgctaacacctccattcctgtttataaccgtgtatttattacttaatgtatataatgtaatgttttgtaagttattaatttatatatctaacattgcctgccaatggtggtgttaaatttgtgtagaaaactctgcctaagagttacgactttttcttgtaatgttttgtattgtgtattatataacccaaacgtcacttagtagagacatatggcccccttggcagagaggacaggggtgggcttttgttcaaagggtctgccctttccctgcctgagttgctacttctgcacaacccctttatgaaccagttttggaaacaatattctcacattagatactaaatggtttatactgagcttttacttttgtatagcttgataggggcagggggcaatgggatgtagtttttacccaggttctatccaaatctatgtgggcatgagttgggttataactggatcctactatcattgtggctttggttcaaaaggaaacactacatttgctcacagatgattcttctgaatgctcccgaactactgactttgaagaggtagcctcctgcctgccattaagcaggaatgtcatgttccagttcattacaaaagaaaacaataaaacaatgtgaatttttataataaaatgtgaactgatgtagcaaattacgcaaatgtgaagcctcttctgataacacttgttaggcctcttactgatgtcagtttcagtttgtaaaatatgtttcatgctttcagttcagcattgtgactcagtaattacagaaaatggcacaaatgtgcatgaccaatgtatgtctatgaacactgcattgtttcaggtggacattttatcattttcaaatgtttctcacaatgtatgttatagtattattattatatattgtgttcaaatgcattctaaagagacttttatatgaggtgaataaagaaaagcatgattagattagtctgta

SEQ ID NO: 309766 - DNA, 1481 bp, Homo sapiens
taatgcaactaaaatgttctcgggtttagtaccaagcgtactagtatgagaggcatgagatgttccggcagtatttacacctaattttatgagatttccaaaacttgatgatttcaggtccttcgcaacatggtacactgtgcagacctgagcaaccccaccaagtccttggaattgtatcggcaatggacagaccgcatcatggaggaatttttccagcagggagacaaagagcgggagaggggaatggaaattagcccaatgtgtgataaacacacagcttctgtggaaaaatcccaggtatctaatatgagattttcaaagtttttgtgagctctgctgattatagagctggagggttctatttaattccgtttttccaatagaatatgtatatatgaaacaataaggagacaactacgcattttgttccattatagtcaggactcatgcgacttctccattacactcagtttcacagggtggggaaaagtagtcatcagaaacccatcaaaatttggactatgtgtccctaaatcatttagatagttgtctctgatgttagcaaatccagctgaataatatgaacatcagtgtctcctccatcccaaccctctggatttctcctagctctgtcttcattcaagaactctactcctcatccttgcttccagccctctgtttttatcttctgtccttaatcaagcccatggtgaccatcaccagaggcagtctcttttactgcatagtcaaagccctgtcttgtcttccctcccaaggatgcttctatgcttttgagaacatgctgacattttctggttgtgtccaaagcaacacattctgtgtgtgctcaggacaggggacaatagtctggaggggtgaatacagaaatgtccagatgccaatagctgcagaatatgcagcaatggaaagtatcagtatccatacaaagatttttcaagaaaacgaatgggctgagccaagtagctgagattgagaatgagttcatagactgtccaagatctttatcccaaaaacatttggattgtttattttcagtatttatcctctttccctactacctggatactccaaatttgcatatacttgtaatattaatatacagttcctttgcaatatttattttgttgcttcttagagaaacccaactaaatgagtttaaaaaatctgtgaaagggctgggcacagtggctcatgcctgtaatccagcactttgggaggctgaggtggacggatcacctgaggtcaggagttcaaaaccagcctggccaacatggtgaaaccctgtctctaccaaaaacacacaaaaaattggtcgagcatggtagtgtgtgcctgtagtcccagctactcgggaagctgagacaggaaaattgcttgaacccaggaggcggacgttgcagtgagctgagattgtgccactgcattccagcctgggcaacagagcaagactctatctc

SEQ ID NO: 309767 - DNA, 1156 bp, Homo sapiens
tatttaatgggaatatatcctgaggatatatgcttacttgcaaatgcttttatgtgtagtcactgtaaattcaggagtcatgaatctagtactaattttttcctttcaagctcttggaataccctttcgtgccaaattgtgagtcctgtcttatatccagacacggcgatgacttgattgtaactccttttgcccaggtccttgccagcttgcgaagtgtgagaaacaacttcactatactgacaaaccttcatggtacatctaacaagaggtccccagctgctagtcagcctcctgtctccagagtcaacccacaaggacagtgcatccacttttcttggtgtgttgagagctgcagagaggaagggccaccttgaaggaacaccatggagttctgttggaactgaaattcttcttcacacaaaatgcaaccagttctatgatatttgttaaagtccaaataatgttttctcctaaatctgttccctactaatgtagcagtagatttgagaaaaaccacaggagaaacaattaagatgaactcacactgagatcacctaatgcctgacacctaacgatgcctcacatgcttttctatttccagcagcgcttcatacttaaaatctttctctcttggttgttgtgttttctttctggtatcctgatcataagtataacggaagtattacaaaagcttagcttctaaaagaagggaacaaaagcagcagattctattggctcattggcttctgaagtatttgtggtgcatgctttttaaaatatttttataaaagaaagattgagaacgagaaaaaaaagtgaaagaaagatactaagtaaaggtgagtttactctagagcctcgtaatatgaaatataaagaagtaaacagtactctatggacttcaaaaacctggtgtgctgcatgtactatttcttttagaacttttataaaaagaaacaaaataggatgttttaacatataactcgtgttacatacttggagatcgaaggaggtagttttgaaactccaatcatttcatcatattggcctaccagtgaggcaatgttgctcacatttctgttagccaaatttacatcaatttgattatttagactatgttttctttttcttgtaataaatactgacaaacatt

SEQ ID NO: 309768 - DNA, 4368 bp, Homo sapiens
gaattcctcctctcttcaccccgttagctgttttcaatgtaatgctgccgtccttctcttgcactgccttctgcgctaacacctccattcctgtttataaccgtgtatttattacttaatgtatataatgtaatgttttgtaagttattaatttatatatctaacattgcctgccaatggtggtgttaaatttgtgtagaaaactctgcctaagagttacgactttttcttgtaatgttttgtattgtgtattatataacccaaacgtcacttagtagagacatatggcccccttggcagagaggacaggggtgggcttttgttcaaagggtctgccctttccctgcctgagttgctacttctgcacaacccctttatgaaccagttttcacccgaattttgactgtttcatttagaagaaaagcaaaatgagaaaaagctttcctcatttctccttgagatggcaaagcactcagaaatgacatcacataccctaaagaaccctgggatgactaaggcagagagagtctgagaaaactctttggtgcttctgcctttagttttaggacacatttatgcagatgagcttataagagaccgttccctccgccttcttcctcagaggaagtttcttggtagatcaccgacacctcatccaggcggggggttggggggaaacttggcaccagccatcccaggcagagcaccactgtgatttgttctcctggtggagagagctggaaggaaggagccagcgtgcaaataatgaaggagcacgggggcaccttcagtagcaccggaatcagcggtggtagcggtgactctgctatggacagcctgcagccgctccagcctaactacatgcctgtgtgtttgtttgcagaagaatcttatcaaaaattagcaatggaaacgctggaggaattagactggtgtttagaccagctagagaccatacagacctaccggtctgtcagtgagatggcttctaacaagttcaaaagaatgctgaaccgggagctgacacacctctcagagatgagccgatcagggaaccaggtgtctgaatacatttcaaatactttcttagacaagcagaatgatgtggagatcccatctcctacccagaaagacagggagaaaaagaaaaagcagcagctcatgacccagataagtggagtgaagaaattaatgcatagttcaagcctaaacaatacaagcatctcacgctttggagtcaacactgaaaatgaagatcacctggccaaggagctggaagacctgaacaaatggggtcttaacatctttaatgtggctggatattctcacaatagacccctaacatgcatcatgtatgctatattccaggaaagagacctcctaaagacattcagaatctcatctgacacatttataacctacatgatgactttagaagaccattaccattctgacgtggcatatcacaacagcctgcacgctgctgatgtagcccagtcgacccatgttctcctttctacaccagcattagacgctgtcttcacagatttggagatcctggctgccatttttgcagctgccatccatgacgttgatcatcctggagtctccaatcagtttctcatcaacacaaattcagaacttgctttgatgtataatgatgaatctgtgttggaaaatcatcaccttgctgtgggtttcaaactgctgcaagaagaacactgtgacatcttcatgaatctcaccaagaagcagcgtcagacactcaggaagatggttattgacatggtgttagcaactgatatgtctaaacatatgagcctgctggcagacctgaagacaatggtagaaacgaagaaagttacaagttcaggcgttcttctcctagacaactataccgatcgcattcaggtccttcgcaacatggtacactgtgcagacctgagcaaccccaccaagtccttggaattgtatcggcaatggacagaccgcatcatggaggaatttttccagcagggagacaaagagcgggagaggggaatggaaattagcccaatgtgtgataaacacacagcttctgtggaaaaatcccaggttggtttcatcgactacattgtccatccattgtgggagacatgggcagatttggtacagcctgatgctcaggacattctcgataccttagaagataacaggaactggtatcagagcatgatacctcaaagtccctcaccaccactggacgagcagaacagggactgccagggtctgatggagaagtttcagtttgaactgactctcgatgaggaagattctgaaggacctgagaaggagggagagggacacagctatttcagcagcacaaagacgctttgtgtgattgatccagaaaacagagattccctgggagagactgacatagacattgcaacagaagacaagtcccccgtggatacataatccccctctccctgtggagatgaacattctatccttgatgagcatgccagctatgtggtagggccagcccaccatgggggccaagacctgcacaggacaagggccacctggcctttcagttacttgagtttggagtcagaaagcaagaccaggaagcaaatagcagctcaggaaatcccacggttgacttgccttgatggcaagcttggtggagagggctgaagctgttgctgggggccgattctgatcaagacacatggcttgaaaatggaagacacaaaactgagagatcattctgcactaagtttcgggaacttatccccgacagtgactgaactcactgactaataacttcatttatgaatcttctcacttgtccctttgtctgccaacctgtgtgccttttttgtaaaacattttcatgtctttaaaatgcctgttgaatacctggagtttagtatcaacttctacacagataagctttcaaagttgacaaacttttttgactctttctggaaaagggaaagaaaatagtcttccttctttcttgggcaatatccttcactttactacagttacttttgcaaacagacagaaaggatacacttctaaccacattttacttccttcccctgttgtccagtccaactccacagtcactcttaaaacttctctctgtttgcctgcctccaacagtacttttaactttttgctgtaaacagaataaaattgaacaaattagggggtagaaaggagcagtggtgtcgttcaccgtgagagtctgcatagaactcagcagtgtgccctgctgtgtcttggaccctgccccccacaggagttgtacagtccctggccctgttccctacctcctctcttcaccccgttaggctgttttcaatgtaatgctgccgtccttctcttgcactgccttctgcgctaacacctccattcctgtttataaccgtgtatttattacttaatgtatataatgtaatgttttgtaagttattaatttatatatctaacattgcctgccaatggtggtgttaaatttgtgtagaaaactctgcctaagagttacgactttttcttgtaatgttttgtattgtgtattatataacccaaacgtcacttagtagagacatatggcccccttggcagagaggacaggggtgggcttttgttcaaagggtctgccctttccctgcctgagttgctacttctgcacaacccctttatgaaccagttttggaaacaatattctcacattagatactaaatggtttatactgagcttttacttttgtatagcttgataggggcagggggcaatgggatgtagtttttacccaggttctatccaaatctatgtgggcatgagttgggttataactggatcctactatcattgtggctttggttcaaaaggaaacactacatttgctcacagatgattcttctgaatgctcccgaactactgactttgaagaggtagcctcctgcctgccattaagcaggaatgtcatgttccagttcattacaaaagaaaacaataaaacaatgtgaatttttataataaaatgtgaactgatgtagcaaattacgcaaatgtgaagcctcttctgataacacttgttaggcctcttactgatgtcagtttcagtttgtaaaatatgtttcatgctttcagttcagcattgtgactcagtaattacagaaaatggcacaaatgtgcatgaccaatgtatgtctatgaacactgcattgtttcaggtggacattttatcattttcaaatgtttctcacaatgtatgttatagtattattattatatattgtgttcaaatgcattctaaagagacttttatatgaggtgaataaagaaaagcatgattagattagtctgta

SEQ ID NO: 309769 - DNA, 4259 bp, Homo sapiens
gaattcctcctctcttcaccccgttagctgttttcaatgtaatgctgccgtccttctcttgcactgccttctgcgctaacacctccattcctgtttataaccgtgtatttattacttaatgtatataatgtaatgttttgtaagttattaatttatatatctaacattgcctgccaatggtggtgttaaatttgtgtagaaaactctgcctaagagttacgactttttcttgtaatgttttgtattgtgtattatataacccaaacgtcacttagtagagacatatggcccccttggcagagaggacaggggtgggcttttgttcaaagggtctgccctttccctgcctgagttgctacttctgcacaacccctttatgaaccagttttcacccgaattttgactgtttcatttagaagaaaagcaaaatgagaaaaagctttcctcatttctccttgagatggcaaagcactcagaaatgacatcacataccctaaagaaccctgggatgactaaggcagagagagtctgagaaaactctttggtgcttctgcctttagttttaggacacatttatgcagatgagcttataagagaccgttccctccgccttcttcctcagaggaagtttcttggtagatcaccgacacctcatccaggcggggggttggggggaaacttggcaccagccatcccaggcagagcaccactgtgatttgttctcctggtggagagagctggaaggaaggagccagcgtgcaaataatgaaggagcacgggggcaccttcagtagcaccggaatcagcggtggtagcggtgactctgctatggacagcctgcagccgctccagcctaactacatgcctgtgtgtttgtttgcagaagaatcttatcaaaaattagcaatggaaacgctggaggaattagactggtgtttagaccagctagagaccatacagacctaccggtctgtcagtgagatggcttctaacaagttcaaaagaatgctgaaccgggagctgacacacctctcagagatgagccgatcagggaaccaggtgtctgaatacatttcaaatactttcttagacaagcagaatgatgtggagatcccatctcctacccagaaagacagggagaaaaagaaaaagcagcagctcatgacccagataagtggagtgaagaaattaatgcatagttcaagcctaaacaatacaagcatctcacgctttggagtcaacactgaaaatgaagatcacctggccaaggagctggaagacctgaacaaatggggtcttaacatctttaatgtggctggatattctcacaatagacccctaacatgcatcatgtatgctatattccaggaaagagacctcctaaagacattcagaatctcatctgacacatttataacctacatgatgactttagaagaccattaccattctgacgtggcatatcacaacagcctgcacgctgctgatgtagcccagtcgacccatgttctcctttctacaccagcattagacgctgtcttcacagatttggagatcctggctgccatttttgcagctgccatccatgacgttgatcatcctggagtctccaatcagtttctcatcaacacaaattcagaacttgctttgatgtataatgatgaatctgtgttggaaaatcatcaccttgctgtgggtttcaaactgctgcaagaagaacactgtgacatcttcatgaatctcaccaagaagcagcgtcagacactcaggaagatggttattgacatggtgttagcaactgatatgtctaaacatatgagcctgctggcagacctgaagacaatggtagaaacgaagaaagttacaagttcaggcgttcttctcctagacaactataccgatcgcattcaggtccttcgcaacatggtacactgtgcagacctgagcaaccccaccaagtccttggaattgtatcggcaatggacagaccgcatcatggaggaatttttccagcagggagacaaagagcgggagaggggaatggaaattagcccaatgtgtgataaacacacagcttctgtggaaaaatcccaggttggtttcatcgactacattgtccatccattgtgggagacatgggcagatttggtacagcctgatgctcaggacattctcgataccttagaagataacaggaactggtatcagagcatgatacctcaaagtccctcaccaccactggacgagcagaacagggactgccagggtctgatggagaagtttcagtttgaactgactctcgatgaggaagattctgaaggacctgagaaggagggagagggacacagctatttcagcagcacaaagacgctttgtgtgattgatccagaaaacagagattccctgggagagactgacatagacattgcaacagaagacaagtcccccgtggatacataatccccctctccctgtggagatgaacattctatccttgatgagcatgccagctatgtggtagggccagcccaccatgggggccaagacctgcacaggacaagggccacctggcctttcagttacttgagtttggagtcagaaagcaagaccaggaagcaaatagcagctcaggaaatcccacggttgacttgccttgatggcaagcttggtggagagggctgaagctgttgctgggggccgattctgatcaagacacatggcttgaaaatggaagacacaaaactgagagatcattctgcactaagtttcgggaacttatccccgacagtgactgaactcactgactaataacttcatttatgaatcttctcacttgtccctttgtctgccaacctgtgtgccttttttgtaaaacattttcatgtctttaaaatgcctgttgaatacctggagtttagtatcaacttctacacagataagctttcaaagttgacaaacttttttgactctttctggaaaagggaaagaaaatagtcttccttctttcttgggcaatatccttcactttactacagttacttttgcaaacagacagaaaggatacacttctaaccacattttacttccttcccctgttgtccagtccaactccacagtcactcttaaaacttctctctgtttgcctgcctccaacagtacttttaactttttgctgtaaacagaataaaattgaacaaattagggggtagaaaggagcagtggtgtcgttcaccgtgagagtctgcatagaactcagcagtgtgccctgctgtgtcttggaccctgccccccacaggagttgtacagtccctggccctgttccctacctcctctcttcaccccgttaggctgttttcaatgtaatgctgccgtccttctcttgcactgccttctgcgctaacacctccattcctgtttataaccgtgtatttattacttaatgtatataatgtaatgttttgtaagttattaatttatatatctaacattgcctgccaatggtggtgttaaatttgtgtagaaaactctgcctaagagttacgactttttcttgtaatgttttgtattgtgtattatataacccaaacgtcacttagtagagacatatggcccccttggcagagaggacaggggtgggcttttgttcaaagggtctgccctttccctgcctgagttgctacttctgcacaacccctttatgaaccagttttggaaacaatattctcacattagatactaaatggtttatactgagcttttacttttgtatagcttgataggggcagggggcaatgggatgtagtttttacccaggttctatccaaatctatgtgggcatgagttgggttataactggatcctactatcattgtggctttggttcaaaaggaaacactacatttgctcacagatgattcttctgaatgctcccgaactactgactttgaagaggtagcctcctgcctgccattaagcaggaatgtcatgttccagttcattacaaaagaaaacaataaaacaatgtgaatttttataataaaatgtgaactgatgtagcaaattacgcaaatgtgaagcctcttctgataacacttgttaggcctcttactgatgtcagtttcagtttgtaaaatatgtttcatgctttcagttcagcattgtgactcagtaattacagaaaatggcacaaatgtgcatgaccaatatgtctatgacctgcattgggagctctagagcgaccggcagcaccaggtgcacag

SEQ ID NO: 309770 - DNA, 4257 bp, Homo sapiens
gcggccgcggcggtgcagcagaggcgcctcgggcaggaggagggcggcttctgcgagggcagcctgaggtattaaaaagtgtcagcaaactgcattgaataacagacatcctaagaggggatattttccacctctataatgaagaaaagcaggagtgtgatgacggtgatggctgatgataatgttaaagattattttgaatgtagcttgagtaaatcctacagttcttccagtaacacacttgggatcgacctctggagagggagaaggtgttgctcaggaaacttacagttaccaccactgtctcaaagacagagtgaaagggcaaggactcctgagggagatggtatttccaggccgaccacactgcctttgacaacgcttccaagcattgctattacaactgtaagccaggagtgctttgatgtggaaaatggcccttccccaggtcggagtccactggatccccaggccagctcttccgctgggctggtacttcacgccacctttcctgggcacagccagcgcagagagtcatttctctacagatcagacagcgactatgacttgtcaccaaaggcgatgtcgagaaactcttctcttccaagcgagcaacacggcgatgacttgattgtaactccttttgcccaggtccttgccagcttgcgaagtgtgagaaacaacttcactatactgacaaaccttcatggtacatctaacaagaggtccccagctgctagtcagcctcctgtctccagagtcaacccacaagaagaatcttatcaaaaattagcaatggaaacgctggaggaattagactggtgtttagaccagctagagaccatacagacctaccggtctgtcagtgagatggcttctaacaagttcaaaagaatgctgaaccgggagctgacacacctctcagagatgagccgatcagggaaccaggtgtctgaatacatttcaaatactttcttagacaagcagaatgatgtggagatcccatctcctacccagaaagacagggagaaaaagaaaaagcagcagctcatgacccagataagtggagtgaagaaattaatgcatagttcaagcctaaacaatacaagcatctcacgctttggagtcaacactgaaaatgaagatcacctggccaaggagctggaagacctgaacaaatggggtcttaacatctttaatgtggctggatattctcacaatagacccctaacatgcatcatgtatgctatattccaggaaagagacctcctaaagacattcagaatctcatctgacacatttataacctacatgatgactttagaagaccattaccattctgacgtggcatatcacaacagcctgcacgctgctgatgtagcccagtcgacccatgttctcctttctacaccagcattagacgctgtcttcacagatttggagatcctggctgccatttttgcagctgccatccatgacgttgatcatcctggagtctccaatcagtttctcatcaacacaaattcagaacttgctttgatgtataatgatgaatctgtgttggaaaatcatcaccttgctgtgggtttcaaactgctgcaagaagaacactgtgacatcttcatgaatctcaccaagaagcagcgtcagacactcaggaagatggttattgacatggtgttagcaactgatatgtctaaacatatgagcctgctggcagacctgaagacaatggtagaaacgaagaaagttacaagttcaggcgttcttctcctagacaactataccgatcgcattcaggtccttcgcaacatggtacactgtgcagacctgagcaaccccaccaagtccttggaattgtatcggcaatggacagaccgcatcatggaggaatttttccagcagggagacaaagagcgggagaggggaatggaaattagcccaatgtgtgataaacacacagcttctgtggaaaaatcccaggttggtttcatcgactacattgtccatccattgtgggagacatgggcagatttggtacagcctgatgctcaggacattctcgataccttagaagataacaggaactggtatcagagcatgatacctcaaagtccctcaccaccactggacgagcagaacagggactgccagggtctgatggagaagtttcagtttgaactgactctcgatgaggaagattctgaaggacctgagaaggagggagagggacacagctatttcagcagcacaaagacgctttgtgtgattgatccagaaaacagagattccctgggagagactgacatagacattgcaacagaagacaagtcccccgtggatacataatccccctctccctgtggagatgaacattctatccttgatgagcatgccagctatgtggtagggccagcccaccatgggggccaagacctgcacaggacaagggccacctggcctttcagttacttgagtttggagtcagaaagcaagaccaggaagcaaatagcagctcaggaaatcccacggttgacttgccttgatggcaagcttggtggagagggctgaagctgttgctgggggccgattctgatcaagacacatggcttgaaaatggaagacacaaaactgagagatcattctgcactaagtttcgggaacttatccccgacagtgactgaactcactgactaataacttcatttatgaatcttctcacttgtccctttgtctgccaacctgtgtgccttttttgtaaaacattttcatgtctttaaaatgcctgttgaatacctggagtttagtatcaacttctacacagataagctttcaaagttgacaaacttttttgactctttctggaaaagggaaagaaaatagtcttccttctttcttgggcaatatccttcactttactacagttacttttgcaaacagacagaaaggatacacttctaaccacattttacttccttcccctgttgtccagtccaactccacagtcactcttaaaacttctctctgtttgcctgcctccaacagtacttttaactttttgctgtaaacagaataaaattgaacaaattagggggtagaaaggagcagtggtgtcgttcaccgtgagagtctgcatagaactcagcagtgtgccctgctgtgtcttggaccctgccccccacaggagttgtacagtccctggccctgttccctacctcctctcttcaccccgttaggctgttttcaatgtaatgctgccgtccttctcttgcactgccttctgcgctaacacctccattcctgtttataaccgtgtatttattacttaatgtatataatgtaatgttttgtaagttattaatttatatatctaacattgcctgccaatggtggtgttaaatttgtgtagaaaactctgcctaagagttacgactttttcttgtaatgttttgtattgtgtattatataacccaaacgtcacttagtagagacatatggcccccttggcagagaggacaggggtgggcttttgttcaaagggtctgccctttccctgcctgagttgctacttctgcacaacccctttatgaaccagttttggaaacaatattctcacattagatactaaatggtttatactgagcttttacttttgtatagcttgataggggcagggggcaatgggatgtagtttttacccaggttctatccaaatctatgtgggcatgagttgggttataactggatcctactatcattgtggctttggttcaaaaggaaacactacatttgctcacagatgattcttctgaatgctcccgaactactgactttgaagaggtagcctcctgcctgccattaagcaggaatgtcatgttccagttcattacaaaagaaaacaataaaacaatgtgaatttttataataaaatgtgaactgatgtagcaaattacgcaaatgtgaagcctcttctgataacacttgttaggcctcttactgatgtcagtttcagtttgtaaaatatgtttcatgctttcagttcagcattgtgactcagtaattacagaaaatggcacaaatgtgcatgaccaatgtatgtctatgaacactgcattgtttcaggtggacattttatcattttcaaatgtttctcacaatgtatgttatagtattattattatatattgtgttcaaatgcattctaaagagacttttatatgaggtgaataaagaaaagcatgattagattagtctgta

SEQ ID NO: 309771 - DNA, 4074 bp, Homo sapiens
  misc_feature (183)..(183): n is a, c, g, or t
atgacagcaaaagattcttcaaaggaacttactgcttctgaacctgaggtttgcataaagactttcaaggagcaaatgcatttagaacttgagcttccgagattaccaggaaacagacctacatctcctaaaatttctccacgcagttcaccaaggaactcaccatgctttttcagaaagttnctggtgaataaaagcattcggcagcgtcgtcgcttcactgtggctcatacatgctttgatgtggaaaatggcccttccccaggtcggagtccactggatccccaggccagctcttccgctgggctggtacttcacgccacctttcctgggcacagccagcgcagagagtcatttctctacagatcagacagcgactatgacttgtcaccaaaggcgatgtcgagaaactcttctcttccaagcgagcaacacggcgatgacttgattgtaactccttttgcccaggtccttgccagcttgcgaagtgtgagaaacaacttcactatactgacaaaccttcatggtacatctaacaagaggtccccagctgctagtcagcctcctgtctccagagtcaacccacaagaagaatcttatcaaaaattagcaatggaaacgctggaggaattagactggtgtttagaccagctagagaccatacagacctaccggtctgtcagtgagatggcttctaacaagttcaaaagaatgctgaaccgggagctgacacacctctcagagatgagccgatcagggaaccaggtgtctgaatacatttcaaatactttcttagacaagcagaatgatgtggagatcccatctcctacccagaaagacagggagaaaaagaaaaagcagcagctcatgacccagataagtggagtgaagaaattaatgcatagttcaagcctaaacaatacaagcatctcacgctttggagtcaacactgaaaatgaagatcacctggccaaggagctggaagacctgaacaaatggggtcttaacatctttaatgtggctggatattctcacaatagacccctaacatgcatcatgtatgctatattccaggaaagagacctcctaaagacattcagaatctcatctgacacatttataacctacatgatgactttagaagaccattaccattctgacgtggcatatcacaacagcctgcacgctgctgatgtagcccagtcgacccatgttctcctttctacaccagcattagacgctgtcttcacagatttggagatcctggctgccatttttgcagctgccatccatgacgttgatcatcctggagtctccaatcagtttctcatcaacacaaattcagaacttgctttgatgtataatgatgaatctgtgttggaaaatcatcaccttgctgtgggtttcaaactgctgcaagaagaacactgtgacatcttcatgaatctcaccaagaagcagcgtcagacactcaggaagatggttattgacatggtgttagcaactgatatgtctaaacatatgagcctgctggcagacctgaagacaatggtagaaacgaagaaagttacaagttcaggcgttcttctcctagacaactataccgatcgcattcaggtccttcgcaacatggtacactgtgcagacctgagcaaccccaccaagtccttggaattgtatcggcaatggacagaccgcatcatggaggaatttttccagcagggagacaaagagcgggagaggggaatggaaattagcccaatgtgtgataaacacacagcttctgtggaaaaatcccaggttggtttcatcgactacattgtccatccattgtgggagacatgggcagatttggtacagcctgatgctcaggacattctcgataccttagaagataacaggaactggtatcagagcatgatacctcaaagtccctcaccaccactggacgagcagaacagggactgccagggtctgatggagaagtttcagtttgaactgactctcgatgaggaagattctgaaggacctgagaaggagggagagggacacagctatttcagcagcacaaagacgctttgtgtgattgatccagaaaacagagattccctgggagagactgacatagacattgcaacagaagacaagtcccccgtggatacataatccccctctccctgtggagatgaacattctatccttgatgagcatgccagctatgtggtagggccagcccaccatgggggccaagacctgcacaggacaagggccacctggcctttcagttacttgagtttggagtcagaaagcaagaccaggaagcaaatagcagctcaggaaatcccacggttgacttgccttgatggcaagcttggtggagagggctgaagctgttgctgggggccgattctgatcaagacacatggcttgaaaatggaagacacaaaactgagagatcattctgcactaagtttcgggaacttatccccgacagtgactgaactcactgactaataacttcatttatgaatcttctcacttgtccctttgtctgccaacctgtgtgccttttttgtaaaacattttcatgtctttaaaatgcctgttgaatacctggagtttagtatcaacttctacacagataagctttcaaagttgacaaacttttttgactctttctggaaaagggaaagaaaatagtcttccttctttcttgggcaatatccttcactttactacagttacttttgcaaacagacagaaaggatacacttctaaccacattttacttccttcccctgttgtccagtccaactccacagtcactcttaaaacttctctctgtttgcctgcctccaacagtacttttaactttttgctgtaaacagaataaaattgaacaaattagggggtagaaaggagcagtggtgtcgttcaccgtgagagtctgcatagaactcagcagtgtgccctgctgtgtcttggaccctgccccccacaggagttgtacagtccctggccctgttccctacctcctctcttcaccccgttaggctgttttcaatgtaatgctgccgtccttctcttgcactgccttctgcgctaacacctccattcctgtttataaccgtgtatttattacttaatgtatataatgtaatgttttgtaagttattaatttatatatctaacattgcctgccaatggtggtgttaaatttgtgtagaaaactctgcctaagagttacgactttttcttgtaatgttttgtattgtgtattatataacccaaacgtcacttagtagagacatatggcccccttggcagagaggacaggggtgggcttttgttcaaagggtctgccctttccctgcctgagttgctacttctgcacaacccctttatgaaccagttttggaaacaatattctcacattagatactaaatggtttatactgagcttttacttttgtatagcttgataggggcagggggcaatgggatgtagtttttacccaggttctatccaaatctatgtgggcatgagttgggttataactggatcctactatcattgtggctttggttcaaaaggaaacactacatttgctcacagatgattcttctgaatgctcccgaactactgactttgaagaggtagcctcctgcctgccattaagcaggaatgtcatgttccagttcattacaaaagaaaacaataaaacaatgtgaatttttataataaaatgtgaactgatgtagcaaattacgcaaatgtgaagcctcttctgataacacttgttaggcctcttactgatgtcagtttcagtttgtaaaatatgtttcatgctttcagttcagcattgtgactcagtaattacagaaaatggcacaaatgtgcatgaccaatgtatgtctatgaacactgcattgtttcaggtggacattttatcattttcaaatgtttctcacaatgtatgttatagtattattattatatattgtgttcaaatgcattctaaagagacttttatatgaggtgaataaagaaaagcatgattagattagtctgta

SEQ ID NO: 309772 - DNA, 4311 bp, Homo sapiens
agcgggtaatccttcagctctggtggtaagggagatgcagtgagctcccggctgggagagagggttattttgcaaaactcccctggtaccgtgcccgcggaatattgcaggaggtctgtgaggtattaaaaagtgtcagcaaactgcattgaataacagacatcctaagaggggatattttccacctctataatgaagaaaagcaggagtgtgatgacggtgatggctgatgataatgttaaagattattttgaatgtagcttgagtaaatcctacagttcttccagtaacacacttgggatcgacctctggagagggagaaggtgttgctcaggaaacttacagttaccaccactgtctcaaagacagagtgaaagggcaaggactcctgagggagatggtatttccaggccgaccacactgcctttgacaacgcttccaagcattgctattacaactgtaagccaggagtgctttgatgtggaaaatggcccttccccaggtcggagtccactggatccccaggccagctcttccgctgggctggtacttcacgccacctttcctgggcacagccagcgcagagagtcatttctctacagatcagacagcgactatgacttgtcaccaaaggcgatgtcgagaaactcttctcttccaagcgagcaacacggcgatgacttgattgtaactccttttgcccaggtccttgccagcttgcgaagtgtgagaaacaacttcactatactgacaaaccttcatggtacatctaacaagaggtccccagctgctagtcagcctcctgtctccagagtcaacccacaagaagaatcttatcaaaaattagcaatggaaacgctggaggaattagactggtgtttagaccagctagagaccatacagacctaccggtctgtcagtgagatggcttctaacaagttcaaaagaatgctgaaccgggagctgacacacctctcagagatgagccgatcagggaaccaggtgtctgaatacatttcaaatactttcttagacaagcagaatgatgtggagatcccatctcctacccagaaagacagggagaaaaagaaaaagcagcagctcatgacccagataagtggagtgaagaaattaatgcatagttcaagcctaaacaatacaagcatctcacgctttggagtcaacactgaaaatgaagatcacctggccaaggagctggaagacctgaacaaatggggtcttaacatctttaatgtggctggatattctcacaatagacccctaacatgcatcatgtatgctatattccaggaaagagacctcctaaagacattcagaatctcatctgacacatttataacctacatgatgactttagaagaccattaccattctgacgtggcatatcacaacagcctgcacgctgctgatgtagcccagtcgacccatgttctcctttctacaccagcattagacgctgtcttcacagatttggagatcctggctgccatttttgcagctgccatccatgacgttgatcatcctggagtctccaatcagtttctcatcaacacaaattcagaacttgctttgatgtataatgatgaatctgtgttggaaaatcatcaccttgctgtgggtttcaaactgctgcaagaagaacactgtgacatcttcatgaatctcaccaagaagcagcgtcagacactcaggaagatggttattgacatggtgttagcaactgatatgtctaaacatatgagcctgctggcagacctgaagacaatggtagaaacgaagaaagttacaagttcaggcgttcttctcctagacaactataccgatcgcattcaggtccttcgcaacatggtacactgtgcagacctgagcaaccccaccaagtccttggaattgtatcggcaatggacagaccgcatcatggaggaatttttccagcagggagacaaagagcgggagaggggaatggaaattagcccaatgtgtgataaacacacagcttctgtggaaaaatcccaggttggtttcatcgactacattgtccatccattgtgggagacatgggcagatttggtacagcctgatgctcaggacattctcgataccttagaagataacaggaactggtatcagagcatgatacctcaaagtccctcaccaccactggacgagcagaacagggactgccagggtctgatggagaagtttcagtttgaactgactctcgatgaggaagattctgaaggacctgagaaggagggagagggacacagctatttcagcagcacaaagacgctttgtgtgattgatccagaaaacagagattccctgggagagactgacatagacattgcaacagaagacaagtcccccgtggatacataatccccctctccctgtggagatgaacattctatccttgatgagcatgccagctatgtggtagggccagcccaccatgggggccaagacctgcacaggacaagggccacctggcctttcagttacttgagtttggagtcagaaagcaagaccaggaagcaaatagcagctcaggaaatcccacggttgacttgccttgatggcaagcttggtggagagggctgaagctgttgctgggggccgattctgatcaagacacatggcttgaaaatggaagacacaaaactgagagatcattctgcactaagtttcgggaacttatccccgacagtgactgaactcactgactaataacttcatttatgaatcttctcacttgtccctttgtctgccaacctgtgtgccttttttgtaaaacattttcatgtctttaaaatgcctgttgaatacctggagtttagtatcaacttctacacagataagctttcaaagttgacaaacttttttgactctttctggaaaagggaaagaaaatagtcttccttctttcttgggcaatatccttcactttactacagttacttttgcaaacagacagaaaggatacacttctaaccacattttacttccttcccctgttgtccagtccaactccacagtcactcttaaaacttctctctgtttgcctgcctccaacagtacttttaactttttgctgtaaacagaataaaattgaacaaattagggggtagaaaggagcagtggtgtcgttcaccgtgagagtctgcatagaactcagcagtgtgccctgctgtgtcttggaccctgccccccacaggagttgtacagtccctggccctgttccctacctcctctcttcaccccgttaggctgttttcaatgtaatgctgccgtccttctcttgcactgccttctgcgctaacacctccattcctgtttataaccgtgtatttattacttaatgtatataatgtaatgttttgtaagttattaatttatatatctaacattgcctgccaatggtggtgttaaatttgtgtagaaaactctgcctaagagttacgactttttcttgtaatgttttgtattgtgtattatataacccaaacgtcacttagtagagacatatggcccccttggcagagaggacaggggtgggcttttgttcaaagggtctgccctttccctgcctgagttgctacttctgcacaacccctttatgaaccagttttggaaacaatattctcacattagatactaaatggtttatactgagcttttacttttgtatagcttgataggggcagggggcaatgggatgtagtttttacccaggttctatccaaatctatgtgggcatgagttgggttataactggatcctactatcattgtggctttggttcaaaaggaaacactacatttgctcacagatgattcttctgaatgctcccgaactactgactttgaagaggtagcctcctgcctgccattaagcaggaatgtcatgttccagttcattacaaaagaaaacaataaaacaatgtgaatttttataataaaatgtgaactgatgtagcaaattacgcaaatgtgaagcctcttctgataacacttgttaggcctcttactgatgtcagtttcagtttgtaaaatatgtttcatgctttcagttcagcattgtgactcagtaattacagaaaatggcacaaatgtgcatgaccaatgtatgtctatgaacactgcattgtttcaggtggacattttatcattttcaaatgtttctcacaatgtatgttatagtattattattatatattgtgttcaaatgcattctaaagagacttttatatgaggtgaataaagaaaagcatgattagattagtctgta

SEQ ID NO: 309773 - DNA, 2943 bp, Homo sapiens
  misc_feature (183)..(183): n is a, c, g, or t
  misc_feature (2870)..(2870): n is a, c, g, or t
  misc_feature (2872)..(2872): n is a, c, g, or t
  misc_feature (2879)..(2879): n is a, c, g, or t
  misc_feature (2900)..(2900): n is a, c, g, or t
atgacagcaaaagattcttcaaaggaacttactgcttctgaacctgaggtttgcataaagactttcaaggagcaaatgcatttagaacttgagcttccgagattaccaggaaacagacctacatctcctaaaatttctccacgcagttcaccaaggaactcaccatgctttttcagaaagttnctggtgaataaaagcattcggcagcgtcgtcgcttcactgtggctcatacatgctttgatgtggaaaatggcccttccccaggtcggagtccactggatccccaggccagctcttccgctgggctggtacttcacgccacctttcctgggcacagccagcgcagagagtcatttctctacagatcagacagcgactatgacttgtcaccaaaggcgatgtcgagaaactcttctcttccaagcgagcaacacggcgatgacttgattgtaactccttttgcccaggtccttgccagcttgcgaagtgtgagaaacaacttcactatactgacaaaccttcatggtacatctaacaagaggtccccagctgctagtcagcctcctgtctccagagtcaacccacaagaagaatcttatcaaaaattagcaatggaaacgctggaggaattagactggtgtttagaccagctagagaccatacagacctaccggtctgtcagtgagatggcttctaacaagttcaaaagaatgctgaaccgggagctgacacacctctcagagatgagccgatcagggaaccaggtgtctgaatacatttcaaatactttcttagacaagcagaatgatgtggagatcccatctcctacccagaaagacagggagaaaaagaaaaagcagcagctcatgacccagataagtggagtgaagaaattaatgcatagttcaagcctaaacaatacaagcatctcacgctttggagtcaacactgaaaatgaagatcacctggccaaggagctggaagacctgaacaaatggggtcttaacatctttaatgtggctggatattctcacaatagacccctaacatgcatcatgtatgctatattccaggaaagagacctcctaaagacattcagaatctcatctgacacatttataacctacatgatgactttagaagaccattaccattctgacgtggcatatcacaacagcctgcacgctgctgatgtagcccagtcgacccatgttctcctttctacaccagcattagacgctgtcttcacagatttggagatcctggctgccatttttgcagctgccatccatgacgttgatcatcctggagtctccaatcagtttctcatcaacacaaattcagaacttgctttgatgtataatgatgaatctgtgttggaaaatcatcaccttgctgtgggtttcaaactgctgcaagaagaacactgtgacatcttcatgaatctcaccaagaagcagcgtcagacactcaggaagatggttattgacatggtgttagcaactgatatgtctaaacatatgagcctgctggcagacctgaagacaatggtagaaacgaagaaagttacaagttcaggcgttcttctcctagacaactataccgatcgcattcaggtccttcgcaacatggtacactgtgcagacctgagcaaccccaccaagtccttggaattgtatcggcaatggacagaccgcatcatggaggaatttttccagcagggagacaaagagcgggagaggggaatggaaattagcccaatgtgtgataaacacacagcttctgtggaaaaatcccaggttggtttcatcgactacattgtccatccattgtgggagacatgggcagatttggtacagcctgatgctcaggacattctcgataccttagaagataacaggaactggtatcagagcatgatacctcaaagtccctcaccaccactggacgagcagaacagggactgccagggtctgatggagaagtttcagtttgaactgactctcgatgaggaagattctgaaggacctgagaaggagggagagggacacagctatttcagcagcacaaagacgctttgtgtgattgatccagaaaacagagattccctgggagagactgacatagacattgcaacagaagacaagtcccccgtggatacataatccccctctccctgtggagatgaacattctatccttgatgagcatgccagctatgtggtagggccagcccaccatgggggccaagacctgcacaggacaagggccacctggcctttcagttacttgagtttggagtcagaaagcaagaccaggaagcaaatagcagctcaggaaatcccacggttgacttgccttgatggcaagcttggtggagagggctgaagctgttgctgggggccgattctgatcaagacacatggcttgaaaatggaagacacaaaactgagagatcattctgcactaagtttcgggaacttatccccgacagtgactgaactcactgactaataacttcatttatgaatcttctcacttgtccctttgtctgccaacctgtgtgccttttttgtaaaacattttcatgtctttaaaatgcctgttgaatacctggagtttagtatcaacttctacacagataagctttcaaagttgacaaacttttttgactctttctggaaaagggaaagaaaatagtcttccttctttcttgggcaatatccttcactttactacagttacttttgcaaacagacagaaaggatacacttctaaccacattttacttccttcccctgttgtccagtccaactccacagtcactcttaaaacttctctctgtttgcctgcctccaacagagagaagncntaagagngactgtggagttggactggcnacaggggaaggaagtaaaatgtggttagaagtgtatccgtcga

SEQ ID NO: 309774 - DNA, 3209 bp, Homo sapiens
  misc_feature (3209)..(3209): n is a, c, g, or t
gaattcctcctctcttcaccccgttagctgttttcaatgtaatgctgccgtccttctcttgcactgccttctgcgctaacacctccattcctgtttataaccgtgtatttattacttaatgtatataatgtaatgttttgtaagttattaatttatatatctaacattgcctgccaatggtggtgttaaatttgtgtagaaaactctgcctaagagttacgactttttcttgtaatgttttgtattgtgtattatataacccaaacgtcacttagtagagacatatggcccccttggcagagaggacaggggtgggcttttgttcaaagggtctgccctttccctgcctgagttgctacttctgcacaacccctttatgaaccagttttcacccgaattttgactgtttcatttagaagaaaagcaaaatgagaaaaagctttcctcatttctccttgagatggcaaagcactcagaaatgacatcacataccctaaagaaccctgggatgactaaggcagagagagtctgagaaaactctttggtgcttctgcctttagttttaggacacatttatgcagatgagcttataagagaccgttccctccgccttcttcctcagaggaagtttcttggtagatcaccgacacctcatccaggcggggggttggggggaaacttggcaccagccatcccaggcagagcaccactgtgatttgttctcctggtggagagagctggaaggaaggagccagcgtgcaaataatgaaggagcacgggggcaccttcagtagcaccggaatcagcggtggtagcggtgactctgctatggacagcctgcagccgctccagcctaactacatgcctgtgtgtttgtttgcagaagaatcttatcaaaaattagcaatggaaacgctggaggaattagactggtgtttagaccagctagagaccatacagacctaccggtctgtcagtgagatggcttctaacaagttcaaaagaatgctgaaccgggagctgacacacctctcagagatgagccgatcagggaaccaggtgtctgaatacatttcaaatactttcttagacaagcagaatgatgtggagatcccatctcctacccagaaagacagggagaaaaagaaaaagcagcagctcatgacccagataagtggagtgaagaaattaatgcatagttcaagcctaaacaatacaagcatctcacgctttggagtcaacactgaaaatgaagatcacctggccaaggagctggaagacctgaacaaatggggtcttaacatctttaatgtggctggatattctcacaatagacccctaacatgcatcatgtatgctatattccaggaaagagacctcctaaagacattcagaatctcatctgacacatttataacctacatgatgactttagaagaccattaccattctgacgtggcatatcacaacagcctgcacgctgctgatgtagcccagtcgacccatgttctcctttctacaccagcattagacgctgtcttcacagatttggagatcctggctgccatttttgcagctgccatccatgacgttgatcatcctggagtctccaatcagtttctcatcaacacaaattcagaacttgctttgatgtataatgatgaatctgtgttggaaaatcatcaccttgctgtgggtttcaaactgctgcaagaagaacactgtgacatcttcatgaatctcaccaagaagcagcgtcagacactcaggaagatggttattgacatggtgttagcaactgatatgtctaaacatatgagcctgctggcagacctgaagacaatggtagaaacgaagaaagttacaagttcaggcgttcttctcctagacaactataccgatcgcattcaggtccttcgcaacatggtacactgtgcagacctgagcaaccccaccaagtccttggaattgtatcggcaatggacagaccgcatcatggaggaatttttccagcagggagacaaagagcgggagaggggaatggaaattagcccaatgtgtgataaacacacagcttctgtggaaaaatcccaggtatctaatatgagattttcaaagtttttgtgagctctgctgattatagagctggagggttctatttaattccgtttttccaatagaatatgtatatatgaaacaataaggagacaactacgcattttgttccattatagtcaggactcatgcgacttctccattacactcagtttcacagggtggggaaaagtagtcatcagaaacccatcaaaatttggactatgtgtccctaaatcatttagatagttgtctctgatgttagcaaatccagctgaataatatgaacatcagtgtctcctccatcccaaccctctggatttctcctagctctgtcttcattcaagaactctactcctcatccttgcttccagccctctgtttttatcttctgtccttaatcaagcccatggtgaccatcaccagaggcagtctcttttactgcatagtcaaagccctgtcttgtcttccctcccaaggatgcttctatgcttttgagaacatgctgacattttctggttgtgtccaaagcaacacattctgtgtgtgctcaggacaggggacaatagtctggaggggtgaatacagaaatgtccagatgccaatagctgcagaatatgcagcaatggaaagtatcagtatccatacaaagatttttcaagaaaacgaatgggctgagccaagtagctgagattgagaatgagttcatagactgtccaagatctttatcccaaaaacatttggattgtttattttcagtatttatcctctttccctactacctggatactccaaatttgcatatacttgtaatattaatatacagttcctttgcaatatttattttgttgcttcttagagaaacccaactaaatgagtttaaaaaatctgtgaaagggctgggcacagtggctcatgcctgtaatccagcactttgggaggctgaggtggacggatcacctgaggtcaggagttcaaaaccagcctggccaacatggtgaaaccctgtctctaccaaaaacacacaaaaaattggtcgagcatggtagtgtgtgcctgtagtcccagctactcgggaagctgagacaggcattccaagctgggcaacagaacan

SEQ ID NO: 309775 - DNA, 892 bp, Homo sapiens
agcgggtaatccttcagctctggtggtaagggagatgcagtgagctcccggctgggagagagggttattttgcaaaactcccctggtaccgtgcccgcggaatattgcaggaggtctgtgaggtattaaaaagtgtcagcaaactgcattgaataacagacatcctaagaggggatattttccacctctataatgaagaaaagcaggagtgtgatgacggtgatggctgatgataatgttaaagattattttgaatgtagcttgagtaaatcctacagttcttccagtaacacacttgggatcgacctctggagagggagaaggtgttgctcaggaaacttacagttaccaccactgtctcaaagacagagtgaaagggcaaggactcctgagggagatggtatttccaggccgaccacactgcctttgacaacgcttccaagcattgctattacaactgtaagccaggagtgctttgatgtggaaaatggcccttccccaggtcggagtccactggatccccaggccagctcttccgctgggctggtacttcacgccacctttcctgggcacagccagcgcagagagtcatttctctacagatcagacagcgactatgacttgtcaccaaaggcgatgtcgagaaactcttctcttccaagcgagcaacacggcgatgacttgattgtaactccttttgcccaggtccttgccagcttgcgaagtgtgagaaacaacttcactatactgacaaaccttcatggtacatctaacaagaggtccccagctgctagtcagcctcctgtctccagagtcaacccacaaggtaggccatgtcataaggtctatctagatgtttcaagatagaataataaacatgcctcttattcag

SEQ ID NO: 309776 - DNA, 760 bp, Homo sapiens
gatgtaattcatgactggcattcttcatgaccttttacattcaattgggttgacttatgcacattctgatagctgagtcttcctgatctggccttcagtgatgataaccaaagggcagaggagttttccctgagactgttttccagctgtcactaatgggccagtaagcagcaaggggagagacagggacattgaactagagtgatctctattcacttgtggccacctttgaaagcaacattggttgaagactgatgcatgtccaatataggtcagcaactaaatttataaatagatactttcccttttcagaataaaaaatgttcagaaacttgtagctatcatgaagaggacacccgacctcctaggtcatttaactttcagattttcacacaactaaagcactctaaggagacactctaaagacttaaacagccaatgtccaaaaaataaattaaaaaaatgaggcatgttagcacaactttccttattcctaaattcctttaaatttttaattataggagctggaagacctgaacaaatggggtcttaacatctttaatgtggctggatattctcacaatagacccctaacatgcatcatgtatgctatattccaggtgagtgaacaggagtgaatactggctttccaattggatggctctttatgattttttttttccatcttacttttctgatttaactttcctcgacttttggacatctacttatttatgttctaatccattttacaacacag

SEQ ID NO: 309777 - DNA, 332 bp, Homo sapiens
tggtggagagagctggaaggaaggagccagcgtgcaaataatgaaggagcacgggggcaccttcagtagcaccggaatcagcggtggtagcggtgactctgctatggacagcctgcagccgctccagcctaactacatgcctgtgtgtttgtttgcagaagaatcttatcaaaaattagcaatggaaacgctggaggaattagactggtgtttagaccagctagagaccatacagacctaccggtctgtcagtgagatggcttctaacaaggtaagagatgatctttttattcattaaagtgtgatcatgcagggagctccagctcccctca

SEQ ID NO: 309778 - DNA, 2943 bp, Homo sapiens
aagaagaatttggaataatcaagtcctataatttaaagcccggtggtgataaaatttcagttaccaatcaaaatagaaaagaatatgtacagctttatactgacttccttctgaacaaatccatctataagcagtttgctgcattttattatggatttcatagtgtgtgtgcttcaaatgccctaatgctgcttcgtccagaagaggttgaaattttggtctgtggaagtcctgacctggatatgcatgctctgcagagaagtactcagtatgatggctatgcaaaaacggacttaactataaaatacttttgggatgttgtgcttggatttcctcttgatcttcaaaagaagttgctacattttactacagggagtgacagagtacctgtaggagggatggctgatttgaactttaaaatctcaaagaatgaaacttctactaactgcttacctgtggcccatacctgcttcaatcaactttgccttcccccctacaagagcaaaaaggatctgaaacagaaattgatcattggaatttcaaattcagaaggttttggacttgagtaacctagaagacttgaaatataatcttttatatgtagcattcacttccctcttactgtgcctttagccttttcatgtttctgtctcaaaacactttgacaaagctcaccaactttaaaatattaagtttttaaaaaatcaaatatgaagtatgttcagcaaaggcataattttctaaaaacacacacagaaatcgcttgagtgaggaaaagtccacatggcagagacaggtatggtccagttcctcttttatatagcactttatcattctccacaagtagtttgtcacaggcattccactgggaaagcaaagtacagtgaagaatgaatttatggtatagttgaacccagtggcagattgtacactgctagcactgctagcacacagtagcaaagcaaacagctacattatctttaacataaggcatgtagccatattttcatatagtggtatacaacacagtatcattgcaaatgcagtttacagggatttttgatatactggcttgggacctataagattcttctcagcagttgctgaaaagcatgtaaataactacataatagcctgagaataatgggattttgatagtgccatttattgttaaagatttatttttacaaagtaaattcagggttttagatgtgtacacagcttttacaaatcaataaagatgattgtacaagagtattttcagactaattggattcaaggttatattcttttaagtgttgttagtctgcatgcacattggcagtaaactagttacttgtgtactctgtaatatttgtataatgatcatttcttcttaaggctcaagatattagaaaagaaatcagacctaaataatcattgatgaagtatgtcagttacaagcacaaaagaatataactgcttttataaatcttttgaatcatgtacaagacttatatctacattttttgatcaccagttgtaccaaaacactaatttttgaaaaagataggttaaagtatttgacaaaagtgaatacaataataacacttgtgtcaaaatgatatagcttagtataaaaataaaattcaacgttttggccaaaatgtttgtttttcactggattctgaatataataaattcaaagtaccctttttttagagtttctaataaagtagtatgtaaaaagaaactgcattttaagtcagacagtaaatgttttttttaatttacagcaaatgaagcagttttattagcatgttacaaatattgccaaaccaagacttctctaccatactttaacagctttccttcagaaaactctgaagttatatttgcaataataatgaaaccagcatttagtaccagcatatggttcatatgcaaataatactttccccaaaatctttctgggctaggctattttcttgctatgcttcctgcacccaaccagcagaattcttccagggtggaggaactaatcagcttgttctccaacagttctgaagccaacccacaaatctttgaggaaaaggggtcactttgtttactattctcttggagatggaagtgattctgctcttccatttgggtatattatttcaagggtatttcttcttaaaaatcttggaaagcctaagagagttaaaggcatcctggttttgtttcattttgctctgttttaaatccatatgcaaataaaactgcttctctcttacactgcttgaactagaaaatcagctttttaatgtaggttaccacttataagcacaaaagaaacatgtataagaaaccagatttaagtgttttaaataaaatgtaaacagtttttatttggtagagatgactcatggaaaaattgtgttggcttggtctgcatgtttaatgatgtgcttgtatatcgattagctgtgtcacttttaaataagaagtccacacaagcaagccaaatttttagatgacgaagtccataaataactagagaatttttgttatctgttgttaagttgaaatgtataatcatttatcactaaattgcacattgcctttatttatttgtgctctgtttttggtttacagtgtaataatacctcatttaaaaaataaaaaccactactgttacattttattaatttaaaaagctagaaaattcatgtagttactttttttacatatataatctgttaatgaattattgatttttgtatctgccacagtaaattaaagcattacacagtatttatcagtattttttaaacatcctgtccttttttaaaatctttgcttagtcagtcatatttttgtctgtatgattagaagtttttacgtccttccttttttgtacaaatctgtattgtattaatttctggatgcaatttttcaaatattaaaattatacagtca

SEQ ID NO: 309779 - DNA, 1319 bp, Homo sapiens
  misc_feature (117)..(117): n is a, c, g, or t
tgacccttcggttgagatcttagtaggaccccgtcaatgacgaacgaaaacagctttttaatgtaggttaccacttataagcacaaaagaaacatgtataagaaaccagatttaagngttttaaataaaatgtaaacagtttttatttggtagagatgactcatggaaaaattgtgttgccagggggcttccgccaagacttctctaccatactttaacagctttccttcagaaaactctgaagttatatttgcaataataatgaaaccagcatttagtaccagcatatggttcatatgcaaataatactttccccaaaatctttctgggctaggctattttcttgctatgcttcctgcacccaaccagcagaattcttccagggtggaggaactaatcagcttgttctccaacagttctgaagccaacccacaaatctttgaggaaaaggggtcactttgtttactattctcttggagatggaagtgattctgctcttccatttgggtatattatttcaagggtatttcttcttaaaaatcttggaaagcctaagagagttaaaggcatcctggttttgtttcattttgctctgttttaaatccatatgcaaataaaactgcttctctcttacactgcttgaactagaaaatcagctttttaatgtaggttaccacttataagcacaaaagaaacatgtataagaaaccagatttaagtgttttaaataaaatgtaaacagtttttatttggtagagatgactcatggaaaaattgtgttggcttggtctgcatgtttaatgatgtgcttgtatatcgattagctgtgtcacttttaaataagaagtccacacaagcaagccaaatttttagatgacgaagtccataaataactagagaatttttgttatctgttgttaagttgaaatgtataatcatttatcactaaattgcacattgcctttatttatttgtgctctgtttttggtttacagtgtaataatacctcatttaaaaaataaaaaccactactgttacattttattaatttaaaaagctagaaaattcatgtagttactttttttacatatataatctgttaatgaattattgatttttgtatctgccacagtaaattaaagcattacacagtatttatcagtattttttaaacatcctgtccttttttaaaatctttgcttagtcagtcatatttttgtctgtatgattagaagtttttacgtccttccttttttgtacaaatctgtattgtattaatttctggatgcaatttttcaaatattaaaattatacagtca

SEQ ID NO: 309780 - DNA, 1152 bp, Homo sapiens
cgggaccacagccggggaggcggggtccttctctggggcggtcgcgttggcagcggatgcgggaagccggactctgggcgtcatgtactacaagtttagtggcttcacgcagaagttggcaggagcatgggcttcggaggcctatagcccgcagggattaaagcctgtggtttccacagaagcaccacctatcatatttgccacaccaactaaactgacctccgattccacagtgtatgattatgctgggaaaaacaaagttccagagctacaaaagtttttccagaaagctgatggtgtgcccgtctacctgaaacgaggcctgcctgaccaaatgctttaccggaccaccatggcgctgactgtgggagggaccatctactgcctgatcgccctctacatggcttcgcagcccaaaaacaaatgagttaggctgcagaggactggtttgttttttggcataaaccctttgaagttcctttttcattgttaaattaaaatttttttttttacttggatggcttaacatttttgcaagaaaaataggaagatatgaagatgatgtttggtttgtttatgaaatgcatatggcttgtcagagctcattcgacagttaaagccattgtttaaagaaacggtgctttgctctgtgtttgtgctcctgatttccctggaggttctggatgaaggctgaacacaggcttgttaatgtcagtctgtgctgaggacctcagggacttgaggttgcatttttgagcatggggtgcaggagcctttctggatttggatgtggctatggaaagaacacagaagccaaggtcatgtgcatgaaatgaggagtttgagttagtcacctcggggattttttccattttgcagtaaaatgttaaattaatgtagcctgcctctatttgttgggcaggtaatttcaaagggttatttgcctcatctcctatctttagtgaaatcttatgtgtaattgtgtgtatttattccaccgtgggaacagagaatacctgtttagtgttgcactttagactggtgtctgttttgttaatgcagctgtgccacaaattctcctttatcttttaaaaatgttatagctttaaattttgatttattttgactgtggaataaatacatgaatgaaaa

SEQ ID NO: 309781 - DNA, 834 bp, Homo sapiens
  misc_feature (783)..(783): n is a, c, g, or t
cgggaccacagccggggaggcggggtccttctctggggcggtcgcgttggcagcggatgcgggaagccggactctgggcgtcatgtactacaagtttagtggcttcacgcagaagttggcaggagcatgggcttcggaggcctatagcccgcagggattaaagcctgtggtttccacagaagcaccacctatcatatttgccacaccaactaaactgacctccgattccacagtgtatgattatgctgggaaaaacaaagttccagagctacaaaagtttttccagaaagctgatggtgtgcccgtctacctgaaacgaggcctgcctgaccaaatgctttaccggaccaccatggcgctgactgtgggagggaccatctactgcctgatcgccctctacatggcttcgcagcccaaaaacaaatgagttaggctgcagaggactggtttgttttttggcataaaccctttgaagttcctttttcattgttaaattaaaatttttttttttacttggatggcttaacatttttgcaagaaaaataggaagatatgaagatgatgtttggtttgtttatgaaatgcatatggcttgtcagagctcattcgacagttaaagccattgtttaaagaaacggtgctttgctctgtgtttgtgctcctgatttccctggaggttctggatgaaggctgaacacaggcttgttaatgtcagtctgtgctgaggacctcagggacttgaggttgcatttttgagcatggggtgcaggagcctttctgaancctgcccttgccgaattccacacactgcgccgtactatttatcgagctcgt

SEQ ID NO: 309782 - DNA, 473 bp, Homo sapiens
cgggaccacagccggggaggcggggtccttctctggggcggtcgcgttggcagcggatgcgggaagccggactctgggcgtcatgtactacaagtttagtggcttcacgcagaagttggcaggagcatgggcttcggaggcctatagcccgcagggattaaagcctgtggtttccacagaagcaccacctatcatatttgccacaccaactaaactgacctccgattccacagtgtatgattatgctgggaaaaacaaagttccagagctacaaaagtttttccagtgcatataacctacagcaagcgagcatggcagctggctgcacggactccggaggcgggagtacctggcttcaactcgtaactcagccagtcggcttctgtgtacctcaagtttcttcatctgtgaaatggagataatcgaatttagtattttgaaaagattgagttaatacatgttaaacacatgaa

SEQ ID NO: 309783 - DNA, 844 bp, Homo sapiens
cgccaacagcatggcggttgcatccccaggaagcaggcccgcagcgccaggagggggtttcctgaggacagaggcccttgtcctgattgtcgcagcaggccctgtcgatggacttaactgtgaaaatcaccctttcaggggtggatgcaaggacttctgagggcggagaagtagataccttcctggatagctgtggagccggggtcctgcatttccctctggcgtctctgctgactgagatgtgaagcagtcggcccatgtcccgagaagaggttggccacaactctgtgccacatcctcttcattttagaatccaggatgaaggatatgcccttatctgggcacttctccttgctgctgccatgtgaagaaggacatgtttgcttccccttctgcataattgactggtggcctcacaagaagagacaagaagaaagctgtctctgtgcacacacaccgaggaaaagccatgtgagcacacagcgaaaaggcagccgagcccacaagccaggaagagagccctgcaccccagaactcaactgtgagaacatacattcctgttgtttaagccaccagtctgtggtattttatggcagcccaagctaagacacgctaggaagaagaaccactatagtgttaactgtaatgggcagaatggccctttagtcacccttcctgtggcctaacacttggacactgtcacttaagaggcccctcacatctacgcaggaggtgattaaagaacattctaaattacctggtaatttgggggtgtaagtacatgaaagcatttttaaaattctaatttgtatgtttttggtggactttgtgtaatttctttctt

SEQ ID NO: 309784 - DNA, 489 bp, Homo sapiens
acaccaataggtttaaattgaacattagggactgaggacttctgtgcccatggtcagagaaggcaggaagaacaggcatttgctggcagcaggtgccacagtgaaccagcctagcggttcctctgccccatgctgtggttgtagggatagtagggaaggatttgtgcataatccccccttcacctcttgacacgattcaaagtccaaagcctcatcatcaccttctcttctgccagtcttaagttcttctactggaagtttaaccgatttcattcttattaacaaccattgttattttacagtgcatataacctacagcaagcgagcatggcagctggctgcacggactccggaggcgggagtacctggcttcaactcgtaactcagccagtcggcttctgtgtacctcaagtttcttcatctgtgaaatggagataatcgaatttagtattttgaaaagattgagttaatacatgttaaacacatgaa

SEQ ID NO: 309785 - DNA, 2325 bp, Homo sapiens
cgggaccacagccggggaggcggggtccttctctggggcggtcgcgttggcagcggatgcgggaagccggactctgggcgtcatgtactacaagtttagtggcttcacgcagaagttggcaggagcatgggcttcggaggcctatagcccgcagggattaaagcctgtggtttccacagaagcaccacctatcatatttgccacaccaactaaactgacctccgattccacagtgtatgattatgctgggaaaaacaaagttccagagctacaaaagtttttccagaaagctgatggtgtgcccgtctacctgaaacgaggcctgcctgaccaaatgctttaccggaccaccatggcgctgactgtgggagggaccatctactgcctgatcgccctctacatggcttcgcagcccaaaaacaaatgagttaggctgcagaggactggtttgttttttggcataaaccctttgaagttcctttttcattgttaaattaaaatttttttttttacttggatggcttaacatttttgcaagaaaaataggaagatatgaagatgatgtttggtttgtttatgaaatgcatatggcttgtcagagctcattcgacagttaaagccattgtttaaagaaacggtgctttgctctgtgtttgtgctcctgatttccctggaggttctggatgaaggctgaacacaggcttgttaatgtcagtctgtgctgaggacctcagggacttgaggttgcatttttgagcatggggtgcaggagcctttctggatttggatgtggctatggaaagaacacagaagccaaggtcatgtgcatgaaatgaggagtttgagttagtcacctcggggattttttccattttgcagtaaaatgttaaattaatgtagcctgcctctatttgttgggcaggtaatttcaaagggttatttgcctcatctcctatctttagtgaaatcttatgtgtaattgtgtgtatttattccaccgtgggaacagagaatacctgtttagtgttgcactttagactggtgtctgttttgttaatgcagctgtgccacaaattctcctttatcttttaaaaatgttatagctttaaattttgatttattttgactgtggaataaatacatgaatgaaaattttaagtttgaagttctttgaatgacctttcagagtaatttcagaacaccagcagcatcttaaacctgagtctaatttctttcttgttaattaggcaccagataatctttataaaatggttcttaaaagtctagtaataggagtcttaatggcatattgatgattaccacatggttttttataaaaacctgcctgccccttagtgaaaggtacctgtaactcacagttcatttagacactaatttcctttgctgtcatgattggtagacttcacttaccctatattaattttgaaaaaaggtggaattttattatatatgaaggaatagtttgtatcttaccatagcacagaacagtgacctcttgctcaggataagatgtggtgatttgaaaatactcaatagtagccttgcagtgatatctctctctctctctctctgcaaatctaaattttattctctggtatttcctccaagtttttattttgaaaattttcagactacagaaggactaagcatagtacaatatacacctgtatatccttcacttagatcaccagttatcaatatattggcacctttgctttttcttgttctctcacacaggcacacacaatgcatatatgcacacacacatagatctgttttttgttgagtcatttaagattgttagggaattatgataaatcagccatagtactttagcaggtatcttctgagtaaggacatgtgttcctttataaccataatgcagttgtcagactcaataaagttaacatttataacaatactaccatctaatacatagtttactttcagatttccccaggtgttctaataatgagttcttcatagttgtgtttttaaaaaataacagctttattgggatataatttacatactgtacagttcacctcaagtgtacaattcattggtttttactgtatttggagttgtacagccaccatgagaatcaattttagaacacttatatcaccctaaaaagaaaccccatacccattagcaatcacttgccttccctcccaccatcccaactcccacctcctagcccaaagcaagcactcatctactttcagtctctatggatttgtctttcctggacatttcatataaatataatcatatgatgtgtgatgtacgtgactggcttct

SEQ ID NO: 309786 - DNA, 1228 bp, Homo sapiens
  misc_feature (1007)..(1007): n is a, c, g, or t
  misc_feature (1012)..(1012): n is a, c, g, or t
  misc_feature (1017)..(1017): n is a, c, g, or t
  misc_feature (1021)..(1021): n is a, c, g, or t
  misc_feature (1024)..(1024): n is a, c, g, or t
cgggaccacagccggggaggcggggtccttctctggggcggtcgcgttggcagcggatgcgggaagccggactctgggcgtcatgtactacaagtttagtggcttcacgcagaagttggcaggagcatgggcttcggaggcctatagcccgcagggattaaagcctgtggtttccacagaagcaccacctatcatatttgccacaccaactaaactgacctccgattccacagtgtatgattatgctgggaaaaacaaagttccagagctacaaaagtttttccagaaagctgatggtgtgcccgtctacctgaaacgaggcctgcctgaccaaatgctttaccggaccaccatggcgctgactgtgggagggaccatctactgcctgatcgccctctacatggcttcgcagcccaaaaacaaatgagttaggctgcagaggactggtttgttttttggcataaaccctttgaagttcctttttcattgttaaattaaaatttttttttttacttggatggcttaacatttttgcaagaaaaataggaagatatgaagatgatgtttggtttgtttatgaaatgcatatggcttgtcagagctcattcgacagttaaagccattgtttaaagaaacggtgctttgctctgtgtttgtgctcctgatttccctggaggttctggatgaaggctgaacacaggcttgttaatgtcagtctgtgctgaggacctcagggacttgaggttgcatttttgagcatggggtgcaggagcctttctggatttggatgtggctatggaaagaacacagaagccaaggtcatgtgcatgaaatgaggagtttgagttagtcacctcggggattttttccattttgcagtaaaatgttaaattaatgtagcctgcctctatttgttgggcaggtaatttcaaagggttatttgcctcatctcctatctttagtgaaatcttatgtgtaattgtgtgtatttattccccggggaccanaaacngttangtgnctnaacgggctgttggtatgcgtgggccaattcctttttttaaagtagagctaattggatttgcgggcgaaactttatagcacaaaaaggcgcgcattcctagggcggaaggcacattatagggcacgtaataataaaacggcagagaacagaattggtctgtgtcgtcaacacattctatgtcgtgtagaatgctagagcattgta

SEQ ID NO: 309787 - DNA, 973 bp, Homo sapiens
cgggaccacagccggggaggcggggtccttctctggggcggtcgcgttggcagcggatgcgggaagccggactctgggcgtcatgtactacaagtttagtggcttcacgcagaagttggcaggagcatgggcttcggaggcctatagcccgcagggattaaagcctgtggtttccacagaagcaccacctatcatatttgccacaccaactaaactgacctccgattccacagtgtatgattatgctgggaaaaacaaagttccagagctacaaaagtttttccagaaagctgatggtgtgcccgtctacctgaaacgaggcctgcctgaccaaatgctttaccggaccaccatggcgctgactgtgggagggaccatctactgcctgatcgccctctacatggcttcgcagcccaaaaacaaatgagttaggctgcagaggactggtttgttttttggcataaaccctttgaagttcctttttcattgttaaattaaaatttttttttttacttggatggcttaacatttttgcaagaaaaataggaagatatgaagatgatgtttggtttgtttatgaaatgcatatggcttgtcagagctcattcgacagttaaagccattgtttaaagaaacggtgctttgctctgtgtttgtgctcctgatttccctggaggttctggatgaaggctgaacacaggcttgttaatgtcagtctgtgctgaggacctcagggacttgaggttgcatttttgagcatggggtgcaggagcctttctggatttggatgtggctatggaaagaacacagaagccaaggtcatgtgcatgaaatgaggagtttgagttagtcacctcggggatttttcccttgccgtaacctgtaattatgttctgccctattggggcggaaattcaaaggtattgccaactccatctagaacctggtaggtgttttccccgggacaaaaacc

SEQ ID NO: 309788 - DNA, 1304 bp, Homo sapiens
cgggaccacagccggggaggcggggtccttctctggggcggtcgcgttggcagcggatgcgggaagccggactctgggcgtcatgtactacaagtttagtggcttcacgcagaagttggcaggagcatgggcttcggaggcctatagcccgcaggtacgagtggcgcctggccagctcggacatgagaagtggcggccctagcctcggcgacaggcagtcgcggcgttggagccaggggaggcttctgcccgcggtcgagttcgtctctgttctccttgcacctcccggggcctctccacaccagcggattaaagcctgtggtttccacagaagcaccacctatcatatttgccacaccaactaaactgacctccgattccacagtgtatgattatgctgggaaaaacaaagttccagagctacaaaagtttttccagaaagctgatggtgtgcccgtctacctgaaacgaggcctgcctgaccaaatgctttaccggaccaccatggcgctgactgtgggagggaccatctactgcctgatcgccctctacatggcttcgcagcccaaaaacaaatgagttaggctgcagaggactggtttgttttttggcataaaccctttgaagttcctttttcattgttaaattaaaatttttttttttacttggatggcttaacatttttgcaagaaaaataggaagatatgaagatgatgtttggtttgtttatgaaatgcatatggcttgtcagagctcattcgacagttaaagccattgtttaaagaaacggtgctttgctctgtgtttgtgctcctgatttccctggaggttctggatgaaggctgaacacaggcttgttaatgtcagtctgtgctgaggacctcagggacttgaggttgcatttttgagcatggggtgcaggagcctttctggatttggatgtggctatggaaagaacacagaagccaaggtcatgtgcatgaaatgaggagtttgagttagtcacctcggggattttttccattttgcagtaaaatgttaaattaatgtagcctgcctctatttgttgggcaggtaatttcaaagggttatttgcctcatctcctatctttagtgaaatcttatgtgtaattgtgtgtatttattccaccgtgggaacagagaatacctgtttagtgttgcactttagactggtgtctgttttgttaatgcagctgtgccacaaattctcctttatcttttaaaaatgttatagctttaaattttgatttattttgactgtggaataaatacatgaatgaaaa

SEQ ID NO: 309789 - DNA, 1608 bp, Homo sapiens
cgccaacagcatggcggttgcatccccaggaagcaggcccgcagcgccaggagggggtttcctgaggacagaggcccttgtcctgattgtcgcagcaggccctgtcgatggacttaactgtgaaaatcaccctttcaggggtggatgcaaggacttctgagggcggagaagtagataccttcctggatagctgtggagccggggtcctgcatttccctctggcgtctctgctgactgagatgtgaagcagtcggcccatgtcccgagaagaggttggccacaactctgtgccacatcctcttcattttagaatccaggatgaaggatatgcccttatctgggcacttctccttgctgctgccatgtgaagaaggacatgtttgcttccccttctgcataattgactggtggcctcacaagaagagacaagaagaaagctgtctctgtgcacacacaccgaggaaaagccatgtgagcacacagcgaaaaggcagccgagcccacaagccaggaagagagccctgcaccccagaactcaactgtgagaacatacattcctgttgtttaagccaccagtctgtggtattttatggcagcccaagctaagacaggattaaagcctgtggtttccacagaagcaccacctatcatatttgccacaccaactaaactgacctccgattccacagtgtatgattatgctgggaaaaacaaagttccagagctacaaaagtttttccagaaagctgatggtgtgcccgtctacctgaaacgaggcctgcctgaccaaatgctttaccggaccaccatggcgctgactgtgggagggaccatctactgcctgatcgccctctacatggcttcgcagcccaaaaacaaatgagttaggctgcagaggactggtttgttttttggcataaaccctttgaagttcctttttcattgttaaattaaaatttttttttttacttggatggcttaacatttttgcaagaaaaataggaagatatgaagatgatgtttggtttgtttatgaaatgcatatggcttgtcagagctcattcgacagttaaagccattgtttaaagaaacggtgctttgctctgtgtttgtgctcctgatttccctggaggttctggatgaaggctgaacacaggcttgttaatgtcagtctgtgctgaggacctcagggacttgaggttgcatttttgagcatggggtgcaggagcctttctggatttggatgtggctatggaaagaacacagaagccaaggtcatgtgcatgaaatgaggagtttgagttagtcacctcggggattttttccattttgcagtaaaatgttaaattaatgtagcctgcctctatttgttgggcaggtaatttcaaagggttatttgcctcatctcctatctttagtgaaatcttatgtgtaattgtgtgtatttattccaccgtgggaacagagaatacctgtttagtgttgcactttagactggtgtctgttttgttaatgcagctgtgccacaaattctcctttatcttttaaaaatgttatagctttaaattttgatttattttgactgtggaataaatacatgaatgaaaa

SEQ ID NO: 309790 - DNA, 1076 bp, Homo sapiens
cagggaggtcgggagatggacggaaactgctggggatgtgagaagcctggggcactaactggagttgttattgacttgggattaaagcctgtggtttccacagaagcaccacctatcatatttgccacaccaactaaactgacctccgattccacagtgtatgattatgctgggaaaaacaaagttccagagctacaaaagtttttccagaaagctgatggtgtgcccgtctacctgaaacgaggcctgcctgaccaaatgctttaccggaccaccatggcgctgactgtgggagggaccatctactgcctgatcgccctctacatggcttcgcagcccaaaaacaaatgagttaggctgcagaggactggtttgttttttggcataaaccctttgaagttcctttttcattgttaaattaaaatttttttttttacttggatggcttaacatttttgcaagaaaaataggaagatatgaagatgatgtttggtttgtttatgaaatgcatatggcttgtcagagctcattcgacagttaaagccattgtttaaagaaacggtgctttgctctgtgtttgtgctcctgatttccctggaggttctggatgaaggctgaacacaggcttgttaatgtcagtctgtgctgaggacctcagggacttgaggttgcatttttgagcatggggtgcaggagcctttctggatttggatgtggctatggaaagaacacagaagccaaggtcatgtgcatgaaatgaggagtttgagttagtcacctcggggattttttccattttgcagtaaaatgttaaattaatgtagcctgcctctatttgttgggcaggtaatttcaaagggttatttgcctcatctcctatctttagtgaaatcttatgtgtaattgtgtgtatttattccaccgtgggaacagagaatacctgtttagtgttgcactttagactggtgtctgttttgttaatgcagctgtgccacaaattctcctttatcttttaaaaatgttatagctttaaattttgatttattttgactgtggaataaatacatgaatgaaaa

SEQ ID NO: 309791 - DNA, 1095 bp, Homo sapiens
cgggaccacagccggggaggcggggtccttctctggggcggtcgcgttggcagcggatgcgggaagccggactctgggcgtcatgtactacaagtttagtggcttcacgcagaagttggcagaagcaccacctatcatatttgccacaccaactaaactgacctccgattccacagtgtatgattatgctgggaaaaacaaagttccagagctacaaaagtttttccagaaagctgatggtgtgcccgtctacctgaaacgaggcctgcctgaccaaatgctttaccggaccaccatggcgctgactgtgggagggaccatctactgcctgatcgccctctacatggcttcgcagcccaaaaacaaatgagttaggctgcagaggactggtttgttttttggcataaaccctttgaagttcctttttcattgttaaattaaaatttttttttttacttggatggcttaacatttttgcaagaaaaataggaagatatgaagatgatgtttggtttgtttatgaaatgcatatggcttgtcagagctcattcgacagttaaagccattgtttaaagaaacggtgctttgctctgtgtttgtgctcctgatttccctggaggttctggatgaaggctgaacacaggcttgttaatgtcagtctgtgctgaggacctcagggacttgaggttgcatttttgagcatggggtgcaggagcctttctggatttggatgtggctatggaaagaacacagaagccaaggtcatgtgcatgaaatgaggagtttgagttagtcacctcggggattttttccattttgcagtaaaatgttaaattaatgtagcctgcctctatttgttgggcaggtaatttcaaagggttatttgcctcatctcctatctttagtgaaatcttatgtgtaattgtgtgtatttattccaccgtgggaacagagaatacctgtttagtgttgcactttagactggtgtctgttttgttaatgcagctgtgccacaaattctcctttatcttttaaaaatgttatagctttaaattttgatttattttgactgtggaataaatacatgaatgaaaa

SEQ ID NO: 309792 - DNA, 1099 bp, Homo sapiens
cgggaccacagccggggaggcggggtccttctctggggcggtcgcgttggcagcggatgcgggaagccggactctgggcgtcatgtactacaagtttagtggcttcacgcagaagttggcaggagcatgggcttcggaggcctatagcccgcagggattaaagcctgtggtttccacagaagcaccacctatcatatttgccacaccaactaaactgacctccgattccacagtgtatgattatgctgggaaaaacaaagttccagagctacaaaagtttttccagaaagctgatggtgtgcccgtctacctgaaacgaggcctgcctgaccaaatgctttaccggaccaccatggcgctgactgtgggagggaccatctactgcctgatcgccctctacatggcttcgcagcccaaaaacaaatgagttaggctgcagaggactggtttgttttttggcataaaccctttgaagttcctttttcattgttaaattaaaatttttttttttacttggatggcttaacatttttgcaagattgtcagagctcattcgacagttaaagccattgtttaaagaaacggtgctttgctctgtgtttgtgctcctgatttccctggaggttctggatgaaggctgaacacaggcttgttaatgtcagtctgtgctgaggacctcagggacttgaggttgcatttttgagcatggggtgcaggagcctttctggatttggatgtggctatggaaagaacacagaagccaaggtcatgtgcatgaaatgaggagtttgagttagtcacctcggggattttttccattttgcagtaaaatgttaaattaatgtagcctgcctctatttgttgggcaggtaatttcaaagggttatttgcctcatctcctatctttagtgaaatcttatgtgtaattgtgtgtatttattccaccgtgggaacagagaatacctgtttagtgttgcactttagactggtgtctgttttgttaatgcagctgtgccacaaattctcctttatcttttaaaaatgttatagctttaaattttgatttattttgactgtggaataaatacatgaatgaaaa

SEQ ID NO: 309793 - DNA, 633 bp, Homo sapiens
cgggaccacagccggggaggcggggtccttctctggggcggtcgcgttggcagcggatgcgggaagccggactctgggcgtcatgtactacaagtttagtggcttcacgcagaagttggcaggagcatgggcttcggaggcctatagcccgcagggattaaagcctgtggtttccacagaagcaccacctatcatatttgccacaccaactaaactgacctccgattccacagtgtatgattatgctgggaaaaacaaagttccagagctacaaaagtttttccagaaagctgatggtgtgcccgtctacctgaaacgaggcctgcctgaccaaatgctttaccggaccaccatggcgctgactgtgggagggaccatctactgcctgatcgccctctacatggcttcgcagcccaaaaacaaatgagttaggctgcagaggactgtgcatataacctacagcaagcgagcatggcagctggctgcacggactccggaggcgggagtacctggcttcaactcgtaactcagccagtcggcttctgtgtacctcaagtttcttcatctgtgaaatggagataatcgaatttagtattttgaaaagattgagttaatacatgttaaacacatgaa

SEQ ID NO: 309794 - DNA, 900 bp, Homo sapiens
cgggaccacagccggggaggcggggtccttctctggggcggtcgcgttggcagcggatgcgggaagccggactctgggcgtcatgtactacaagtttagtggcttcacgcagaagttggcaggagcatgggcttcggaggcctatagcccgcagggattaaagcctgtggtttccacagaagcaccacctatcatatttgccacaccaactaaactgacctccgattccacagtgtatgattatgctgggaaaaacaaagttccagagctacaaaagtttttccaggaaacatacctacagaccattctgtttctgtggctgctggagactccagtcgtgggcatcttggacaaagggacttttggccagcagggcttcagtgatggtgatacagatgtgcggcactgctgtgtcgtggactcacctcgtcccagactgaggaccaagactgacacagactctcttctgtttcccttatctcctttccaaagtaagtctgtgaatctaccctggtcctttccttctatgtctaatgaatgtctttctcctagtgtagtggaggaagtacaaattttgaagttctagaacataaagtctcagcatggccatgatctaaatgaacataggctggttactaaatctcccaaactcatttcttcatctacagtcacctccctgtatccctgaacacctgggtattgggagatgttgggcccacagtaggtactcctccaggggcagctcttcttggtccatatcctgcccatctgctcttcagccttcgtggtcctaaaaacatgtacttatcctttatttccagctttaagctggaaaactagttccttctagaagttacactaatacaacacctcaatgtgcccaaaatctaattcatcatt

SEQ ID NO: 309795 - DNA, 3166 bp, Homo sapiens
ggcacgaggggagggggcagttgggcggggataggccgtcctagctaaggtggtaaaggccaataactcttcaggctgcctctcctcgaaaagtcatcttctcgcgaacctttaaaatgccttcctccccaagcacctcaagggactagaactgagtgcttcatttgtcttttttcctccttgcaaaagtcccgtttgccaccatggggatgtaccaagtgagaccgagtagggggaacgagtggtgattgacgcgccaggttactggccactgctcacctaggcgctagcaaacttctgccaagatcggaactgagtactaaacagcctccacagttctccctggtgccgtctccggcttggcgccgcatcctcctctgggctcgcgatggccgcgtcccctcccgctgcggacgggtcctttggtacatgcagtccgagatcgccatggatcggatgaagaagatcaaacggcagctgtcaatgacactccgaggtggccgaggcatagacaagaccaatggtgcccctgagcagataggcctggatgagagtggtggtggtggcggcagtgaccctggagaggcccccacacgtgctgctcctggggaacttcgttctgcacggggcccactcagctctgcaccagagattgtgcacgaggacttgaagatggggtctgatggggagagtgaccaggcttcagccacgtcctcggatgaggtgcagtctccagtgagagtgcgtatgcgcaaccatcccccacgcaagatctccactgaggacatcaacaagcgcctatcactaccagctgacatccggctgcctgagggctacctggagaagctgaccctcaatagccccatctttgacaagcccctcagccgccgcctccgtcgtgtcagcctatctgagattggctttgggaaactggagacctacattaagctggacaaactgggcgagggtacctatgccaccgtctacaaaggcaaaagcaagctcacagacaaccttgtggcactcaaggagatcagactggaacatgaagagggggcaccctgcaccgccatccgggaagtgtccctgctcaaggacctcaaacacgccaacatcgttacgctacatgacattatccacacggagaagtccctcacccttgtctttgagtacctggacaaggacctgaagcagtacctggatgactgtgggaacatcatcaacatgcacaacgtgaaactgttcctgttccagctgctccgtggcctggcctactgccaccggcagaaggtgctacaccgagacctcaagccccagaacctgctcatcaacgagaggggagagctcaagctggctgactttggcctggcccgagccaagtcaatcccaacaaagacatactccaatgaggtggtgacactgtggtaccggccccctgacatcctgcttgggtccacggactactccactcagattgacatgtggggtgtgggctgcatcttctatgagatggccacaggccgtcccctctttccgggctccacggtggaggaacagctacacttcatcttccgtatcttaggaaccccaactgaggagacgtggccaggcatcctgtccaacgaggagttcaagacatacaactaccccaagtaccgagccgaggcccttttgagccacgcaccccgacttgatagcgacggggccgacctcctcaccaagctgttgcagtttgagggtcgaaatcggatctccgcagaggatgccatgaaacatccattcttcctcagtctgggggagcggatccacaaacttcctgacactacttccatatttgcactaaaggagattcagctacaaaaggaggccagccttcggtcttcgtcgatgcctgactcaggcaggccagctttccgcgtggtggacaccgagttctaagccacagaccgaggccccagcaggcagcggctggagggatgccacacccctcacagggcagcccccaactacatcttccctgcttactctctgcctacctgcctgagccatgttcacctgcccacttgtcccctgctgcctgcccaaacaccccaccattggcctgtcaacccacccattggcctgtctgctgggtgctaacaaagctctcatcactccttcacttggtctgtctgtctctgtcttggtagttgccggtggacagcatggccgtgccagcctcccacactgaggccaggtctaccccccatcataccagcccccaggaccactaccccacggccagccaggggtccagagctagcccaggctggggatctcgactcagacaagatggtgacaatgccttgagtctgaggcatcctctgcctgctttcctgcctgccccacctgcctcatattgtgtgggcctttttttgtttgtttcattcattgtttttttttttttaattattttaaatgagatttttgttttttttaaatgcaatatctctgtatacagactggctgggccccaccccctgcgtgtggccctcccacagtattttgtgcaatgaagccctgctcccagcctttcagagacagggacacagcccctatttggaaccctgatcatcaccagaccctgggattggctatgggaaagcatgccacaggccactcgccttcctacccccgcccgccatccccagttgcagggggatctggggactaccagagactctgggaaatggacaaggtggggggccccactctttctctcctgcagtcccgtagctggggcctccttccttctcagggtctccccagcccagtccccttgctcccatcccactcggtgctgttgggtaggggccctgccaggaactgaccagctcagcgaggagccataatgtgcatatgtgcacaagcagggttgggggaggggggtgtgaggggttgtgcccaggtgttgccccctatctcctggggagggtgaggcagggcagggacagtctccagggtcagtccctggatgggtggttacctccccttcctccaccctaagccctggggccctgaaatggggtgggagggcaggggtgggagccctcctagtgggtttggggggttgggttcctgaatgcaccataatcgctgtatgaaatattaaaaagtctaaagtgaa

SEQ ID NO: 309796 - DNA, 3125 bp, Homo sapiens
gtgcgcatgcgcggagcgcggcgcgcgcggcggttgggccgttggctgttcggccctgggatccgccgccactccgcgatcagaccgctctgtgccgcgagccgccgtgagcactcggattcaagccggcgccaacgagtccgggggcatcgcccgcagcggccaagctcatggccggctgagcgggacgccgcctccgcctcagccaccgccgccgccgccgcctcctcctcctcagccggcggcggcccgggcccagcaaccatggctgaagactactgggacgggcgcctgcggcgaacaggaggagaaggaggtcgcgcggcctcatcccgggccgccgccccaggcgccgccgcgccggccccgcggctctgaggttgctcgcgcgcccccgccgatcgccatggatcggatgaagaagatcaaacggcagctgtcaatgacactccgaggtggccgaggcatagacaagaccaatggtgcccctgagcagataggcctggatgagagtggtggtggtggcggcagtgaccctggagaggcccccacacgtgctgctcctggggaacttcgttctgcacggggcccactcagctctgcaccagagattgtgcacgaggacttgaagatggggtctgatggggagagtgaccaggcttcagccacgtcctcggatgaggtgcagtctccagtgagagtgcgtatgcgcaaccatcccccacgcaagatctccactgaggacatcaacaagcgcctatcactaccagctgacatccggctgcctgagggctacctggagaagctgaccctcaatagccccatctttgacaagcccctcagccgccgcctccgtcgtgtcagcctatctgagattggctttgggaaactggagacctacattaagctggacaaactgggcgagggtacctatgccaccgtctacaaaggcaaaagcaagctcacagacaaccttgtggcactcaaggagatcagactggaacatgaagagggggcaccctgcaccgccatccgggaagtgtccctgctcaaggacctcaaacacgccaacatcgttacgctacatgacattatccacacggagaagtccctcacccttgtctttgagtacctggacaaggacctgaagcagtacctggatgactgtgggaacatcatcaacatgcacaacgtgaaactgttcctgttccagctgctccgtggcctggcctactgccaccggcagaaggtgctacaccgagacctcaagccccagaacctgctcatcaacgagaggggagagctcaagctggctgactttggcctggcccgagccaagtcaatcccaacaaagacatactccaatgaggtggtgacactgtggtaccggccccctgacatcctgcttgggtccacggactactccactcagattgacatgtggggtgtgggctgcatcttctatgagatggccacaggccgtcccctctttccgggctccacggtggaggaacagctacacttcatcttccgtatcttaggaaccccaactgaggagacgtggccaggcatcctgtccaacgaggagttcaagacatacaactaccccaagtaccgagccgaggcccttttgagccacgcaccccgacttgatagcgacggggccgacctcctcaccaagctgttgcagtttgagggtcgaaatcggatctccgcagaggatgccatgaaacatccattcttcctcagtctgggggagcggatccacaaacttcctgacactacttccatatttgcactaaaggagattcagctacaaaaggaggccagccttcggtcttcgtcgatgcctgactcaggcaggccagctttccgcgtggtggacaccgagttctaagccacagaccgaggccccagcaggcagcggctggagggatgccacacccctcacagggcagcccccaactacatcttccctgcttactctctgcctacctgcctgagccatgttcacctgcccacttgtcccctgctgcctgcccaaacaccccaccattggcctgtcaacccacccattggcctgtctgctgggtgctaacaaagctctcatcactccttcacttggtctgtctgtctctgtcttggtagttgccggtggacagcatggccgtgccagcctcccacactgaggccaggtctaccccccatcataccagcccccaggaccactaccccacggccagccaggggtccagagctagcccaggctggggatctcgactcagacaagatggtgacaatgccttgagtctgaggcatcctctgcctgctttcctgcctgccccacctgcctcatattgtgtgggcctttttttgtttgtttcattcattgtttttttttttttaattattttaaatgagatttttgttttttttaaatgcaatatctctgtatacagactggctgggccccaccccctgcgtgtggccctcccacagtattttgtgcaatgaagccctgctcccagcctttcagagacagggacacagcccctatttggaaccctgatcatcaccagaccctgggattggctatgggaaagcatgccacaggccactcgccttcctacccccgcccgccatccccagttgcagggggatctggggactaccagagactctgggaaatggacaaggtggggggccccactctttctctcctgcagtcccgtagctggggcctccttccttctcagggtctccccagcccagtccccttgctcccatcccactcggtgctgttgggtaggggccctgccaggaactgaccagctcagcgaggagccataatgtgcatatgtgcacaagcagggttgggggaggggggtgtgaggggttgtgcccaggtgttgccccctatctcctggggagggtgaggcagggcagggacagtctccagggtcagtccctggatgggtggttacctccccttcctccaccctaagccctggggccctgaaatggggtgggagggcaggggtgggagccctcctagtgggtttggggggttgggttcctgaatgcaccataatcgctgtatgaaatattaaaaagtctaaagtgaa

SEQ ID NO: 309797 - DNA, 2972 bp, Homo sapiens
gtgcgcatgcgcggagcgcggcgcgcgcggcggttgggccgttggctgttcggccctgggatccgccgccactccgcgatcagaccgctctgtgccgcgagccgccgtgagcactcggattcaagccggcgccaacgagtccgggggcatcgcccgcagcggccaagctcatggccggctgagcgggacgccgcctccgcctcagccaccgccgccgccgccgcctcctcctcctcagccggcggcggcccgggcccagcaaccatggctgaagactactgggacgggcgcctgcggcgaacaggaggagaaggaggtcgcgcggcctcatcccgggccgccgccccaggcgccgccgcgccggccccgcggctctgaggttgctcgcgcgcccccgccgatcgccatggatcggatgaagaagatcaaacggcagctgtcaatgacactccgagagattgtgcacgaggacttgaagatggggtctgatggggagagtgaccaggcttcagccacgtcctcggatgaggtgcagtctccagtgagagtgcgtatgcgcaaccatcccccacgcaagatctccactgaggacatcaacaagcgcctatcactaccagctgacatccggctgcctgagggctacctggagaagctgaccctcaatagccccatctttgacaagcccctcagccgccgcctccgtcgtgtcagcctatctgagattggctttgggaaactggagacctacattaagctggacaaactgggcgagggtacctatgccaccgtctacaaaggcaaaagcaagctcacagacaaccttgtggcactcaaggagatcagactggaacatgaagagggggcaccctgcaccgccatccgggaagtgtccctgctcaaggacctcaaacacgccaacatcgttacgctacatgacattatccacacggagaagtccctcacccttgtctttgagtacctggacaaggacctgaagcagtacctggatgactgtgggaacatcatcaacatgcacaacgtgaaactgttcctgttccagctgctccgtggcctggcctactgccaccggcagaaggtgctacaccgagacctcaagccccagaacctgctcatcaacgagaggggagagctcaagctggctgactttggcctggcccgagccaagtcaatcccaacaaagacatactccaatgaggtggtgacactgtggtaccggccccctgacatcctgcttgggtccacggactactccactcagattgacatgtggggtgtgggctgcatcttctatgagatggccacaggccgtcccctctttccgggctccacggtggaggaacagctacacttcatcttccgtatcttaggaaccccaactgaggagacgtggccaggcatcctgtccaacgaggagttcaagacatacaactaccccaagtaccgagccgaggcccttttgagccacgcaccccgacttgatagcgacggggccgacctcctcaccaagctgttgcagtttgagggtcgaaatcggatctccgcagaggatgccatgaaacatccattcttcctcagtctgggggagcggatccacaaacttcctgacactacttccatatttgcactaaaggagattcagctacaaaaggaggccagccttcggtcttcgtcgatgcctgactcaggcaggccagctttccgcgtggtggacaccgagttctaagccacagaccgaggccccagcaggcagcggctggagggatgccacacccctcacagggcagcccccaactacatcttccctgcttactctctgcctacctgcctgagccatgttcacctgcccacttgtcccctgctgcctgcccaaacaccccaccattggcctgtcaacccacccattggcctgtctgctgggtgctaacaaagctctcatcactccttcacttggtctgtctgtctctgtcttggtagttgccggtggacagcatggccgtgccagcctcccacactgaggccaggtctaccccccatcataccagcccccaggaccactaccccacggccagccaggggtccagagctagcccaggctggggatctcgactcagacaagatggtgacaatgccttgagtctgaggcatcctctgcctgctttcctgcctgccccacctgcctcatattgtgtgggcctttttttgtttgtttcattcattgtttttttttttttaattattttaaatgagatttttgttttttttaaatgcaatatctctgtatacagactggctgggccccaccccctgcgtgtggccctcccacagtattttgtgcaatgaagccctgctcccagcctttcagagacagggacacagcccctatttggaaccctgatcatcaccagaccctgggattggctatgggaaagcatgccacaggccactcgccttcctacccccgcccgccatccccagttgcagggggatctggggactaccagagactctgggaaatggacaaggtggggggccccactctttctctcctgcagtcccgtagctggggcctccttccttctcagggtctccccagcccagtccccttgctcccatcccactcggtgctgttgggtaggggccctgccaggaactgaccagctcagcgaggagccataatgtgcatatgtgcacaagcagggttgggggaggggggtgtgaggggttgtgcccaggtgttgccccctatctcctggggagggtgaggcagggcagggacagtctccagggtcagtccctggatgggtggttacctccccttcctccaccctaagccctggggccctgaaatggggtgggagggcaggggtgggagccctcctagtgggtttggggggttgggttcctgaatgcaccataatcgctgtatgaaatattaaaaagtctaaagtgaa

SEQ ID NO: 309798 - DNA, 284 bp, Homo sapiens
gattttgcctaggacaccctcagtctcaactgcatacgtcatccccgagactttgcccatgactccctcattctagctgtcctttctctgatttccaggcctggcccgagccaagtcaatcccaacaaagacatactccaatgaggtggtgacactgtggtaccggccccctgacatcctgcttgggtccacggactactccactcagattgacatgtggtaaggacaggtggaagtgtggcagggcgcaatgtggtacagggggtggcttggtcacaacagga

SEQ ID NO: 309799 - DNA, 2842 bp, Homo sapiens
tggaagcagcgtaaaggatggacaggaatgcagaggtaggcaggaggaccagcagtgtgactgctgaaacccaggggagggccccgcggctctgaggttgctcgcgcgcccccgccgatcgccatggatcggatgaagaagatcaaacggcagctgtcaatgacactccgaggtggccgaggcatagacaagaccaatggtgcccctgagcagataggcctggatgagagtggtggtggtggcggcagtgaccctggagaggcccccacacgtgctgctcctggggaacttcgttctgcacggggcccactcagctctgcaccagagattgtgcacgaggacttgaagatggggtctgatggggagagtgaccaggcttcagccacgtcctcggatgaggtgcagtctccagtgagagtgcgtatgcgcaaccatcccccacgcaagatctccactgaggacatcaacaagcgcctatcactaccagctgacatccggctgcctgagggctacctggagaagctgaccctcaatagccccatctttgacaagcccctcagccgccgcctccgtcgtgtcagcctatctgagattggctttgggaaactggagacctacattaagctggacaaactgggcgagggtacctatgccaccgtctacaaaggcaaaagcaagctcacagacaaccttgtggcactcaaggagatcagactggaacatgaagagggggcaccctgcaccgccatccgggaagtgtccctgctcaaggacctcaaacacgccaacatcgttacgctacatgacattatccacacggagaagtccctcacccttgtctttgagtacctggacaaggacctgaagcagtacctggatgactgtgggaacatcatcaacatgcacaacgtgaaactgttcctgttccagctgctccgtggcctggcctactgccaccggcagaaggtgctacaccgagacctcaagccccagaacctgctcatcaacgagaggggagagctcaagctggctgactttggcctggcccgagccaagtcaatcccaacaaagacatactccaatgaggtggtgacactgtggtaccggccccctgacatcctgcttgggtccacggactactccactcagattgacatgtggggtgtgggctgcatcttctatgagatggccacaggccgtcccctctttccgggctccacggtggaggaacagctacacttcatcttccgtatcttaggaaccccaactgaggagacgtggccaggcatcctgtccaacgaggagttcaagacatacaactaccccaagtaccgagccgaggcccttttgagccacgcaccccgacttgatagcgacggggccgacctcctcaccaagctgttgcagtttgagggtcgaaatcggatctccgcagaggatgccatgaaacatccattcttcctcagtctgggggagcggatccacaaacttcctgacactacttccatatttgcactaaaggagattcagctacaaaaggaggccagccttcggtcttcgtcgatgcctgactcaggcaggccagctttccgcgtggtggacaccgagttctaagccacagaccgaggccccagcaggcagcggctggagggatgccacacccctcacagggcagcccccaactacatcttccctgcttactctctgcctacctgcctgagccatgttcacctgcccacttgtcccctgctgcctgcccaaacaccccaccattggcctgtcaacccacccattggcctgtctgctgggtgctaacaaagctctcatcactccttcacttggtctgtctgtctctgtcttggtagttgccggtggacagcatggccgtgccagcctcccacactgaggccaggtctaccccccatcataccagcccccaggaccactaccccacggccagccaggggtccagagctagcccaggctggggatctcgactcagacaagatggtgacaatgccttgagtctgaggcatcctctgcctgctttcctgcctgccccacctgcctcatattgtgtgggcctttttttgtttgtttcattcattgtttttttttttttaattattttaaatgagatttttgttttttttaaatgcaatatctctgtatacagactggctgggccccaccccctgcgtgtggccctcccacagtattttgtgcaatgaagccctgctcccagcctttcagagacagggacacagcccctatttggaaccctgatcatcaccagaccctgggattggctatgggaaagcatgccacaggccactcgccttcctacccccgcccgccatccccagttgcagggggatctggggactaccagagactctgggaaatggacaaggtggggggccccactctttctctcctgcagtcccgtagctggggcctccttccttctcagggtctccccagcccagtccccttgctcccatcccactcggtgctgttgggtaggggccctgccaggaactgaccagctcagcgaggagccataatgtgcatatgtgcacaagcagggttgggggaggggggtgtgaggggttgtgcccaggtgttgccccctatctcctggggagggtgaggcagggcagggacagtctccagggtcagtccctggatgggtggttacctccccttcctccaccctaagccctggggccctgaaatggggtgggagggcaggggtgggagccctcctagtgggtttggggggttgggttcctgaatgcaccataatcgctgtatgaaatattaaaaagtctaaagtgaa

SEQ ID NO: 309800 - DNA, 3104 bp, Homo sapiens
gtgcgcatgcgcggagcgcggcgcgcgcggcggttgggccgttggctgttcggccctgggatccgccgccactccgcgatcagaccgctctgtgccgcgagccgccgtgagcactcggattcaagccggcgccaacgagtccgggggcatcgcccgcagcggccaagctcatggccggctgagcgggacgccgcctccgccgcctcctcctcctcagccggcggcggcccgggcccagcaaccatggctgaagactactgggacgggcgcctgcggcgaacaggaggagaaggaggtcgcgcggcctcatcccgggccgccgccccaggcgccgccgcgccggccccgcggctctgaggttgctcgcgcgcccccgccgatcgccatggatcggatgaagaagatcaaacggcagctgtcaatgacactccgaggtggccgaggcatagacaagaccaatggtgcccctgagcagataggcctggatgagagtggtggtggtggcggcagtgaccctggagaggcccccacacgtgctgctcctggggaacttcgttctgcacggggcccactcagctctgcaccagagattgtgcacgaggacttgaagatggggtctgatggggagagtgaccaggcttcagccacgtcctcggatgaggtgcagtctccagtgagagtgcgtatgcgcaaccatcccccacgcaagatctccactgaggacatcaacaagcgcctatcactaccagctgacatccggctgcctgagggctacctggagaagctgaccctcaatagccccatctttgacaagcccctcagccgccgcctccgtcgtgtcagcctatctgagattggctttgggaaactggagacctacattaagctggacaaactgggcgagggtacctatgccaccgtctacaaaggcaaaagcaagctcacagacaaccttgtggcactcaaggagatcagactggaacatgaagagggggcaccctgcaccgccatccgggaagtgtccctgctcaaggacctcaaacacgccaacatcgttacgctacatgacattatccacacggagaagtccctcacccttgtctttgagtacctggacaaggacctgaagcagtacctggatgactgtgggaacatcatcaacatgcacaacgtgaaactgttcctgttccagctgctccgtggcctggcctactgccaccggcagaaggtgctacaccgagacctcaagccccagaacctgctcatcaacgagaggggagagctcaagctggctgactttggcctggcccgagccaagtcaatcccaacaaagacatactccaatgaggtggtgacactgtggtaccggccccctgacatcctgcttgggtccacggactactccactcagattgacatgtggggtgtgggctgcatcttctatgagatggccacaggccgtcccctctttccgggctccacggtggaggaacagctacacttcatcttccgtatcttaggaaccccaactgaggagacgtggccaggcatcctgtccaacgaggagttcaagacatacaactaccccaagtaccgagccgaggcccttttgagccacgcaccccgacttgatagcgacggggccgacctcctcaccaagctgttgcagtttgagggtcgaaatcggatctccgcagaggatgccatgaaacatccattcttcctcagtctgggggagcggatccacaaacttcctgacactacttccatatttgcactaaaggagattcagctacaaaaggaggccagccttcggtcttcgtcgatgcctgactcaggcaggccagctttccgcgtggtggacaccgagttctaagccacagaccgaggccccagcaggcagcggctggagggatgccacacccctcacagggcagcccccaactacatcttccctgcttactctctgcctacctgcctgagccatgttcacctgcccacttgtcccctgctgcctgcccaaacaccccaccattggcctgtcaacccacccattggcctgtctgctgggtgctaacaaagctctcatcactccttcacttggtctgtctgtctctgtcttggtagttgccggtggacagcatggccgtgccagcctcccacactgaggccaggtctaccccccatcataccagcccccaggaccactaccccacggccagccaggggtccagagctagcccaggctggggatctcgactcagacaagatggtgacaatgccttgagtctgaggcatcctctgcctgctttcctgcctgccccacctgcctcatattgtgtgggcctttttttgtttgtttcattcattgtttttttttttttaattattttaaatgagatttttgttttttttaaatgcaatatctctgtatacagactggctgggccccaccccctgcgtgtggccctcccacagtattttgtgcaatgaagccctgctcccagcctttcagagacagggacacagcccctatttggaaccctgatcatcaccagaccctgggattggctatgggaaagcatgccacaggccactcgccttcctacccccgcccgccatccccagttgcagggggatctggggactaccagagactctgggaaatggacaaggtggggggccccactctttctctcctgcagtcccgtagctggggcctccttccttctcagggtctccccagcccagtccccttgctcccatcccactcggtgctgttgggtaggggccctgccaggaactgaccagctcagcgaggagccataatgtgcatatgtgcacaagcagggttgggggaggggggtgtgaggggttgtgcccaggtgttgccccctatctcctggggagggtgaggcagggcagggacagtctccagggtcagtccctggatgggtggttacctccccttcctccaccctaagccctggggccctgaaatggggtgggagggcaggggtgggagccctcctagtgggtttggggggttgggttcctgaatgcaccataatcgctgtatgaaatattaaaaagtctaaagtgaa

SEQ ID NO: 309801 - DNA, 3207 bp, Homo sapiens
gtgcgcatgcgcggagcgcggcgcgcgcggcggttgggccgttggctgttcggccctgggatccgccgccactccgcgatcagaccgctctgtgccgcgagccgccgtgagcactcggattcaagccggcgccaacgagtccgggggcatcgcccgcagcggccaagctcatggccggctgagcgggacgccgcctccgcctcagccaccgccgccgccgccgcctcctcctcctcagccggcggcggcccgggcccagcaaccatggctgaagactactgggacgggcgcctgcggcgaacaggaggagaaggaggtcgcgcggcctcatcccgggccgccgccccaggcgccgccgcgccggccccgcggctctgaggttgctcgcgcgcccccgccgtcactattccaggtcctcaggatatagccgtgacctaaacacagaaatctaccctggcggagctgatcttctagttgtggcgatcgccatggatcggatgaagaagatcaaacggcagctgtcaatgacactccgaggtggccgaggcatagacaagaccaatggtgcccctgagcagataggcctggatgagagtggtggtggtggcggcagtgaccctggagaggcccccacacgtgctgctcctggggaacttcgttctgcacggggcccactcagctctgcaccagagattgtgcacgaggacttgaagatggggtctgatggggagagtgaccaggcttcagccacgtcctcggatgaggtgcagtctccagtgagagtgcgtatgcgcaaccatcccccacgcaagatctccactgaggacatcaacaagcgcctatcactaccagctgacatccggctgcctgagggctacctggagaagctgaccctcaatagccccatctttgacaagcccctcagccgccgcctccgtcgtgtcagcctatctgagattggctttgggaaactggagacctacattaagctggacaaactgggcgagggtacctatgccaccgtctacaaaggcaaaagcaagctcacagacaaccttgtggcactcaaggagatcagactggaacatgaagagggggcaccctgcaccgccatccgggaagtgtccctgctcaaggacctcaaacacgccaacatcgttacgctacatgacattatccacacggagaagtccctcacccttgtctttgagtacctggacaaggacctgaagcagtacctggatgactgtgggaacatcatcaacatgcacaacgtgaaactgttcctgttccagctgctccgtggcctggcctactgccaccggcagaaggtgctacaccgagacctcaagccccagaacctgctcatcaacgagaggggagagctcaagctggctgactttggcctggcccgagccaagtcaatcccaacaaagacatactccaatgaggtggtgacactgtggtaccggccccctgacatcctgcttgggtccacggactactccactcagattgacatgtggggtgtgggctgcatcttctatgagatggccacaggccgtcccctctttccgggctccacggtggaggaacagctacacttcatcttccgtatcttaggaaccccaactgaggagacgtggccaggcatcctgtccaacgaggagttcaagacatacaactaccccaagtaccgagccgaggcccttttgagccacgcaccccgacttgatagcgacggggccgacctcctcaccaagctgttgcagtttgagggtcgaaatcggatctccgcagaggatgccatgaaacatccattcttcctcagtctgggggagcggatccacaaacttcctgacactacttccatatttgcactaaaggagattcagctacaaaaggaggccagccttcggtcttcgtcgatgcctgactcaggcaggccagctttccgcgtggtggacaccgagttctaagccacagaccgaggccccagcaggcagcggctggagggatgccacacccctcacagggcagcccccaactacatcttccctgcttactctctgcctacctgcctgagccatgttcacctgcccacttgtcccctgctgcctgcccaaacaccccaccattggcctgtcaacccacccattggcctgtctgctgggtgctaacaaagctctcatcactccttcacttggtctgtctgtctctgtcttggtagttgccggtggacagcatggccgtgccagcctcccacactgaggccaggtctaccccccatcataccagcccccaggaccactaccccacggccagccaggggtccagagctagcccaggctggggatctcgactcagacaagatggtgacaatgccttgagtctgaggcatcctctgcctgctttcctgcctgccccacctgcctcatattgtgtgggcctttttttgtttgtttcattcattgtttttttttttttaattattttaaatgagatttttgttttttttaaatgcaatatctctgtatacagactggctgggccccaccccctgcgtgtggccctcccacagtattttgtgcaatgaagccctgctcccagcctttcagagacagggacacagcccctatttggaaccctgatcatcaccagaccctgggattggctatgggaaagcatgccacaggccactcgccttcctacccccgcccgccatccccagttgcagggggatctggggactaccagagactctgggaaatggacaaggtggggggccccactctttctctcctgcagtcccgtagctggggcctccttccttctcagggtctccccagcccagtccccttgctcccatcccactcggtgctgttgggtaggggccctgccaggaactgaccagctcagcgaggagccataatgtgcatatgtgcacaagcagggttgggggaggggggtgtgaggggttgtgcccaggtgttgccccctatctcctggggagggtgaggcagggcagggacagtctccagggtcagtccctggatgggtggttacctccccttcctccaccctaagccctggggccctgaaatggggtgggagggcaggggtgggagccctcctagtgggtttggggggttgggttcctgaatgcaccataatcgctgtatgaaatattaaaaagtctaaagtgaa

SEQ ID NO: 309802 - DNA, 2837 bp, Homo sapiens
  misc_feature (23)..(23): n is a, c, g, or t
ttttttgtcagccccgcagttantgcatatggcgaaccgcgccctcgggcgacgccgggggcgccgtcgagactagccccgcggctctgaggttgctcgcgcgcccccgccgatcgccatggatcggatgaagaagatcaaacggcagctgtcaatgacactccgaggtggccgaggcatagacaagaccaatggtgcccctgagcagataggcctggatgagagtggtggtggtggcggcagtgaccctggagaggcccccacacgtgctgctcctggggaacttcgttctgcacggggcccactcagctctgcaccagagattgtgcacgaggacttgaagatggggtctgatggggagagtgaccaggcttcagccacgtcctcggatgaggtgcagtctccagtgagagtgcgtatgcgcaaccatcccccacgcaagatctccactgaggacatcaacaagcgcctatcactaccagctgacatccggctgcctgagggctacctggagaagctgaccctcaatagccccatctttgacaagcccctcagccgccgcctccgtcgtgtcagcctatctgagattggctttgggaaactggagacctacattaagctggacaaactgggcgagggtacctatgccaccgtctacaaaggcaaaagcaagctcacagacaaccttgtggcactcaaggagatcagactggaacatgaagagggggcaccctgcaccgccatccgggaagtgtccctgctcaaggacctcaaacacgccaacatcgttacgctacatgacattatccacacggagaagtccctcacccttgtctttgagtacctggacaaggacctgaagcagtacctggatgactgtgggaacatcatcaacatgcacaacgtgaaactgttcctgttccagctgctccgtggcctggcctactgccaccggcagaaggtgctacaccgagacctcaagccccagaacctgctcatcaacgagaggggagagctcaagctggctgactttggcctggcccgagccaagtcaatcccaacaaagacatactccaatgaggtggtgacactgtggtaccggccccctgacatcctgcttgggtccacggactactccactcagattgacatgtggggtgtgggctgcatcttctatgagatggccacaggccgtcccctctttccgggctccacggtggaggaacagctacacttcatcttccgtatcttaggaaccccaactgaggagacgtggccaggcatcctgtccaacgaggagttcaagacatacaactaccccaagtaccgagccgaggcccttttgagccacgcaccccgacttgatagcgacggggccgacctcctcaccaagctgttgcagtttgagggtcgaaatcggatctccgcagaggatgccatgaaacatccattcttcctcagtctgggggagcggatccacaaacttcctgacactacttccatatttgcactaaaggagattcagctacaaaaggaggccagccttcggtcttcgtcgatgcctgactcaggcaggccagctttccgcgtggtggacaccgagttctaagccacagaccgaggccccagcaggcagcggctggagggatgccacacccctcacagggcagcccccaactacatcttccctgcttactctctgcctacctgcctgagccatgttcacctgcccacttgtcccctgctgcctgcccaaacaccccaccattggcctgtcaacccacccattggcctgtctgctgggtgctaacaaagctctcatcactccttcacttggtctgtctgtctctgtcttggtagttgccggtggacagcatggccgtgccagcctcccacactgaggccaggtctaccccccatcataccagcccccaggaccactaccccacggccagccaggggtccagagctagcccaggctggggatctcgactcagacaagatggtgacaatgccttgagtctgaggcatcctctgcctgctttcctgcctgccccacctgcctcatattgtgtgggcctttttttgtttgtttcattcattgtttttttttttttaattattttaaatgagatttttgttttttttaaatgcaatatctctgtatacagactggctgggccccaccccctgcgtgtggccctcccacagtattttgtgcaatgaagccctgctcccagcctttcagagacagggacacagcccctatttggaaccctgatcatcaccagaccctgggattggctatgggaaagcatgccacaggccactcgccttcctacccccgcccgccatccccagttgcagggggatctggggactaccagagactctgggaaatggacaaggtggggggccccactctttctctcctgcagtcccgtagctggggcctccttccttctcagggtctccccagcccagtccccttgctcccatcccactcggtgctgttgggtaggggccctgccaggaactgaccagctcagcgaggagccataatgtgcatatgtgcacaagcagggttgggggaggggggtgtgaggggttgtgcccaggtgttgccccctatctcctggggagggtgaggcagggcagggacagtctccagggtcagtccctggatgggtggttacctccccttcctccaccctaagccctggggccctgaaatggggtgggagggcaggggtgggagccctcctagtgggtttggggggttgggttcctgaatgcaccataatcgctgtatgaaatattaaaaagtctaaagtgaa

SEQ ID NO: 309803 - DNA, 2966 bp, Homo sapiens
gtgcgcatgcgcggagcgcggcgcgcgcggcggttgggccgttggctgttcggccctgggatccgccgccactccgcgatcagaccgctctgtgccgcgagccgccgtgagcactcggattcaagccggcgccaacgagtccgggggcatcgcccgcagcggccaagctcatggccggctgagcgggacgccgcctccgcctcagccaccgccgccgccgccgcctcctcctcctcagccggcggcggcccgggcccagcaaccatggctgaagactactgggacgggcgcctgcggcgaacaggaggagaaggaggtcgcgcggcctcatcccgggccgccgccccaggcgccgccgcgccggccccgcggctctgaggttgctcgcgcgcccccgccgatcgccatggatcggatgaagaagatcaaacggcagctgtcaatgacactccgaggtggccgaggcatagacaagaccaatggtgcccctgagcagataggcctggatgagagtggtggtggtggcggcagtgaccctggagaggcccccacacgtgctgctcctggggaacttcgttctgcacggggcccactcagctctgcaccagagattgtgcacgaggacttgaagatggggtctgatggggagagtgaccaggcttcagccacgtcctcggatgaggtgcagtctccagtgagagtgcgtatgcgcaaccatcccccacgcaagatctccactgaggacatcaacaagcgcctatcactaccagctgacatccggctgcctgagggctacctggagaagctgaccctcaatagccccatctttgacaagcccctcagccgccgcctccgtcgtgtcagcctatctgagattggctttgggaaactggagacctacattaagctggacaaactgggcgagggtacctatgccaccgtctacaaaggcaaaagcaagctcacagacaaccttgtggcactcaaggagatcagactggaacatgaagagggggcaccctgcaccgccatccgggaagtgtccctgctcaaggacctcaaacacgccaacatcgttacgctacatgacattatccacacggagaagtccctcacccttgtctttgagtacctggacaaggacctgaagcagtacctggatgactgtgggaacatcatcaacatgcacaacgtgaaactgttcctgttccagctgctccgtggcctggcctactgccaccggcagaaggtgctacaccgagacctcaagccccagaacctgctcatcaacgagaggggagagctcaagctggctgactttggcctggcccgagccaagtcaatcccaacaaagacatactccaatgaggtggtgacactgtggtaccggccccctgacatcctgcttgggtccacggactactccactcagattgacatgtggggtgtgggctgcatcttctatgagatggccacaggccgtcccctctttccgggctccacggtggaggaacagctacacttcatcttccgtatcttaggaaccccaactgaggagacgtggccaggcatcctgtccaacgaggagttcaagacatacaactaccccaagtaccgagccgaggcccttttgagccacgcaccccgacttgatagcgacggggccgacctcctcaccaagctgttgcagtttgagggtcgaaatcggatctccgcagaggatgccatgaaacatccattcttcctcagtctgggggagcggatccacaaacttcctgacactacttccatatttgcactaaaggagattcagctacaaaaggaggccagccttcggtcttcgtcgatgcctgactcaggcaggccagctttccgcgtggtggacaccgagttctaagccacagaccgaggccccagcaggcagcggctggagggatgccacacccctcacagggcagcccccaactacatcttccctgcttactctctgcctacctgcctgagccatgttcacctgcccacttgtcccctgctgcctgcccaaacaccccaccattggcctgtcaacccacccattggcctgtctgctgggtgctaacaaagctctcatcactccttcacttggtctgtctgtctctgtcttggtagttgccggtggacagcatggccgtgccagcctcccacactgaggccaggtctaccccccatcataccagcccccaggaccactaccccacggccagccaggggtccagagctagcccaggctggggatctcgactcagacaagatggtgacaatgccttgagtctgaggcatcctctgcctgctttcctgcctgccccacctgcctcatattgtgtgggcctttttttgtttgtttcattcattgtttttttttttttaattattttaaatgagatttttgttttttttaaatgcaatatctctgtatacagactggctgggccccaccccctgcgtgtggccctcccacagtattttgtgcaatgaagccctgctcccagcctttcagagacagggacacagcccctatttggaaccctgatcatcaccagaccctgggattggctatgggaaagcatgccacaggccactcgccttcctacccccgcccgccatccccagttgcagggggatctggggactaccagagactctgggaaatggacaaggtggggggccccactctttctctcctgcagtcccgtagctggggcctccttccttctcagggtctccccagcccagtccccttgctcccatcccactcggtgctgttgggtaggggccctgccaggaactgaccattcctccaccctaagccctggggccctgaaatggggtgggagggcaggggtgggagccctcctagtgggtttggggggttgggttcctgaatgcaccataatcgctgtatgaaatattaaaaagtctaaagtgaa

SEQ ID NO: 309804 - DNA, 2395 bp, Homo sapiens
  misc_feature (2227)..(2227): n is a, c, g, or t
  misc_feature (2280)..(2280): n is a, c, g, or t
gtgcgcatgcgcggagcgcggcgcgcgcggcggttgggccgttggctgttcggccctgggatccgccgccactccgcgatcagaccgctctgtgccgcgagccgccgtgagcactcggattcaagccggcgccaacgagtccgggggcatcgcccgcagcggccaagctcatggccggctgagcgggacgccgcctccgcctcagccaccgccgccgccgccgcctcctcctcctcagccggcggcggcccgggcccagcaaccatggctgaagactactgggacgggcgcctgcggcgaacaggaggagaaggaggtcgcgcggcctcatcccgggccgccgccccaggcgccgccgcgccggccccgcggctctgaggttgctcgcgcgcccccgccgatcgccatggatcggatgaagaagatcaaacggcagctgtcaatgacactccgaggtggccgaggcatagacaagaccaatggtgcccctgagcagataggcctggatgagagtggtggtggtggcggcagtgaccctggagaggcccccacacgtgctgctcctggggaacttcgttctgcacggggcccactcagctctgcaccagagattgtgcacgaggacttgaagatggggtctgatggggagagtgaccaggcttcagccacgtcctcggatgaggtgcagtctccagtgagagtgcgtatgcgcaaccatcccccacgcaagatctccactgaggacatcaacaagcgcctatcactaccagctgacatccggctgcctgagggctacctggagaagctgaccctcaatagccccatctttgacaagcccctcagccgccgcctccgtcgtgtcagcctatctgagattggctttgggaaactggagacctacattaagctggacaaactgggcgagggtacctatgccaccgtctacaaaggcaaaagcaagctcacagacaaccttgtggcactcaaggagatcagactggaacatgaagagggggcaccctgcaccgccatccgggaagtgtccctgctcaaggacctcaaacacgccaacatcgttacgctacatgacattatccacacggagaagtccctcacccttgtctttgagtacctggacaaggacctgaagcagtacctggatgactgtgggaacatcatcaacatgcacaacgtgaaactgttcctgttccagctgctccgtggcctggcctactgccaccggcagaaggtgctacaccgagacctcaagccccagaacctgctcatcaacgagaggggagagctcaagctggctgactttggcctggcccgagccaagtcaatcccaacaaagacatactccaatgaggtggtgacactgtggtaccggccccctgacatcctgcttgggtccacggactactccactcagattgacatgtggggtgtgggctgcatcttctatgagatggccacaggccgtcccctctttccgggctccacggtggaggaacagctacacttcatcttccgtatcttaggaaccccaactgaggagacgtggccaggcatcctgtccaacgaggagttcaagacatacaactaccccaagtaccgagccgaggcccttttgagccacgcaccccgacttgatagcgacggggccgacctcctcaccaagctgttgcagtttgagggtcgaaatcggatctccgcagaggatgccatgaaacatccattcttcctcagtctgggggagcggatccacaaacttcctgacactacttccatatttgcactaaaggagattcagctacaaaaggaggccagccttcggtcttcgtcgatgcctgactcaggcaggccagctttccgcgtggtggacaccgagttctaagccacagaccgaggccccagcaggcagcggctggagggatgccacacccctcacagggcagcccccaactacatcttccctgcttactctctgcctacctgcctgagccatgttcacctgcccacttgtcccctgctgcctgcccaaacaccccaccattggcctgtcaacccacccattggcctgtctgctgggtgctaacaaagctctcatcactccttcacttggtctgtctgtctctgtcttggtagttgccggtggacagcatggccgtgccagcctcccacactgaggccaggtctaccccccatcataccagccccccagggnaacccaaccttaaacccacccgaacggggccccaagggcccacaaaggggggnggttttcccccaaagggaacggccctttaaagggccccccaatgggggccttggtgccgaggaaatttccgttcccggaaacgctttccccaagggaaccaaaagggaatggggg

SEQ ID NO: 309805 - DNA, 3083 bp, Homo sapiens
gtgcgcatgcgcggagcgcggcgcgcgcggcggttgggccgttggctgttcggccctgggatccgccgccactccgcgatcagaccgctctgtgccgcgagccgccgtgagcactcggattcaagccggcgccaacgagtccgggggcatcgcccgcagcggccaagctcatggccggctgagcgggacgccgcctccgcctcagccaccgccgccgccgccgcctcctcctcctcagccggcggcggcccgggcccagcaaccatggctgaagactactgggacgggcgcctgcggcgaacaggaggagaaggaggtcgcgcggcctcatcccgggccgccgccccaggcgccgccgcgccggccccgcggctctgaggttgctcgcgcgcccccgccgatcgccatggatcggatgaagaagatcaaacggcagctgtcaatgacactccgaggtggccgaggcatagacaagaccaatggtgcccctgagcagataggcctggatgagagtggtggtggtggcggcagtgaccctggagaggcccccacacgtgctgctcctggggaacttcgttctgcacggggcccactcagctctgcaccagagattgtgcacgaggacttgaagatggggtctgatggggagagtgaccaggcttcagccacgtcctcggatgaggtgcagtctccagtgagagacatcaacaagcgcctatcactaccagctgacatccggctgcctgagggctacctggagaagctgaccctcaatagccccatctttgacaagcccctcagccgccgcctccgtcgtgtcagcctatctgagattggctttgggaaactggagacctacattaagctggacaaactgggcgagggtacctatgccaccgtctacaaaggcaaaagcaagctcacagacaaccttgtggcactcaaggagatcagactggaacatgaagagggggcaccctgcaccgccatccgggaagtgtccctgctcaaggacctcaaacacgccaacatcgttacgctacatgacattatccacacggagaagtccctcacccttgtctttgagtacctggacaaggacctgaagcagtacctggatgactgtgggaacatcatcaacatgcacaacgtgaaactgttcctgttccagctgctccgtggcctggcctactgccaccggcagaaggtgctacaccgagacctcaagccccagaacctgctcatcaacgagaggggagagctcaagctggctgactttggcctggcccgagccaagtcaatcccaacaaagacatactccaatgaggtggtgacactgtggtaccggccccctgacatcctgcttgggtccacggactactccactcagattgacatgtggggtgtgggctgcatcttctatgagatggccacaggccgtcccctctttccgggctccacggtggaggaacagctacacttcatcttccgtatcttaggaaccccaactgaggagacgtggccaggcatcctgtccaacgaggagttcaagacatacaactaccccaagtaccgagccgaggcccttttgagccacgcaccccgacttgatagcgacggggccgacctcctcaccaagctgttgcagtttgagggtcgaaatcggatctccgcagaggatgccatgaaacatccattcttcctcagtctgggggagcggatccacaaacttcctgacactacttccatatttgcactaaaggagattcagctacaaaaggaggccagccttcggtcttcgtcgatgcctgactcaggcaggccagctttccgcgtggtggacaccgagttctaagccacagaccgaggccccagcaggcagcggctggagggatgccacacccctcacagggcagcccccaactacatcttccctgcttactctctgcctacctgcctgagccatgttcacctgcccacttgtcccctgctgcctgcccaaacaccccaccattggcctgtcaacccacccattggcctgtctgctgggtgctaacaaagctctcatcactccttcacttggtctgtctgtctctgtcttggtagttgccggtggacagcatggccgtgccagcctcccacactgaggccaggtctaccccccatcataccagcccccaggaccactaccccacggccagccaggggtccagagctagcccaggctggggatctcgactcagacaagatggtgacaatgccttgagtctgaggcatcctctgcctgctttcctgcctgccccacctgcctcatattgtgtgggcctttttttgtttgtttcattcattgtttttttttttttaattattttaaatgagatttttgttttttttaaatgcaatatctctgtatacagactggctgggccccaccccctgcgtgtggccctcccacagtattttgtgcaatgaagccctgctcccagcctttcagagacagggacacagcccctatttggaaccctgatcatcaccagaccctgggattggctatgggaaagcatgccacaggccactcgccttcctacccccgcccgccatccccagttgcagggggatctggggactaccagagactctgggaaatggacaaggtggggggccccactctttctctcctgcagtcccgtagctggggcctccttccttctcagggtctccccagcccagtccccttgctcccatcccactcggtgctgttgggtaggggccctgccaggaactgaccagctcagcgaggagccataatgtgcatatgtgcacaagcagggttgggggaggggggtgtgaggggttgtgcccaggtgttgccccctatctcctggggagggtgaggcagggcagggacagtctccagggtcagtccctggatgggtggttacctccccttcctccaccctaagccctggggccctgaaatggggtgggagggcaggggtgggagccctcctagtgggtttggggggttgggttcctgaatgcaccataatcgctgtatgaaatattaaaaagtctaaagtgaa

SEQ ID NO: 309806 - DNA, 2030 bp, Homo sapiens
aggctctgggcctagtgtctgtgtttgggaggggagcagtgcctgctgggggtcgggctagtggatagtctttgacctctgcctgccattcctgggtccccagctgttcctgttccagctgctccgtggcctggcctactgccaccggcagaaggtgctacaccgagacctcaagccccagaacctgctcatcaacgagaggggagagctcaagctggctgactttggcctggcccgagccaagtcaatcccaacaaagacatactccaatgaggtggtgacactgtggtaccggccccctgacatcctgcttgggtccacggactactccactcagattgacatgtggggtgtgggctgcatcttctatgagatggccacaggccgtcccctctttccgggctccacggtggaggaacagctacacttcatcttccgtatcttaggaaccccaactgaggagacgtggccaggcatcctgtccaacgaggagttcaagacatacaactaccccaagtaccgagccgaggcccttttgagccacgcaccccgacttgatagcgacggggccgacctcctcaccaagctgttgcagtttgagggtcgaaatcggatctccgcagaggatgccatgaaacatccattcttcctcagtctgggggagcggatccacaaacttcctgacactacttccatatttgcactaaaggagattcagctacaaaaggaggccagccttcggtcttcgtcgatgcctgactcaggcaggccagctttccgcgtggtggacaccgagttctaagccacagaccgaggccccagcaggcagcggctggagggatgccacacccctcacagggcagcccccaactacatcttccctgcttactctctgcctacctgcctgagccatgttcacctgcccacttgtcccctgctgcctgcccaaacaccccaccattggcctgtcaacccacccattggcctgtctgctgggtgctaacaaagctctcatcactccttcacttggtctgtctgtctctgtcttggtagttgccggtggacagcatggccgtgccagcctcccacactgaggccaggtctaccccccatcataccagcccccaggaccactaccccacggccagccaggggtccagagctagcccaggctggggatctcgactcagacaagatggtgacaatgccttgagtctgaggcatcctctgcctgctttcctgcctgccccacctgcctcatattgtgtgggcctttttttgtttgtttcattcattgtttttttttttttaattattttaaatgagatttttgttttttttaaatgcaatatctctgtatacagactggctgggccccaccccctgcgtgtggccctcccacagtattttgtgcaatgaagccctgctcccagcctttcagagacagggacacagcccctatttggaaccctgatcatcaccagaccctgggattggctatgggaaagcatgccacaggccactcgccttcctacccccgcccgccatccccagttgcagggggatctggggactaccagagactctgggaaatggacaaggtggggggccccactctttctctcctgcagtcccgtagctggggcctccttccttctcagggtctccccagcccagtccccttgctcccatcccactcggtgctgttgggtaggggccctgccaggaactgaccagctcagcgaggagccataatgtgcatatgtgcacaagcagggttgggggaggggggtgtgaggggttgtgcccaggtgttgccccctatctcctggggagggtgaggcagggcagggacagtctccagggtcagtccctggatgggtggttacctccccttcctccaccctaagccctggggccctgaaatggggtgggagggcaggggtgggagccctcctagtgggtttggggggttgggttcctgaatgcaccataatcgctgtatgaaatattaaaaagtctaaagtgaa

SEQ ID NO: 309807 - DNA, 4222 bp, Homo sapiens
gtgcgcatgcgcggagcgcggcgcgcgcggcggttgggccgttggctgttcggccctgggatccgccgccactccgcgatcagaccgctctgtgccgcgagccgccgtgagcactcggattcaagccggcgccaacgagtccgggggcatcgcccgcagcggccaagctcatggccggctgagcgggacgccgcctccgcctcagccaccgccgccgccgccgcctcctcctcctcagccggcggcggcccgggcccagcaaccatggctgaagactactgggacgggcgcctgcggcgaacaggaggagaaggaggtcgcgcggcctcatcccgggccgccgccccaggcgccgccgcgccggccccgcggctctgaggttgctcgcgcgcccccgccgatcgccatggatcggatgaagaagatcaaacggcagctgtcaatgacactccgaggtggccgaggcatagacaagaccaatggtgcccctgagcagataggcctggatgagagtggtggtggtggcggcagtgaccctggagaggcccccacacgtgctgctcctggggaacttcgttctgcacggggcccactcagctctgcaccagagattgtgcacgaggacttgaagatggggtctgatggggagagtgaccaggcttcagccacgtcctcggatgaggtgcagtctccagtgagagtgcgtatgcgcaaccatcccccacgcaagatctccactgaggacatcaacaagcgcctatcactaccagctgacatccggctgcctgagggctacctggagaagctgaccctcaatagccccatctttgacaagcccctcagccgccgcctccgtcgtgtcagcctatctgagattggctttgggaaactggagacctacattaagctggacaaactgggcgagggtacctatgccaccgtctacaaaggcaaaagcaagctcacagacaaccttgtggcactcaaggagatcagactggaacatgaagagggggcaccctgcaccgccatccgggaagtgtccctgctcaaggacctcaaacacgccaacatcgttacgctacatgacattatccacacggagaagtccctcacccttgtctttgagtacctggacaaggacctgaagcagtacctggatgactgtgggaacatcatcaacatgcacaacgtgaaactgttcctgttccagctgctccgtggcctggcctactgccaccggcagaaggtgctacaccgagacctcaagccccagaacctgctcatcaacgagaggggagagctcaagctggctgactttggcctggcccgagccaagtcaatcccaacaaagacatactccaatgaggtggtgacactgtggtaccggccccctgacatcctgcttgggtccacggactactccactcagattgacatgtggggtgtgggctgcatcttctatgagatggccacaggccgtcccctctttccgggctccacggtggaggaacagctacacttcatcttccgtatcttaggaaccccaactgaggagacgtggccaggcatcctgtccaacgaggagttcaagacatacaactaccccaagtaccgagccgaggcccttttgagccacgcaccccgacttgatagcgacggggccgacctcctcaccaagctgttgcagtttgagggtcgaaatcggatctccgcagaggatgccatgaaacatccattcttcctcagtctgggggagcggatccacaaacttcctgacagtgagtggagctggggaatggaccggccagcgtggggactgggaaacaggactgctggggccagctggcgggttgtgtaggattctggctgtgccacctctacgtggggggacatcttgttcacgtgtgtgatgggttgtatttgttatgaaaacattttttagttttcagttccttttacctttcatgaaaaatttaaaacatacataaaaatatatgcaatagcactttactttttttaaagtagacatttccttacatgtgctaaaaaatgcacaaatcataagtatactatacaatgaattttcataaatgaaacacatccttgtaactagcacaaaagtcaagaaacagaatgttaaaagctccccacccccagctcccttgcatctccttcagttattcccagccccttcccaaagggtggccactgttttgacctctaacagcaaggataagttttttctgtccttgtactttatagaaatagaatcacatgtgatgttctttttatatctggcttttaaaaactttttaatatggatattttcaaatatatgtatttatatattagtcaaagtaatatgatgagtccctaagtactccagtgagtcatcaattcatggtcaatctggttttatctatattctctctgattattttgaatcacatccaatcccagacatcatagcatttatccttaaataatttcagcatatacctataaaagatttttttaaaacaacaatattattatcaaacctacaaaaaacatttgctcactttccctatcttcccactggattaatatataaagcaaaccccaaacaccacccatcacctagacttaacaggtggtaattgcaataccataattcacttgacaaagttaataatgatttctttgtgtcatgtaatagtctatatttcatcttccctggttgtagctggtttgtgtatggaattgtttgacagataaaggtcaagcctctcagagaaggggcagctttttctaattcttcccatggggtcatatggggctggtcctagatgacctcatgggtcatcccccacttctatgtctcccccatctgtagctacttccatatttgcactaaaggagattcagctacaaaaggaggccagccttcggtcttcgtcgatgcctgactcaggcaggccagctttccgcgtggtggacaccgagttctaagccacagaccgaggccccagcaggcagcggctggagggatgccacacccctcacagggcagcccccaactacatcttccctgcttactctctgcctacctgcctgagccatgttcacctgcccacttgtcccctgctgcctgcccaaacaccccaccattggcctgtcaacccacccattggcctgtctgctgggtgctaacaaagctctcatcactccttcacttggtctgtctgtctctgtcttggtagttgccggtggacagcatggccgtgccagcctcccacactgaggccaggtctaccccccatcataccagcccccaggaccactaccccacggccagccaggggtccagagctagcccaggctggggatctcgactcagacaagatggtgacaatgccttgagtctgaggcatcctctgcctgctttcctgcctgccccacctgcctcatattgtgtgggcctttttttgtttgtttcattcattgtttttttttttttaattattttaaatgagatttttgttttttttaaatgcaatatctctgtatacagactggctgggccccaccccctgcgtgtggccctcccacagtattttgtgcaatgaagccctgctcccagcctttcagagacagggacacagcccctatttggaaccctgatcatcaccagaccctgggattggctatgggaaagcatgccacaggccactcgccttcctacccccgcccgccatccccagttgcagggggatctggggactaccagagactctgggaaatggacaaggtggggggccccactctttctctcctgcagtcccgtagctggggcctccttccttctcagggtctccccagcccagtccccttgctcccatcccactcggtgctgttgggtaggggccctgccaggaactgaccagctcagcgaggagccataatgtgcatatgtgcacaagcagggttgggggaggggggtgtgaggggttgtgcccaggtgttgccccctatctcctggggagggtgaggcagggcagggacagtctccagggtcagtccctggatgggtggttacctccccttcctccaccctaagccctggggccctgaaatggggtgggagggcaggggtgggagccctcctagtgggtttggggggttgggttcctgaatgcaccataatcgctgtatgaaatattaaaaagtctaaagtgaa

SEQ ID NO: 309808 - DNA, 3127 bp, Homo sapiens
gtgcgcatgcgcggagcgcggcgcgcgcggcggttgggccgttggctgttcggccctgggatccgccgccactccgcgatcagaccgctctgtgccgcgagccgccgtgagcactcggattcaagccggcgccaacgagtccgggggcatcgcccgcagcggccaagctcatggccggctgagcgggacgccgcctccgcctcagccaccgccgccgccgccgcctcctcctcctcagccggcggcggcccgggcccagcaaccatggctgaagactactgggacgggcgcctgcggcgaacaggaggagaaggaggtcgcgcggcctcatcccgggccgccgccccaggcgccgccgcgccggccccgcggctctgaggttgctcgcgcgcccccgccgatcgccatggatcggatgaagaagatcaaacggcagctgtcaatgacactccgaggtggccgaggcatagacaagaccaatggtgcccctgagcagataggcctggatgagagtggtggtggtggcggcagtgaccctggagaggcccccacacgtgctgctcctggggaacttcgttctgcacggggcccactcagctctgcaccagagattgtgcacgaggacttgaagatggggtctgatggggagagtgaccaggcttcagccacgtcctcggatgaggtgcagtctccagtgagagtgcgtatgcgcaaccatcccccacgcaagatctccactgaggacatcaacaagcgcctatcactaccagctgacatccggctgcctgagggctacctggagaagctgaccctcaatagccccatctttgacaagcccctcagccgccgcctccgtcgtgtcagcctatctgagattggctttgggaaactggagacctacattaagctggacaaactgggcgagggtacctatgccaccgtctacaaaggcaaaagcaagctcacagacaaccttgtggcactcaaggagatcagactggaacatgaagagggggcaccctgcaccgccatccgggaagtgtccctgctcaaggacctcaaacacgccaacatcgttacgctacatgacattatccacacggagaagtccctcacccttgtctttgagtacctggacaaggacctgaagcagtacctggatgactgtgggaacatcatcaacatgcacaacgtgaaactgttcctgttccagctgctccgtggcctggcctactgccaccggcagaaggtgctacaccgagacctcaagccccagaacctgctcatcaacgagaggggagagctcaagctggctgactttggcctggcccgagccaagtcaatcccaacaaagacatactccaatgaggtggtgacactgtggtaccggccccctgacatcctgcttgggtccacggactactccactcagattgacatgtggggtgtgggctgcatcttctatgagatggccacaggccgtcccctctttccgggctccacggtggaggaacagctacacttcatcttccgtatcttaggaaccccaactgaggagacgtggccaggcatcctgtccaacgaggagttcaagacatacaactaccccaagtaccgagccgaggcccttttgagccacgcaccccgacttgatagcgacggggccgacctcctcaccaagctgttgcagtttgagggtcgaaatcggatctccgcagaggatgccatgaaacatccattcttcctcagtctgggggagcggatccacaaacttcctgacactacttccatatttgcactaaaggagattcagctacaaaaggaggccagccttcggtcttcgtcgatgcctgactcaggcaggccagctttccgcgtggtggacaccgagttctaagccacagaccgaggccccagcaggcagcggctggagggatgccacacccctcacagggcagcccccaactacatcttccctgcttactctctgcctacctgcctgagccatgttcacctgcccacttgtcccctgctgcctgcccaaacaccccaccattggcctgtcaacccacccattggcctgtctgctgggtgctaacaaagctctcatcactccttaaaaaaaaaaaaaaaaaaaaaaagcgggcgcccgggcgccgtggcgccgtgcagtggagggccccgggcgcccggcccttggttctgggggccacgccgcccgcttgggggccccaggaaacagccccagggaagaaatcatttgcaagaagggtgggagaccgtgaggggctcgtaagccgggaggggtggcccctgtgttgtgggcatttccccaagcaggtgtaccccgtgctgggcaccgtgtctctgtgggacagatatttgcccccagaaatgtgttgcgcgtcccgtccacgtgttgctctgacctgggaggccccatcccacaactttgtgtacccacctctgtggaggcctatacaggagatcctcctctcaaaacgcggcggatttctcccaaaaattctccttcttcagaacagacagacgaagggagtgggacacacaaaaattctcccaagaatttctgagaagacccttaccgggaagagaattccccgcgtgggcgcgtggcgaccacaggggctcctcatatgaagttcgccccacagcgagaggttgggtgcgaacacactccttttcccggcggcgacaaagggggttctcctaaacgagttcacctgtgagaaagagaaaactcccacatcgggggttacaaaaaaagccacctctttgggagttggccccccccctcggctgggcaacaaacacgtccttcggggcgccccaagagggcactccgcgtgttcgccaccagtttccaaggcgggttttacacctccacgggcgagagaaaaaaggcctctttattacgaggggcccaggcggaggtcgtgttgcgggccaacaagagcttctcgtgtacaacgcgaagatgtgtacatcccccacgctggttccccccaacgagaagatactcccccagttggggagaggaaaagccccttacagattgtgccctcatgtgttcgcgaaaagactcttccgggaactcagcggaggagac

SEQ ID NO: 309809 - DNA, 1901 bp, Homo sapiens
gattttgcctaggacaccctcagtctcaactgcatacgtcatccccgagactttgcccatgactccctcattctagctgtcctttctctgatttccaggcctggcccgagccaagtcaatcccaacaaagacatactccaatgaggtggtgacactgtggtaccggccccctgacatcctgcttgggtccacggactactccactcagattgacatgtggggtgtgggctgcatcttctatgagatggccacaggccgtcccctctttccgggctccacggtggaggaacagctacacttcatcttccgtatcttaggaaccccaactgaggagacgtggccaggcatcctgtccaacgaggagttcaagacatacaactaccccaagtaccgagccgaggcccttttgagccacgcaccccgacttgatagcgacggggccgacctcctcaccaagctgttgcagtttgagggtcgaaatcggatctccgcagaggatgccatgaaacatccattcttcctcagtctgggggagcggatccacaaacttcctgacactacttccatatttgcactaaaggagattcagctacaaaaggaggccagccttcggtcttcgtcgatgcctgactcaggcaggccagctttccgcgtggtggacaccgagttctaagccacagaccgaggccccagcaggcagcggctggagggatgccacacccctcacagggcagcccccaactacatcttccctgcttactctctgcctacctgcctgagccatgttcacctgcccacttgtcccctgctgcctgcccaaacaccccaccattggcctgtcaacccacccattggcctgtctgctgggtgctaacaaagctctcatcactccttcacttggtctgtctgtctctgtcttggtagttgccggtggacagcatggccgtgccagcctcccacactgaggccaggtctaccccccatcataccagcccccaggaccactaccccacggccagccaggggtccagagctagcccaggctggggatctcgactcagacaagatggtgacaatgccttgagtctgaggcatcctctgcctgctttcctgcctgccccacctgcctcatattgtgtgggcctttttttgtttgtttcattcattgtttttttttttttaattattttaaatgagatttttgttttttttaaatgcaatatctctgtatacagactggctgggccccaccccctgcgtgtggccctcccacagtattttgtgcaatgaagccctgctcccagcctttcagagacagggacacagcccctatttggaaccctgatcatcaccagaccctgggattggctatgggaaagcatgccacaggccactcgccttcctacccccgcccgccatccccagttgcagggggatctggggactaccagagactctgggaaatggacaaggtggggggccccactctttctctcctgcagtcccgtagctggggcctccttccttctcagggtctccccagcccagtccccttgctcccatcccactcggtgctgttgggtaggggccctgccaggaactgaccagctcagcgaggagccataatgtgcatatgtgcacaagcagggttgggggaggggggtgtgaggggttgtgcccaggtgttgccccctatctcctggggagggtgaggcagggcagggacagtctccagggtcagtccctggatgggtggttacctccccttcctccaccctaagccctggggccctgaaatggggtgggagggcaggggtgggagccctcctagtgggtttggggggttgggttcctgaatgcaccataatcgctgtatgaaatattaaaaagtctaaagtgaa

SEQ ID NO: 309810 - DNA, 2512 bp, Homo sapiens
gtgcgcatgcgcggagcgcggcgcgcgcggcggttgggccgttggctgttcggccctgggatccgccgccactccgcgatcagaccgctctgtgccgcgagccgccgtgagcactcggattcaagccggcgccaacgagtccgggggcatcgcccgcagcggccaagctcatggccggctgagcgggacgccgcctccgcctcagccaccgccgccgccgccgcctcctcctcctcagccggcggcggcccgggcccagcaaccatggctgaagactactgggacgggcgcctgcggcgaacaggaggagaaggaggtcgcgcggcctcatcccgggccgccgccccaggcgccgccgcgccggccccgcggctctgaggttgctcgcgcgcccccgccgatcgccatggatcggatgaagaagatcaaacggcagctgtcaatgacactccgaggtggccgaggcatagacaagaccaatggtgcccctgagcagataggcctggatgagagtggtggtggtggcggcagtgaccctggagaggcccccacacgtgctgctcctggggaacttcgttctgcacggggcccactcagctctgcaccagagattgtgcacgaggacttgaagatggggtctgatggggagagtgaccaggcttcagccacgtcctcggatgaggtgcagtctccagtgagagtgcgtatgcgcaaccatcccccacgcaagatctccactgaggacatcaacaagcgcctatcactaccagctgacatccggctgcctgagggctacctggagaagctgaccctcaatagccccatctttgacaagcccctcagccgccgcctccgtcgtgtcagcctatctgagattggctttgggaaactggagacctacattaagctggacaaactgggcgagggtacctatgccaccgtctacaaaggcaaaagcaagctcacagacaaccttgtggcactcaaggagatcagactggaacatgaagagggggcaccctgcaccgccatccgggaagtgtccctgctcaaggacctcaaacacgccaacatcgttacgctacatgacattatccacacggagaagtccctcacccttgtctttgagtacctggacaaggacctgaagcagtacctggatgactgtgggaacatcatcaacatgcacaacgtgaaactgttcctgttccagctgctccgtggcctggcctactgccaccggcagaaggtgctacaccgagacctcaagccccagaacctgctcatcaacgagaggggagagctcaagctggctgactttggcctggcccgagccaagtcaatcccaacaaagacatactccaatgaggtggtgacactgtggtaccggccccctgacatcctgcttgggtccacggactactccactcagattgacatgtggggtgtgggctgcatcttctatgagatggccacaggccgtcccctctttccgggctccacggtggaggaacagctacacttcatcttccgtatcttaggaaccccaactgaggagacgtggccaggcatcctgtccaacgaggagttcaagacatacaactaccccaagtaccgagccgaggcccttttgagccacgcaccccgacttgatagcgacggggccgacctcctcaccaagctgttgcagtttgagggtcgaaatcggatctccgcagaggatgccatgaaacatccattcttcctcagtctgggggagcggatccacaaacttcctgacactacttccatatttgcactaaaggagattcagctacaaaaggaggccagccttcggtcttcgtcgatgcctgactcaggcaggccagctttccgcgtggtggacaccgagttctaagccacagaccgaggccccagcaggcagcggctggagggatgccacacccctcacagggcagcccccaactacatcttccctgcttactctctgcctacctgcctgagccatgttcacctgcccacttgtcccctgctgcctgcccaaacaccccaccattggcctgtcaacccacccattggcctgtctgctgggtgctaacaaagctctcatcactccttaaaaaaaaaaaaaaaaaaaaaaaaaaaaaaaaaaaaaaaaaaaaaaaaaaaaaaagagagagaggggcgggcgcgcgcgccaaaaagaatatctcccccgcggggggcgccccagtttccgcccgcgcgcccccacgtttttgggaccaggggggcgcccccataggagagagacgcccatatatcaaacacagcgcagcgagcgaggagccgcgccgcgcagtttacaacacacacggccgcggagacgggggaacacaccgctggacagagcgaggggacaactcggggggaggaggaaaacccccctcctcggggggggggccacacaaggcgggcaaacaactaatccccccagggaaatatcaagccccccgaggcaaaaataagcctt

SEQ ID NO: 309811 - DNA, 3084 bp, Homo sapiens
gtgcgcatgcgcggagcgcggcgcgcgcggcggttgggccgttggctgttcggccctgggatccgccgccactccgcgatcagaccgctctgtgccgcgagccgccgtgagcactcggattcaagccggcgccaacgagtccgggggcatcgcccgcagcggccaagctcatggccggctgagcgggacgccgcctccgcctcagccaccgccgccgccgccgcctcctcctcctcagccggcggcggcccgggcccagcaaccatggctgaagactactgggacgggcgcctgcggcgaacaggaggagaaggaggtcgcgcggcctcatcccgggccgccgccccaggcgccgccgcgccggccccgcggctctgaggttgctcgcgcgcccccgccgatcgccatggatcggatgaagaagatcaaacggcagctgtcaatgacactccgaggtggccgaggcatagacaagaccaatggtgcccctgagcagataggcctggatgagagtggtggtggtggcggcagtgaccctggagaggcccccacacgtgctgctcctggggaacttcgttctgcacggggcccactcagctctgcaccagagattgtgcacgaggacttgaagatggggtctgatggggagagtgaccaggcttcagccacgtcctcggatgaggtgcagtctccagtgagagtgcgtatgcgcaaccatcccccacgcaagatctccactgaggacatcaacaagcgcctatcactaccagctgacatccggctgcctgagggctacctggagaagctgaccctcaatagccccatctttgacaagcccctcagccgccgcctccgtcgtgtcagcctatctgagattggctttgggaaactggagacctacattaagctggacaaactgggcgagggtacctatgccaccgtctacaaaggcaaaagcaagctcacagacaaccttgtggcactcaaggagatcagactggaacatgaagagggggcaccctgcaccgccatccgggaagtgtccctgctcaaggacctcaaacacgccaacatcgttacgctacatgacattatccacacggagaagtccctcacccttgtctttgagtacctggacaaggacctgaagcagtacctggatgactgtgggaacatcatcaacatgcacaacgtgaaactgttcctgttccagctgctccgtggcctggcctactgccaccggcagaaggtgctacaccgagacctcaagccccagaacctgctcatcaacgagaggggagagctcaagctggctgactttggcctggcccgagccaagtcaatcccaacaaagacatactccaatgaggtggtgacactgtggtaccggccccctgacatcctgcttgggtccacggactactccactcagattgacatgtggggtgtgggctgcatcttctatgagatggccacaggccgtcccctctttccgggctccacggtggaggaacagctacacttcatcttccgtatcttaggaaccccaactgaggagacgtggccaggcatcctgtccaacgaggagttcaagacatacaactaccccaagtaccgagccgaggcccttttgagccacgcaccccgacttgatagcgacggggccgacctcctcaccaagctgttgcagtttgagggtcgaaatcggatctccgcagaggatgccatgaaacatccattcttcctcagtctgggggagcggatccacaaacttcctgacactacttccatatttgcactaaaggagattcagctacaaaaggaggccagccttcggtcttcgtcgatgcctgactcaggcaggccagctttccgcgtggtggacaccgagttctaagccacagaccgaggccccagcaggcaactacatcttccctgcttactctctgcctacctgcctgagccatgttcacctgcccacttgtcccctgctgcctgcccaaacaccccaccattggcctgtcaacccacccattggcctgtctgctgggtgctaacaaagctctcatcactccttcacttggtctgtctgtctctgtcttggtagttgccggtggacagcatggccgtgccagcctcccacactgaggccaggtctaccccccatcataccagcccccaggaccactaccccacggccagccaggggtccagagctagcccaggctggggatctcgactcagacaagatggtgacaatgccttgagtctgaggcatcctctgcctgctttcctgcctgccccacctgcctcatattgtgtgggcctttttttgtttgtttcattcattgtttttttttttttaattattttaaatgagatttttgttttttttaaatgcaatatctctgtatacagactggctgggccccaccccctgcgtgtggccctcccacagtattttgtgcaatgaagccctgctcccagcctttcagagacagggacacagcccctatttggaaccctgatcatcaccagaccctgggattggctatgggaaagcatgccacaggccactcgccttcctacccccgcccgccatccccagttgcagggggatctggggactaccagagactctgggaaatggacaaggtggggggccccactctttctctcctgcagtcccgtagctggggcctccttccttctcagggtctccccagcccagtccccttgctcccatcccactcggtgctgttgggtaggggccctgccaggaactgaccagctcagcgaggagccataatgtgcatatgtgcacaagcagggttgggggaggggggtgtgaggggttgtgcccaggtgttgccccctatctcctggggagggtgaggcagggcagggacagtctccagggtcagtccctggatgggtggttacctccccttcctccaccctaagccctggggccctgaaatggggtgggagggcaggggtgggagccctcctagtgggtttggggggttgggttcctgaatgcaccataatcgctgtatgaaatattaaaaagtctaaagtgaa

SEQ ID NO: 309812 - DNA, 3150 bp, Homo sapiens
gtgcgcatgcgcggagcgcggcgcgcgcggcggttgggccgttggctgttcggccctgggatccgccgccactccgcgatcagaccgctctgtgccgcgagccgccgtgagcactcggattcaagccggcgccaacgagtccgggggcatcgcccgcagcggccaagctcatggccggctgagcgggacgccgcctccgcctcagccaccgccgccgccgccgcctcctcctcctcagccggcggcggcccgggcccagcaaccatggctgaagactactgggacgggcgcctgcggcgaacaggaggagaaggaggtcgcgcggcctcatcccgggccgccgccccaggcgccgccgcgccggccccgcggctctgaggttgctcgcgcgcccccgccgatcgccatggatcggatgaagaagatcaaacggcagctgtcaatgacactccgaggtggccgaggcatagacaagaccaatggtgcccctgagcagataggcctggatgagagtggtggtggtggcggcagtgaccctggagaggcccccacacgtgctgctcctggggaacttcgttctgcacggggcccactcagctctgcaccagagattgtgcacgaggacttgaagatggggtctgatggggagagtgaccaggcttcagccacgtcctcggatgaggtgcagtctccagtgagagtgcgtatgcgcaaccatcccccacgcaagatctccactgaggacatcaacaagcgcctatcactaccagctgacatccggctgcctgagggctacctggagaagctgaccctcaatagccccatctttgacaagcccctcagccgccgcctccgtcgtgtcagcctatctgagattggctttgggaaactggagacctacattaagctggacaaactgggcgagggtacctatgccaccgtctacaaaggcaaaagcaagctcacagacaaccttgtggcactcaaggagatcagactggaacatgaagagggggcaccctgcaccgccatccgggaagtgtccctgctcaaggacctcaaacacgccaacatcgttacgctacatgacattatccacacggagaagtccctcacccttgtctttgagtacctggacaaggacctgaagcagtacctggatgactgtgggaacatcatcaacatgcacaacgtgaaactgttcctgttccagctgctccgtggcctggcctactgccaccggcagaaggtgctacaccgagacctcaagccccagaacctgctcatcaacgagaggggagagctcaagctggctgactttggcctggcccgagccaagtcaatcccaacaaagacatactccaatgaggtggtgacactgtggtaccggccccctgacatcctgcttgggtccacggactactccactcagattgacatgtggggtgtgggctgcatcttctatgagatggccacaggccgtcccctctttccgggctccacggtggaggaacagctacacttcatcttccgtatcttaggaaccccaactgaggagacgtggccaggcatcctgtccaacgaggagttcaagacatacaactaccccaagtaccgagccgaggcccttttgagccacgcaccccgacttgatagcgacggggccgacctcctcaccaagctgttgcagtttgagggtcgaaatcggatctccgcagaggatgccatgaaacatccattcttcctcagtctgggggagcggatccacaaacttcctgacactacttccatatttgcactaaaggagattcagctacaaaaggaggccagccttcggtcttcgtcgatgcctgactcagccatctgctctgctttcccccacaggcaggccagctttccgcgtggtggacaccgagttctaagccacagaccgaggccccagcaggcagcggctggagggatgccacacccctcacagggcagcccccaactacatcttccctgcttactctctgcctacctgcctgagccatgttcacctgcccacttgtcccctgctgcctgcccaaacaccccaccattggcctgtcaacccacccattggcctgtctgctgggtgctaacaaagctctcatcactccttcacttggtctgtctgtctctgtcttggtagttgccggtggacagcatggccgtgccagcctcccacactgaggccaggtctaccccccatcataccagcccccaggaccactaccccacggccagccaggggtccagagctagcccaggctggggatctcgactcagacaagatggtgacaatgccttgagtctgaggcatcctctgcctgctttcctgcctgccccacctgcctcatattgtgtgggcctttttttgtttgtttcattcattgtttttttttttttaattattttaaatgagatttttgttttttttaaatgcaatatctctgtatacagactggctgggccccaccccctgcgtgtggccctcccacagtattttgtgcaatgaagccctgctcccagcctttcagagacagggacacagcccctatttggaaccctgatcatcaccagaccctgggattggctatgggaaagcatgccacaggccactcgccttcctacccccgcccgccatccccagttgcagggggatctggggactaccagagactctgggaaatggacaaggtggggggccccactctttctctcctgcagtcccgtagctggggcctccttccttctcagggtctccccagcccagtccccttgctcccatcccactcggtgctgttgggtaggggccctgccaggaactgaccagctcagcgaggagccataatgtgcatatgtgcacaagcagggttgggggaggggggtgtgaggggttgtgcccaggtgttgccccctatctcctggggagggtgaggcagggcagggacagtctccagggtcagtccctggatgggtggttacctccccttcctccaccctaagccctggggccctgaaatggggtgggagggcaggggtgggagccctcctagtgggtttggggggttgggttcctgaatgcaccataatcgctgtatgaaatattaaaaagtctaaagtgaa

SEQ ID NO: 309813 - DNA, 2836 bp, Homo sapiens
gtgcgcatgcgcggagcgcggcgcgcgcggcggttgggccgttggctgttcggccctgggatccgccgccactccgcgatcagaccgctctgtgccgcgagccgccgtgagcactcggattcaagccggcgccaacgagtccgggggcatcgcccgcagcggccaagctcatggccggctgagcgggacgccgcctccgcctcagccaccgccgccgccgccgcctcctcctcctcagccggcggcggcccgggcccagcaaccatggctgaagactactgggacgggcgcctgcggcgaacaggaggagaaggaggtcgcgcggcctcatcccgggccgccgccccaggcgccgccgcgccggccccgcggctctgaggttgctcgcgcgcccccgccgatcgccatggatcggatgaagaagatcaaacggcagctgtcaatgacactccgaggtggccgaggcatagacaagaccaatggtgcccctgagcagataggcctggatgagagtggtggtggtggcggcagtgaccctggagaggcccccacacgtgctgctcctggggaacttcgttctgcacggggcccactcagctctgcaccagagattgtgcacgaggacttgaagatggggtctgatggggagagtgaccaggcttcagccacgtcctcggatgaggtgcagtctccagtgagagtgcgtatgcgcaaccatcccccacgcaagatctccactgaggacatcaacaagcgcctatcactaccagctgacatccggctgcctgagggctacctggagaagctgaccctcaatagccccatctttgacaagcccctcagccgccgcctccgtcgtgtcagcctatctgagattggctttgggaaactggagacctacattaagctggacaaactgggcgagggtacctatgccaccgtctacaaaggcaaaagcaagctcacagacaaccttgtggcactcaaggagatcagactggaacatgaagagggggcaccctgcaccgccatccgggaagtgtccctgctcaaggacctcaaacacgccaacatcgttacgctacatgacattatccacacggagaagtccctcacccttgtctttgagtacctggacaaggacctgaagcagtacctggatgactgtgggaacatcatcaacatgcacaacgtgaaactgttcctgttccagctgctccgtggcctggcctactgccaccggcagaaggtgctacaccgagacctcaagccccagaacctgctcatcaacgagaggggagagctcaagctggctgactttggcctggcccgagccaagtcaatcccaacaaagacatactccaatgaggtggtgacactgtggtaccggccccctgacatcctgcttgggtccacggactactccactcagattgacatgtggggtgtgggctgcatcttctatgagatggccacaggccgtcccctctttccgggctccacggtggaggaacagctacacttcatcttccgtatcttaggaaccccaactgaggagacgtggccaggcatcctgtccaacgaggagttcaagacatacaactaccccaagtaccgagccgaggcccttttgagccacgcaccccgacttgatagcgacggggccgacctcctcaccaagctgttgcagtttgagggtcgaaatcggatctccgcagaggatgccatgaaacatccattcttcctcagtctgggggagcggatccacaaacttcctgacactacttccatatttgcactaaaggagattcagctacaaaaggaggccagccttcggtcttcgtcgatgcctgactcagttgccggtggacagcatggccgtgccagcctcccacactgaggccaggtctaccccccatcataccagcccccaggaccactaccccacggccagccaggggtccagagctagcccaggctggggatctcgactcagacaagatggtgacaatgccttgagtctgaggcatcctctgcctgctttcctgcctgccccacctgcctcatattgtgtgggcctttttttgtttgtttcattcattgtttttttttttttaattattttaaatgagatttttgttttttttaaatgcaatatctctgtatacagactggctgggccccaccccctgcgtgtggccctcccacagtattttgtgcaatgaagccctgctcccagcctttcagagacagggacacagcccctatttggaaccctgatcatcaccagaccctgggattggctatgggaaagcatgccacaggccactcgccttcctacccccgcccgccatccccagttgcagggggatctggggactaccagagactctgggaaatggacaaggtggggggccccactctttctctcctgcagtcccgtagctggggcctccttccttctcagggtctccccagcccagtccccttgctcccatcccactcggtgctgttgggtaggggccctgccaggaactgaccagctcagcgaggagccataatgtgcatatgtgcacaagcagggttgggggaggggggtgtgaggggttgtgcccaggtgttgccccctatctcctggggagggtgaggcagggcagggacagtctccagggtcagtccctggatgggtggttacctccccttcctccaccctaagccctggggccctgaaatggggtgggagggcaggggtgggagccctcctagtgggtttggggggttgggttcctgaatgcaccataatcgctgtatgaaatattaaaaagtctaaagtgaa

SEQ ID NO: 309814 - DNA, 2019 bp, Homo sapiens
  misc_feature (1971)..(1971): n is a, c, g, or t
  misc_feature (1994)..(1994): n is a, c, g, or t
  misc_feature (2010)..(2010): n is a, c, g, or t
gtgcgcatgcgcggagcgcggcgcgcgcggcggttgggccgttggctgttcggccctgggatccgccgccactccgcgatcagaccgctctgtgccgcgagccgccgtgagcactcggattcaagccggcgccaacgagtccgggggcatcgcccgcagcggccaagctcatggccggctgagcgggacgccgcctccgcctcagccaccgccgccgccgccgcctcctcctcctcagccggcggcggcccgggcccagcaaccatggctgaagactactgggacgggcgcctgcggcgaacaggaggagaaggaggtcgcgcggcctcatcccgggccgccgccccaggcgccgccgcgccggccccgcggctctgaggttgctcgcgcgcccccgccgatcgccatggatcggatgaagaagatcaaacggcagctgtcaatgacactccgaggtggccgaggcatagacaagaccaatggtgcccctgagcagataggcctggatgagagtggtggtggtggcggcagtgaccctggagaggcccccacacgtgctgctcctggggaacttcgttctgcacggggcccactcagctctgcaccagagattgtgcacgaggacttgaagatggggtctgatggggagagtgaccaggcttcagccacgtcctcggatgaggtgcagtctccagtgagagtgcgtatgcgcaaccatcccccacgcaagatctccactgaggacatcaacaagcgcctatcactaccagctgacatccggctgcctgagggctacctggagaagctgaccctcaatagccccatctttgacaagcccctcagccgccgcctccgtcgtgtcagcctatctgagattggctttgggaaactggagacctacattaagctggacaaactgggcgagggtacctatgccaccgtctacaaaggcaaaagcaagctcacagacaaccttgtggcactcaaggagatcagactggaacatgaagagggggcaccctgcaccgccatccgggaagtgtccctgctcaaggacctcaaacacgccaacatcgttacgctacatgacattatccacacggagaagtccctcacccttgtctttgagtacctggacaaggacctgaagcagtacctggatgactgtgggaacatcatcaacatgcacaacgtgaaactgttcctgttccagctgctccgtggcctggcctactgccaccggcagaaggtgctacaccgagacctcaagccccagaacctgctcatcaacgagaggggagagctcaagctggctgactttggcctggcccgagccaagtcaatcccaacaaagacatactccaatgaggtggtgacactgtggtaccggccccctgacatcctgcttgggtccacggactactccactcagattgacatgtggggtgtgggctgcatcttctatgagatggccacaggccgtcccctctttccgggctccacggtggaggaacagctacacttcatcttccgtatcttaggaaccccaactgaggagacgtggccaggcatcctgtccaacgaggagttcaagacatacaactaccccaagtaccgagccgaggcccttttgagccacgcaccccgacttgatagcgacggggccgacctcctcaccaagctgttgcagtttgagggtcgaaatcggatctccgcagaggatgccatgaaacatccattcttcctcagtctgggggagcggatccacaaacttcctgacactacttccatatttgcactaaaggagattcagctacaaaaggaggccagccttcggtcttcgtcgatgcctgactcaggcaggccagctttccgcgtggtggacaccgagttctaagccacagaccgaggccccagcaggcagcggctggagggatgccacacccctcacagggcagccccaactacatnttcctgccggattccagctgagncggtctacataaccanttgtttagc

SEQ ID NO: 309815 - DNA, 2142 bp, Homo sapiens
gtgcgcatgcgcggagcgcggcgcgcgcggcggttgggccgttggctgttcggccctgggatccgccgccactccgcgatcagaccgctctgtgccgcgagccgccgtgagcactcggattcaagccggcgccaacgagtccgggggcatcgcccgcagcggccaagctcatggccggctgagcgggacgccgcctccgcctcagccaccgccgccgccgccgcctcctcctcctcagccggcggcggcccgggcccagcaaccatggctgaagactactgggacgggcgcctgcggcgaacaggaggagaaggaggtcgcgcggcctcatcccgggccgccgccccaggcgccgccgcgccggccccgcggctctgaggttgctcgcgcgcccccgccgatcgccatggatcggatgaagaagatcaaacggcagctgtcaatgacactccgaggtggccgaggcatagacaagaccaatggtgcccctgagcagataggcctggatgagagtggtggtggtggcggcagtgaccctggagaggcccccacacgtgctgctcctggggaacttcgttctgcacggggcccactcagctctgcaccagagattgtgcacgaggacttgaagatggggtctgatggggagagtgaccaggcttcagccacgtcctcggatgaggtgcagtctccagtgagagtgcgtatgcgcaaccatcccccacgcaagatctccactgaggacatcaacaagcgcctatcactaccagctgacatccggctgcctgagggctacctggagaagctgaccctcaatagccccatctttgacaagcccctcagccgccgcctccgtcgtgtcagcctatctgagattggctttgggaaactggagacctacattaagctggacaaactgggcgagggtacctatgccaccgtctacaaaggcaaaagcaagctcacagacaaccttgtggcactcaaggagatcagactggaacatgaagagggggcaccctgcaccgccatccgggaagtgtccctgctcaaggacctcaaacacgccaacatcgttacgctacatgacattatccacacggagaagtccctcacccttgtctttgagtacctggacaaggacctgaagcagtacctggatgactgtgggaacatcatcaacatgcacaacgtgaaactgttcctgttccagctgctccgtggcctggcctactgccaccggcagaaggtgctacaccgagacctcaagccccagaacctgctcatcaacgagaggggagagctcaagctggctgactttggcctggcccgagccaagtcaatcccaacaaagacatactccaatgaggtggtgacactgtggtaccggccccctgacatcctgcttgggtccacggactactccactcagattgacatgtggggtgtgggctgcatcttctatgagatggccacaggccgtcccctctttccgggctccacggtggaggaacagctacacttcatcttccgtatcttaggaaccccaactgaggagacgtggccaggcatcctgtccaacgaggagttcaagacatacaactaccccaagtaccgagccgaggcccttttgagccacgcaccccgacttgatagcgacggggccgacctcctcaccaagctgttgcagtttgagggtcgaaatcggatctccgcagaggatgccatgaaacatccattcttcctcagtctgggggagcggatccacaaacttcctgacactacttccatatttgcactaaaggagattcagctacaaaaggaggccagccttcggtcttcgtcgatgcctgactcagttgccggtggacagcatggccgtgccagcctcccacactgaggccaggtctaccccccatcataccagcccccaggaccactaccccacggccagccagggcagggacagtctccagggtcagtccctggatgggtggttacctccccttcctccaccctaagccctggggccctgaaatggggtgggagggcaggggtgggagccctcctagtgggtttggggggttgggttcctgaatgcaccataatcgctgtatgaaatattaaaaagtctaaagtgaa

SEQ ID NO: 309816 - DNA, 1444 bp, Homo sapiens
  misc_feature (1444)..(1444): n is a, c, g, or t
gtgcgcatgcgcggagcgcggcgcgcgcggcggttgggccgttggctgttcggccctgggatccgccgccactccgcgatcagaccgctctgtgccgcgagccgccgtgagcactcggattcaagccggcgccaacgagtccgggggcatcgcccgcagcggccaagctcatggccggctgagcgggacgccgcctccgcctcagccaccgccgccgccgccgcctcctcctcctcagccggcggcggcccgggcccagcaaccatggctgaagactactgggacgggcgcctgcggcgaacaggaggagaaggaggtcgcgcggcctcatcccgggccgccgccccaggcgccgccgcgccggccccgcggctctgaggttgctcgcgcgcccccgccgatcgccatggatcggatgaagaagatcaaacggcagctgtcaatgacactccgaggtggccgaggcatagacaagaccaatggtgcccctgagcagataggcctggatgagagtggtggtggtggcggcagtgaccctggagaggcccccacacgtgctgctcctggggaacttcgttctgcacggggcccactcagctctgcaccagagattgtgcacgaggacttgaagatggggtctgatggggagagtgaccaggcttcagccacgtcctcggatgaggtgcagtctccagtgagagtgcgtatgcgcaaccatcccccacgcaagatctccactgaggacatcaacaagcgcctatcactaccagctgacatccggctgcctgagggctacctggagaagctgaccctcaatagccccatctttgacaagcccctcagccgccgcctccgtcgtgtcagcctatctgagattggctttgggaaactggagacctacattaagctggacaaactgggcgagggtacctatgccaccgtctacaaaggcaaaagcaagctcacagacaaccttgtggcactcaaggagatcagactggaacatgaagagggggcaccctgcaccgccatccgggaagtgtccctgctcaaggacctcaaacacgccaacatcgttacgctacatgacattatccacacggagaagtccctcacccttgtctttgagtacctggaccagacctgaagcagtacctgggatgactgtgggagcctctccaacctgccccacgtggaactgtctgttccagctggtccgtggctggcttcctgccaccgggagtggtaccccggactcagcccgaactgtctcacgagaggggcgcccacgcgctgatttgcgggcgggcagtttccccaaattcctggggggcacttggtcgcccgcagtcgtgggccgccccccagttgggggggggtttaaagaggccctgccggggagacctcttccggggcgttgctcccacggtgcttggggtctcan

SEQ ID NO: 309817 - DNA, 450 bp, Homo sapiens
ggaagggttccactaggtgacttttgcttccccaccccccagttcaacctgccctagatgtacctgagcttccctgggctcaggtacatcaccctctccccgagggactccaggtttcctgtgggggccacgtgcacacatgtgtgatgatggaatatgtttcgtgggggatggggtgtcctgtggttcctgaccccacctggcctgccctacccctctccctgccaccagattgtgcacgaggacttgaagatggggtctgatggggagagtgaccaggcttcagccacgtcctcggatgaggtgcagtctccagtgagagtgcgtatgcgcaaccatcccccacgcaagatctccactgaggtgcttgaccccgtctggatggtggaggaactggaaaagggggttggacctggggaggtggagctcatgatcctgtttctctcttgc

SEQ ID NO: 309818 - DNA, 1807 bp, Homo sapiens
agcggctttcccctcccgcgcgcccgcccgccgcctgccgccgccgccgccgccgccggagctctgtagtatggcatcgaggagaatggagaccaaacctgtgataacctgtctcaaaaccctcctcatcatctactccttcgtcttctggatcactggggtgatcctgctggctgttggagtctggggcaaacttactctgggcacctatatctcccttattgccgagaactccacaaatgctccctatgtgctcatcggaactggcaccactattgttgtctttggcctgtttggatgctttgctacatgtcgtggtagcccatggatgctgaaactgtatgccatgtttctgtccctggtgttcctggctgagctcgtagctggcatttcagggtttgtgtttcgtcatgagatcaaggacaccttcctgaggacttacacggacgctatgcagacttacaatggcaatgatgagaggagccgggcagtggaccatgtgcagcgcagcctgagctgctgtggtgtgcagaactacaccaactggagcaccagcccctacttcctggagcatggcatcccccccagctgctgcatgaacgaaactgattgtaatccccaggatctacacaatctgactgtggccgccaccaaagttaaccagaagggttgttatgatctggtaactagtttcatggagactaacatgggaatcatcgctggagtggcgtttggaatcgcattctcccagttaattggcatgctgctggcctgctgtctgtcccggttcatcacggccaatcagtatgagatggtgtaaggagaagtctttcaagaatgacggaataagagacctgttttaaaaaggaactgcagcaatctttgaaagacttccaaagaatgttagagcacagtacataatacacttgccctgctccctctaccccttaccccacaacgtgcaactgacactcccacccagtctctgctccacctttcagcccacgtcacgtgtagtgtccattttgtgaagccctgttgtgccacagagtgtagccaggtccccctgcagctagtcctagtgaacctcaccccgaggccctgcatgggccagcccctccatctgtacttggtccaactgcaactcatcatcggtgactggttatcacaccatcgctggcccctttgggccctgcatgtagtgtgggaggctcctgttagctcctcactgtggtaaatgccacacacctttaagtagataagcagacgatagttatctgttcttttgacttaatctcatttggtttgattttccctctactaaggctttcctaccttcttcaggctgcctaagacatgtaacgaaacacttcaataattgtccatgaggagaaaaaaagcatgtgtcatgcatgaaggaaactgaacttgaggtggcctccttgcttgttacatacctgggtatgtgtaggcagtttagtgcatctttgcctctcagttgaaacctgtataaccctgttacaaagctgtgttgttgcttcttgtgaaggccatgatattttgtttttccccaattaattgctattgtgttattttactacttctctctgtattttttcttgcattgacattatagacattgaggacctcatccaaacaatttaaaaatgagtgtgaagggggaacaagtcaaaatatttttaaaagatcttcaaaaataatgcctctgtctagcatgccaacaagaatgcattgatattgtgaacatttgtgatatatgtattaataaatagagcaattacaagca

SEQ ID NO: 309819 - DNA, 1218 bp, Homo sapiens
actctaactaactaactaactaactaactaactctaactaactaactaactaactaactaactctaactaactaactaactaactaactaactctaactaactaactaactaactaactaactctaactaactaactaactaactaactaactctaactaactaactaactaactaactaactctaactaactaactaactaactaactaactctaactaactaactaactaactaactaactctaactaactaactaactaactaactaactctaactaactaactaactaactaactaactctaactaactaactaactaactaactaactctaactaactaactaactaactaactaactctaactaactaactaactaactaactaactctaactaactaactaactaactaactaactctaactaactaactaactaactaactaactctaactaactaactaactaactaactaactctaactaactaactaactaactaactaactctaactaactaactaactaactaactaactctaactaactaactaactaactaactaactctaactaactaactaactaactaactaactctaactaactaactaactaactaactaactctaactaactaactaactaactaactaactctaactaactaactaactaactaactaactctaactaactaactaactaactaactaactctaactaactaactaactaactaactaactctaactaactaactatgtaacgaaacacttcaataattgtccatgaggagaaaaaaagcatgtgtcatgcatgaaggaaactgaacttgaggtggcctccttgcttgttacatacctgggtatgtgtaggcagtttagtgcatctttgcctctcagttgaaacctgtataaccctgttacaaagctgtgttgttgcttcttgtgaaggccatgatattttgtttttccccaattaattgctattgtgttattttactacttctctctgtattttttcttgcattgacattatagacattgaggacctcatccaaacaatttaaaaatgagtgtgaagggggaacaagtcaaaatatttttaaaagatcttcaaaaataatgcctctgtctagcatgccaacaagaatgcattgatattgtgaacatttgtgatatatgtattaataaatagagcaattacaagca

SEQ ID NO: 309820 - DNA, 325 bp, Homo sapiens
gagagagagagagagagagagagagagagagagagagagagagagagagagagagcttcttgtgaaggccatgatattttgtttttccccaattaattgctattgtgttattttactacttctctctgtattttttcttgcattgacattatagacattgaggacctcatccaaacaatttaaaaatgagtgtgaagggggaacaagtcaaaatatttttaaaagatcttcaaaaataatgcctctgtctagcatgccaacaagaatgcattgatattgtgaacatttgtgatatatgtattaataaatagagcaattacaagca

SEQ ID NO: 309821 - DNA, 2236 bp, Homo sapiens
  misc_feature (1823)..(1823): n is a, c, g, or t
  misc_feature (1828)..(1828): n is a, c, g, or t
  misc_feature (1831)..(1831): n is a, c, g, or t
  misc_feature (1852)..(1852): n is a, c, g, or t
  misc_feature (1856)..(1856): n is a, c, g, or t
  misc_feature (1860)..(1860): n is a, c, g, or t
agcggctttcccctcccgcgcgcccgcccgccgcctgccgccgccgccgccgccgccggagctctgtagtatggcatcgaggagaatggagaccaaacctgtgataacctgtctcaaaaccctcctcatcatctactccttcgtcttctggatcactggggtgatcctgctggctgttggagtctggggcaaacttactctgggcacctatatctcccttattgccgagaactccacaaatgctccctatgtgctcatcggaactggcaccactattgttgtctttggcctgtttggatgctttgctacatgtcgtggtagcccatggatgctgaaactgtatgccatgtttctgtccctggtgttcctggctgagctcgtagctggcatttcagggtttgtgtttcgtcatgagatcaaggacaccttcctgaggacttacacggacgctatgcagacttacaatggcaatgatgagaggagccgggcagtggaccatgtgcagcgcagcctgagctgctgtggtgtgcagaactacaccaactggagcaccagcccctacttcctggagcatggcatcccccccagctgctgcatgaacgaaactgattgtaatccccaggatctacacaatctgactgtggccgccaccaaagttaaccagaagggttgttatgatctggtaactagtttcatggagactaacatgggaatcatcgctggagtggcgtttggaatcgcattctcccagttaattggcatgctgctggcctgctgtctgtcccggttcatcacggccaatcagtatgagatggtgtaaggagaagtctttcaagaatgacggaataagagacctgttttaaaaaggaactgcagcaatctttgaaagacttccaaagaatgttagagcacagtacataatacacttgccctgctccctctaccccttaccccacaacgtgcaactgacactcccacccagtctctgctccacctttcagcccacgtcacgtgtagtgtccattttgtgaagccctgttgtgccacagagtgtagccaggtccccctgcagctagtcctagtgaacctcaccccgaggccctgcatgggccagcccctccatctgtacttggtccaactgcaactcatcatcggtgactggttatcacaccatcgctggcccctttgggccctgcatgtagtgtgggaggctcctgttagctcctcactgtggtaaatgccacacacctttaagtagataagcagacgatagttatctgttcttttgacttaatctcatttggtttgattttccctctactaaggctttcctaccttcttcaggctgcctaagacatgtaacgaaacacttcaataattgtccatgaggagaaaaaaagcatgtgtcatgcatgaaggaaactgaacttgaggtggcctccttgcttgttacatacctgggtatgtgtaggcagtttagtgcatctttgcctctcagttgaaacctgtataaccctgttacaaagctgtgttgttgcttcttgtgaaggccatgatattttgtttttccccaattaattgctattgtgttattttactacttctctctgtattttttcttgcattgacattatagacattgaggacctcatccaaacaatttaaaaatgagtgtgaagggggaacaagtcaaaatatttttaaaagatcttcaaaaataatgcctctgtctagcatgccaacaagaatgcattgatattgtgaacatttgtgatatatgtattaataaatagagcaattacaagcaaaaaaaaaaaaaaaanaaaanaanaaaaaaaaaaaaaaacaacanacanaaancaacaaaacaaaaaacaaaaggggggggggggcgcaaaaaaaatacccccggggaggagcccaacatatccgcgcacaccaagtttgtggcaaagaaggaggggccccaatagaggagagacgacacaaacaacaagagacgagcaggcgggcgaataaaacaagcaggagaaggagcaaaaaagcgcacacgggaatactgtgagaggagcagccccacacaaggggggggggacgacacaaaggggagaagaacccaccaccacaagagacaagaacccccagggggaacatacaaaagaaaagaacaaaagaggagaaaccaacccaaacgccgccggaagaagaacgccaccgagagcacaagcaaattacg

SEQ ID NO: 309822 - DNA, 2001 bp, Homo sapiens
  misc_feature (1823)..(1823): n is a, c, g, or t
  misc_feature (1828)..(1828): n is a, c, g, or t
  misc_feature (1831)..(1831): n is a, c, g, or t
  misc_feature (1876)..(1877): n is a, c, g, or t
  misc_feature (1885)..(1885): n is a, c, g, or t
agcggctttcccctcccgcgcgcccgcccgccgcctgccgccgccgccgccgccgccggagctctgtagtatggcatcgaggagaatggagaccaaacctgtgataacctgtctcaaaaccctcctcatcatctactccttcgtcttctggatcactggggtgatcctgctggctgttggagtctggggcaaacttactctgggcacctatatctcccttattgccgagaactccacaaatgctccctatgtgctcatcggaactggcaccactattgttgtctttggcctgtttggatgctttgctacatgtcgtggtagcccatggatgctgaaactgtatgccatgtttctgtccctggtgttcctggctgagctcgtagctggcatttcagggtttgtgtttcgtcatgagatcaaggacaccttcctgaggacttacacggacgctatgcagacttacaatggcaatgatgagaggagccgggcagtggaccatgtgcagcgcagcctgagctgctgtggtgtgcagaactacaccaactggagcaccagcccctacttcctggagcatggcatcccccccagctgctgcatgaacgaaactgattgtaatccccaggatctacacaatctgactgtggccgccaccaaagttaaccagaagggttgttatgatctggtaactagtttcatggagactaacatgggaatcatcgctggagtggcgtttggaatcgcattctcccagttaattggcatgctgctggcctgctgtctgtcccggttcatcacggccaatcagtatgagatggtgtaaggagaagtctttcaagaatgacggaataagagacctgttttaaaaaggaactgcagcaatctttgaaagacttccaaagaatgttagagcacagtacataatacacttgccctgctccctctaccccttaccccacaacgtgcaactgacactcccacccagtctctgctccacctttcagcccacgtcacgtgtagtgtccattttgtgaagccctgttgtgccacagagtgtagccaggtccccctgcagctagtcctagtgaacctcaccccgaggccctgcatgggccagcccctccatctgtacttggtccaactgcaactcatcatcggtgactggttatcacaccatcgctggcccctttgggccctgcatgtagtgtgggaggctcctgttagctcctcactgtggtaaatgccacacacctttaagtagataagcagacgatagttatctgttcttttgacttaatctcatttggtttgattttccctctactaaggctttcctaccttcttcaggctgcctaagacatgtaacgaaacacttcaataattgtccatgaggagaaaaaaagcatgtgtcatgcatgaaggaaactgaacttgaggtggcctccttgcttgttacatacctgggtatgtgtaggcagtttagtgcatctttgcctctcagttgaaacctgtataaccctgttacaaagctgtgttgttgcttcttgtgaaggccatgatattttgtttttccccaattaattgctattgtgttattttactacttctctctgtattttttcttgcattgacattatagacattgaggacctcatccaaacaatttaaaaatgagtgtgaagggggaacaagtcaaaatatttttaaaagatcttcaaaaataatgcctctgtctagcatgccaacaagaatgcattgatattgtgaacatttgtgatatatgtattaataaatagagcaattacaagcaaaaaaaaaaaaaaaanaaaanaanaaaaaaaaaaaaaaactcgagactagttctctttttttttttttnntttttttnttttttttttttttatacacaaataaggggttttaattatgtggatttgcccaccaaattttgaaaatgtttgccttaaaaccaagatatcggggtttaaaccatgaaagcttttg

SEQ ID NO: 309823 - DNA, 1761 bp, Homo sapiens
agcggctttcccctcccgcgcgcccgcccgccgcctgccgccgccgccgccgccgccggagctctgtagtatggcatcgaggagaatggagaccaaacctgtgataacctgtctcaaaaccctcctcatcatctactccttcgtcttctggatcactggggtgatcctgctggctgttggagtctggggcaaacttactctgggcacctatatctcccttattgccgagaactccacaaatgctccctatgtgctcatcggaactggcaccactattgttgtctttggcctgtttggatgctttgctacatgtcgtggtagcccatggatgctgaaactgtatgccatgtttctgtccctggtgttcctggctgagctcgtagctggcatttcagggtttgtgtttcgtcatgagatcaaggacaccttcctgaggacttacacggacgctatgcagacttacaatggcaatgatgagaggagccgggcagtggaccatgtgcagcgcagcctgagctgctgtggtgtgcagaactacaccaactggagcaccagcccctacttcctggagcatggcatcccccccagctgctgcatgaacgaaactgattgtaatccccaggatctacacaatctgactgtggccgccaccaaagttaaccagaagggttgttatgatctggtaactagtttcatggagactaacatgggaatcatcgctggagtggcgtttggaatcgcattctcccagttaattggcatgctgctggcctgctgtctgtcccggttcatcacggccaatcagtatgagatggtgtaaggagaagtctttcaagaatgacggaataagagacctgttttaaaaaggaactgcagcaatctttgaaagacttccaaagaatgttagagcacagtacataatacacttgccctgctccctctaccccttaccccacaacgtgcaactgacactcccacccagtctctgctccacctttcagcccacgtcacgtgtagtgtccattttgtgaagccctgttgtgccacagagtgtagccaggtccccctgcagctagtcctagtgaacctcaccccgaggccctgcatgggccagcccctccatctgtacttggtccaactgcaactcatcatcggtgactggttatcacaccatcgctggcccctttgggccctgcatgtagtgtgggaggctcctgttagctcctcactgttgttcttttgacttaatctcatttggtttgattttccctctactaaggctttcctaccttcttcaggctgcctaagacatgtaacgaaacacttcaataattgtccatgaggagaaaaaaagcatgtgtcatgcatgaaggaaactgaacttgaggtggcctccttgcttgttacatacctgggtatgtgtaggcagtttagtgcatctttgcctctcagttgaaacctgtataaccctgttacaaagctgtgttgttgcttcttgtgaaggccatgatattttgtttttccccaattaattgctattgtgttattttactacttctctctgtattttttcttgcattgacattatagacattgaggacctcatccaaacaatttaaaaatgagtgtgaagggggaacaagtcaaaatatttttaaaagatcttcaaaaataatgcctctgtctagcatgccaacaagaatgcattgatattgtgaacatttgtgatatatgtattaataaatagagcaattacaagca

SEQ ID NO: 309824 - DNA, 1752 bp, Homo sapiens
agcggctttcccctcccgcgcgcccgcccgccgcctgccgccgccgccgccgccgccggagctctgtagtatggcatcgaggagaatggagaccaaacctgtgataacctgtctcaaaaccctcctcatcatctactccttcgtcttctggatcactggggtgatcctgctggctgttggagtctggggcaaacttactctgggcacctatatctcccttattgccgagaactccacaaatgctccctatgtgctcatcggaactggcaccactattgttgtctttggcctgtttggatgctttgctacatgtcgtggtagcccatggatgctgaaactgtatgccatgtttctgtccctggtgttcctggctgagctcgtagctggcatttcagggtttgtgtttcgtcatgagatcaaggacaccttcctgaggacttacacggacgctatgcagacttacaatggcaatgatgagaggagccgggcagtggaccatgtgcagcgcagcctgagctgctgtggtgtgcagaactacaccaactggagcaccagcccctacttcctggagcatggcatcccccccagctgctgcatgaacgaaactgattgtaatccccaggatctacacaatctgactgtggccgccaccaaagttaaccagaagggttgttatgatctggtaactagtttcatggagactaacatgggaatcatcgctggagtggcgtttggaatcgcattctcccagttaattggcatgctgctggcctgctgtctgtcccggttcatcacggccaatcagtatgagatggtgtaaggagaagtctttcaagaatgacggaataagagacctgttttaaaaaggaactgcagcaatctttgaaagacttccaaagaatgttagagcacagtacataatacacttgccctgctccctctaccccttaccccacaacgtgcaactgacactcccacccagtctctgctccacctttcagcccacgtcacgtgtagtgtccattttgtgaagccctgttgtgccacagagtgtagccaggtccccctgcagctagtcctagtgaacctcaccccgaggccctgcatgggccagcccctccatctgtacttggtccaactgcaactcatcatcggtgactggttatcacaccatcgctggcccctttgggccctgcatgtagtgtgggaggctcctgttagctcctcactgtggtaaatgccacacacctttaagtagataagcagacgatagttatctgttcttttgacttaatctcatttggtttgattttccctctactaaggctttcctaccttcttcaggctgcctaagacatgtaacgaaacacttcaataattgtccatgaggagaaatacatacctgggtatgtgtaggcagtttagtgcatctttgcctctcagttgaaacctgtataaccctgttacaaagctgtgttgttgcttcttgtgaaggccatgatattttgtttttccccaattaattgctattgtgttattttactacttctctctgtattttttcttgcattgacattatagacattgaggacctcatccaaacaatttaaaaatgagtgtgaagggggaacaagtcaaaatatttttaaaagatcttcaaaaataatgcctctgtctagcatgccaacaagaatgcattgatattgtgaacatttgtgatatatgtattaataaatagagcaattacaagca

SEQ ID NO: 309825 - DNA, 1611 bp, Homo sapiens
  misc_feature (1539)..(1539): n is a, c, g, or t
  misc_feature (1544)..(1544): n is a, c, g, or t
  misc_feature (1550)..(1550): n is a, c, g, or t
  misc_feature (1553)..(1554): n is a, c, g, or t
agcggctttcccctcccgcgcgcccgcccgccgcctgccgccgccgccgccgccgccggagctctgtagtatggcatcgaggagaatggagaccaaacctgtgataacctgtctcaaaaccctcctcatcatctactccttcgtcttctggatcactggggtgatcctgctggctgttggagtctggggcaaacttactctgggcacctatatctcccttattgccgagaactccacaaatgctccctatgtgctcatcggaactggcaccactattgttgtctttggcctgtttggatgctttgctacatgtcgtggtagcccatggatgctgaaactgtatgccatgtttctgtccctggtgttcctggctgagctcgtagctggcatttcagggtttgtgtttcgtcatgagatcaaggacaccttcctgaggacttacacggacgctatgcagacttacaatggcaatgatgagaggagccgggcagtggaccatgtgcagcgcagcctgagctgctgtggtgtgcagaactacaccaactggagcaccagcccctacttcctggagcatggcatcccccccagctgctgcatgaacgaaactgattgtaatccccaggatctacacaatctgactgtggccgccaccaaagttaaccagaagggttgttatgatctggtaactagtttcatggagactaacatgggaatcatcgctggagtggcgtttggaatcgcattctcccagttaattggcatgctgctggcctgctgtctgtcccggttcatcacggccaatcagtatgagatggtgtaaggagaagtctttcaagaatgacggaataagagacctgttttaaaaaggaactgcagcaatctttgaaagacttccaaagaatgttagagcacagtacataatacacttgccctgctccctctaccccttaccccacaacgtgcaactgacactcccacccagtctctgctccacctttcagcccacgtcacgtgtagtgtccattttgtgaagccctgttgtgccacagagtgtagccaggtccccctgcagctagtcctagtgaacctcaccccgaggccctgcatgggccagcccctccatctgtacttggtccaactgcaactcatcatcggtgactggttatcacaccatcgctggcccctttgggccctgcatgtagtgtgggaggctcctgttagctcctcactgtggtaaatgccacacacctttaagtagataagcagacgatagttatctgttcttttgacttaatctcatttggtttgattttccctctactaaggctttcctaccttcttcaggctgcctaagacatgtaacgaaacacttcaataattgtccatgaggagaaaaaaagcatgtgtcatgcatgaaggaaactgaacttgaggtggcctccttgcttgttacatacctgggtatgtgtaggcagtttagtgcatctttgcctctcagttgaaacctgtataaccctgttacaaagctgtgttgttggntctgngaagcngannttgtttccccatgttgggttttcacactcgcttttgtggaaaatgggggccccaatg

SEQ ID NO: 309826 - DNA, 1469 bp, Homo sapiens
agcggctttcccctcccgcgcgcccgcccgccgcctgccgccgccgccgccgccgccggagctctgtagtatggcatcgaggagaatggagaccaaacctgtgataacctgtctcaaaaccctcctcatcatctactccttcgtcttctggatcactggggtgatcctgctggctgttggagtctggggcaaacttactctgggcacctatatctcccttattgccgagaactccacaaatgctccctatgtgctcatcggaactggcaccactattgttgtctttggcctgtttggatgctttgctacatgtcgtggtagcccatggatgctgaaactgtatgccatgtttctgtccctggtgttcctggctgagctcgtagctggcatttcagggtttgtgtttcgtcatgagatcaaggacaccttcctgaggacttacacggacgctatgcagacttacaatggcaatgatgagaggagccgggcagtggaccatgtgcagcgcagcctgagctgctgtggtgtgcagaactacaccaactggagcaccagcccctacttcctggagcatggcatcccccccagctgctgcatgaacgaaactgattgtaatccccaggatctacacaatctgactgtggccgccaccaaagttaaccagaagggttgttatgatctggtaactagtttcatggagactaacatgggaatcatcgctggagtggcgtttggaatcgcattctcccagttaattggcatgctgctggcctgctgtctgtcccggttcatcacggccaatcagtatgagatggtgtaaggagaagtctttcaagaatgacggaataagagacctgttttaaaaaggaactgcagcaatctttgaaagacttccaaagaatgttagagcacagtacataatacacttgccctgctccctctaccccttaccccacaacgtgcaactgacactcccacccagtctctgctccacctttcagcccacgtcacgtgtagtgtccattttgtgaagccctgttgtgccacagagtgtagccaggtccccctgcagctagtcctagtgaacctcaccccgaggccctgcatgggccagcccctccatctgtacttggtccaactgcaactcatcatcggtgactggttatcacaccatcgctggcccctttgggccctgcatgtagtgtgggaggctcctgttagctcctcactgtggtaaatgccacacacctttaagtagataagcagacgatagttatctgttcttttgacttaatctcatttggtttgattttccctctactaaggctttcctaccttcttcaggctgcctaagacatgtaacgaaacacttcaataattgtccatgaggagaaaaaagcttgttcttgtgaaggatcgacttggggccctgcggaaccgggtgtgggggagactctgccccgaaccgt

SEQ ID NO: 309827 - DNA, 1401 bp, Homo sapiens
  misc_feature (1364)..(1364): n is a, c, g, or t
  misc_feature (1380)..(1380): n is a, c, g, or t
  misc_feature (1393)..(1393): n is a, c, g, or t
agcggctttcccctcccgcgcgcccgcccgccgcctgccgccgccgccgccgccgccggagctctgtagtatggcatcgaggagaatggagaccaaacctgtgataacctgtctcaaaaccctcctcatcatctactccttcgtcttctggatcactggggtgatcctgctggctgttggagtctggggcaaacttactctgggcacctatatctcccttattgccgagaactccacaaatgctccctatgtgctcatcggaactggcaccactattgttgtctttggcctgtttggatgctttgctacatgtcgtggtagcccatggatgctgaaactgtatgccatgtttctgtccctggtgttcctggctgagctcgtagctggcatttcagggtttgtgtttcgtcatgagatcaaggacaccttcctgaggacttacacggacgctatgcagacttacaatggcaatgatgagaggagccgggcagtggaccatgtgcagcgcagcctgagctgctgtggtgtgcagaactacaccaactggagcaccagcccctacttcctggagcatggcatcccccccagctgctgcatgaacgaaactgattgtaatccccaggatctacacaatctgactgtggccgccaccaaagttaaccagaagggttgttatgatctggtaactagtttcatggagactaacatgggaatcatcgctggagtggcgtttggaatcgcattctcccagttaattggcatgctgctggcctgctgtctgtcccggttcatcacggccaatcagtatgagatggtgtaaggagaagtctttcaagaatgacggaataagagacctgttttaaaaaggaactgcagcaatctttgaaagacttccaaagaatgttagagcacagtacataatacacttgccctgctccctctaccccttaccccacaacgtgcaactgacactcccacccagtctctgctccacctttcagcccacgtcacgtgtagtgtccattttgtgaagccctgttgtgccacagagtgtagccaggtccccctgcagctagtcctagtgaacctcaccccgaggccctgcatgggccagcccctccatctgtacttggtccaactgcaactcatcatcggtgactggttatcacaccatcgctggcccctttgggccctgcatgtagtgtgggaggctcctgttagctcctcactgtggtaaatgccacacacctttaagtagataagcagacgatagttatctgttcttttgacttaatctcatttggtttgattttccctctactaaggctttcctacccttcctttccaaggttggccttaagganaatttttaacggaaanaaattccaattanttcttttg

SEQ ID NO: 309828 - DNA, 1777 bp, Homo sapiens
agcggctttcccctcccgcgcgcccgcccgccgcctgccgccgccgccgccgccgccggagctctgtagtatggcatcgaggagaatggagaccaaacctgtgataacctgtctcaaaaccctcctcatcatctactccttcgtcttctggatcactggggtgatcctgctggctgttggagtctggggcaaacttactctgggcacctatatctcccttattgccgagaactccacaaatgctccctatgtgctcatcggaactggcaccactattgttgtctttggcctgtttggatgctttgctacatgtcgtggtagcccatggatgctgaaactgtatgccatgtttctgtccctggtgttcctggctgagctcgtagctggcatttcagggtttgtgtttcgtcatgagatcaaggacaccttcctgaggacttacacggacgctatgcagacttacaatggcaatgatgagaggagccgggcagtggaccatgtgcagcgcagcctgagctgctgtggtgtgcagaactacaccaactggagcaccagcccctacttcctggagcatggcatcccccccagctgctgcatgaacgaaactgattgtaatccccaggatctacacaatctgactgtggccgccaccaaagttaaccagaagggttgttatgatctggtaactagtttcatggagactaacatgggaatcatcgctggagtggcgtttggaatcgcattctcccagttaattggcatgctgctggcctgctgtctgtcccggttcatcacggccaatcagtatgagatggtgtaaggagaagtctttcaagaatgacggaataagagacctgttttaaaaaggaactgcagcaatctttgaaagacttccaaagaatgttagagcacagtacataatacacttgccctgctccctctaccccttaccccacaacgtgcaactgacactcccacccagtctcttgtccattttgtgaagccctgttgtgccacagagtgtagccaggtccccctgcagctagtcctagtgaacctcaccccgaggccctgcatgggccagcccctccatctgtacttggtccaactgcaactcatcatcggtgactggttatcacaccatcgctggcccctttgggccctgcatgtagtgtgggaggctcctgttagctcctcactgtggtaaatgccacacacctttaagtagataagcagacgatagttatctgttcttttgacttaatctcatttggtttgattttccctctactaaggctttcctaccttcttcaggctgcctaagacatgtaacgaaacacttcaataattgtccatgaggagaaaaaaagcatgtgtcatgcatgaaggaaactgaacttgaggtggcctccttgcttgttacatacctgggtatgtgtaggcagtttagtgcatctttgcctctcagttgaaacctgtataaccctgttacaaagctgtgttgttgcttcttgtgaaggccatgatattttgtttttccccaattaattgctattgtgttattttactacttctctctgtattttttcttgcattgacattatagacattgaggacctcatccaaacaatttaaaaatgagtgtgaagggggaacaagtcaaaatatttttaaaagatcttcaaaaataatgcctctgtctagcatgccaacaagaatgcattgatattgtgaacatttgtgatatatgtattaataaatagagcaattacaagca

SEQ ID NO: 309829 - DNA, 1753 bp, Homo sapiens
agcggctttcccctcccgcgcgcccgcccgccgcctgccgccgccgccgccgccgccggagctctgtagtatggcatcgaggagaatggagaccaaacctgtgataacctgtctcaaaaccctcctcatcatctactccttcgtcttctggatcactggggtgatcctgctggctgttggagtctggggcaaacttactctgggcacctatatctcccttattgccgagaactccacaaatgctccctatgtgctcatcggaactggcaccactattgttgtctttggcctgtttggatgctttgctacatgtcgtggtagcccatggatgctgaaactgtatgccatgtttctgtccctggtgttcctggctgagctcgtagctggcatttcagggtttgtgtttcgtcatgagatcaaggacaccttcctgaggacttacacggacgctatgcagacttacaatggcaatgatgagaggagccgggcagtggaccatgtgcagcgcagcctgagctgctgtggtgtgcagaactacaccaactggagcaccagcccctacttcctggagcatggcatcccccccagctgctgcatgaacgaaactgattgtaatccccaggatctacacaatctgactgtggccgccaccaaagttaaccagaagggttgttatgatctggtaactagtttcatggagactaacatgggaatcatcgctggagtggcgtttggaatcgcattctcccagttaattggcatgctgctggcctgctgtctgtcccggttcatcacggccaatcagtatgagatggtgtaaggagaagtctttcaagaatgacggaataagagacctgttttacataatacacttgccctgctccctctaccccttaccccacaacgtgcaactgacactcccacccagtctctgctccacctttcagcccacgtcacgtgtagtgtccattttgtgaagccctgttgtgccacagagtgtagccaggtccccctgcagctagtcctagtgaacctcaccccgaggccctgcatgggccagcccctccatctgtacttggtccaactgcaactcatcatcggtgactggttatcacaccatcgctggcccctttgggccctgcatgtagtgtgggaggctcctgttagctcctcactgtggtaaatgccacacacctttaagtagataagcagacgatagttatctgttcttttgacttaatctcatttggtttgattttccctctactaaggctttcctaccttcttcaggctgcctaagacatgtaacgaaacacttcaataattgtccatgaggagaaaaaaagcatgtgtcatgcatgaaggaaactgaacttgaggtggcctccttgcttgttacatacctgggtatgtgtaggcagtttagtgcatctttgcctctcagttgaaacctgtataaccctgttacaaagctgtgttgttgcttcttgtgaaggccatgatattttgtttttccccaattaattgctattgtgttattttactacttctctctgtattttttcttgcattgacattatagacattgaggacctcatccaaacaatttaaaaatgagtgtgaagggggaacaagtcaaaatatttttaaaagatcttcaaaaataatgcctctgtctagcatgccaacaagaatgcattgatattgtgaacatttgtgatatatgtattaataaatagagcaattacaagca

SEQ ID NO: 309830 - DNA, 1841 bp, Homo sapiens
agcggctttcccctcccgcgcgcccgcccgccgcctgccgccgccgccgccgccgccggagctctgtagtatggcatcgaggagaatggagaccaaacctgtgataacctgtctcaaaaccctcctcatcatctactccttcgtcttctgggtctatagaagaggagggaaaaacacacctaggaatcactggggtgatcctgctggctgttggagtctggggcaaacttactctgggcacctatatctcccttattgccgagaactccacaaatgctccctatgtgctcatcggaactggcaccactattgttgtctttggcctgtttggatgctttgctacatgtcgtggtagcccatggatgctgaaactgtatgccatgtttctgtccctggtgttcctggctgagctcgtagctggcatttcagggtttgtgtttcgtcatgagatcaaggacaccttcctgaggacttacacggacgctatgcagacttacaatggcaatgatgagaggagccgggcagtggaccatgtgcagcgcagcctgagctgctgtggtgtgcagaactacaccaactggagcaccagcccctacttcctggagcatggcatcccccccagctgctgcatgaacgaaactgattgtaatccccaggatctacacaatctgactgtggccgccaccaaagttaaccagaagggttgttatgatctggtaactagtttcatggagactaacatgggaatcatcgctggagtggcgtttggaatcgcattctcccagttaattggcatgctgctggcctgctgtctgtcccggttcatcacggccaatcagtatgagatggtgtaaggagaagtctttcaagaatgacggaataagagacctgttttaaaaaggaactgcagcaatctttgaaagacttccaaagaatgttagagcacagtacataatacacttgccctgctccctctaccccttaccccacaacgtgcaactgacactcccacccagtctctgctccacctttcagcccacgtcacgtgtagtgtccattttgtgaagccctgttgtgccacagagtgtagccaggtccccctgcagctagtcctagtgaacctcaccccgaggccctgcatgggccagcccctccatctgtacttggtccaactgcaactcatcatcggtgactggttatcacaccatcgctggcccctttgggccctgcatgtagtgtgggaggctcctgttagctcctcactgtggtaaatgccacacacctttaagtagataagcagacgatagttatctgttcttttgacttaatctcatttggtttgattttccctctactaaggctttcctaccttcttcaggctgcctaagacatgtaacgaaacacttcaataattgtccatgaggagaaaaaaagcatgtgtcatgcatgaaggaaactgaacttgaggtggcctccttgcttgttacatacctgggtatgtgtaggcagtttagtgcatctttgcctctcagttgaaacctgtataaccctgttacaaagctgtgttgttgcttcttgtgaaggccatgatattttgtttttccccaattaattgctattgtgttattttactacttctctctgtattttttcttgcattgacattatagacattgaggacctcatccaaacaatttaaaaatgagtgtgaagggggaacaagtcaaaatatttttaaaagatcttcaaaaataatgcctctgtctagcatgccaacaagaatgcattgatattgtgaacatttgtgatatatgtattaataaatagagcaattacaagca

SEQ ID NO: 309831 - DNA, 1713 bp, Homo sapiens
gcttgctggttttagtggagcacttccagtaactttgtgagaaagggtacaagggagatcactggggtgatcctgctggctgttggagtctggggcaaacttactctgggcacctatatctcccttattgccgagaactccacaaatgctccctatgtgctcatcggaactggcaccactattgttgtctttggcctgtttggatgctttgctacatgtcgtggtagcccatggatgctgaaactgtatgccatgtttctgtccctggtgttcctggctgagctcgtagctggcatttcagggtttgtgtttcgtcatgagatcaaggacaccttcctgaggacttacacggacgctatgcagacttacaatggcaatgatgagaggagccgggcagtggaccatgtgcagcgcagcctgagctgctgtggtgtgcagaactacaccaactggagcaccagcccctacttcctggagcatggcatcccccccagctgctgcatgaacgaaactgattgtaatccccaggatctacacaatctgactgtggccgccaccaaagttaaccagaagggttgttatgatctggtaactagtttcatggagactaacatgggaatcatcgctggagtggcgtttggaatcgcattctcccagttaattggcatgctgctggcctgctgtctgtcccggttcatcacggccaatcagtatgagatggtgtaaggagaagtctttcaagaatgacggaataagagacctgttttaaaaaggaactgcagcaatctttgaaagacttccaaagaatgttagagcacagtacataatacacttgccctgctccctctaccccttaccccacaacgtgcaactgacactcccacccagtctctgctccacctttcagcccacgtcacgtgtagtgtccattttgtgaagccctgttgtgccacagagtgtagccaggtccccctgcagctagtcctagtgaacctcaccccgaggccctgcatgggccagcccctccatctgtacttggtccaactgcaactcatcatcggtgactggttatcacaccatcgctggcccctttgggccctgcatgtagtgtgggaggctcctgttagctcctcactgtggtaaatgccacacacctttaagtagataagcagacgatagttatctgttcttttgacttaatctcatttggtttgattttccctctactaaggctttcctaccttcttcaggctgcctaagacatgtaacgaaacacttcaataattgtccatgaggagaaaaaaagcatgtgtcatgcatgaaggaaactgaacttgaggtggcctccttgcttgttacatacctgggtatgtgtaggcagtttagtgcatctttgcctctcagttgaaacctgtataaccctgttacaaagctgtgttgttgcttcttgtgaaggccatgatattttgtttttccccaattaattgctattgtgttattttactacttctctctgtattttttcttgcattgacattatagacattgaggacctcatccaaacaatttaaaaatgagtgtgaagggggaacaagtcaaaatatttttaaaagatcttcaaaaataatgcctctgtctagcatgccaacaagaatgcattgatattgtgaacatttgtgatatatgtattaataaatagagcaattacaagca

SEQ ID NO: 309832 - DNA, 1870 bp, Homo sapiens
cctcattgcaagcagatttttggaatgctgctcttaaatttcttattttggctgttattccccttgccatgacagaatgattttcattcttggctgaacatttttttcatcttactgcagaaccccactattcatcaagaaaaggatgtagaggaaaaaggagagggttttctttgttttgtttttccttttggttatttgatcagttaaacagatcactggggtgatcctgctggctgttggagtctggggcaaacttactctgggcacctatatctcccttattgccgagaactccacaaatgctccctatgtgctcatcggaactggcaccactattgttgtctttggcctgtttggatgctttgctacatgtcgtggtagcccatggatgctgaaactgtatgccatgtttctgtccctggtgttcctggctgagctcgtagctggcatttcagggtttgtgtttcgtcatgagatcaaggacaccttcctgaggacttacacggacgctatgcagacttacaatggcaatgatgagaggagccgggcagtggaccatgtgcagcgcagcctgagctgctgtggtgtgcagaactacaccaactggagcaccagcccctacttcctggagcatggcatcccccccagctgctgcatgaacgaaactgattgtaatccccaggatctacacaatctgactgtggccgccaccaaagttaaccagaagggttgttatgatctggtaactagtttcatggagactaacatgggaatcatcgctggagtggcgtttggaatcgcattctcccagttaattggcatgctgctggcctgctgtctgtcccggttcatcacggccaatcagtatgagatggtgtaaggagaagtctttcaagaatgacggaataagagacctgttttaaaaaggaactgcagcaatctttgaaagacttccaaagaatgttagagcacagtacataatacacttgccctgctccctctaccccttaccccacaacgtgcaactgacactcccacccagtctctgctccacctttcagcccacgtcacgtgtagtgtccattttgtgaagccctgttgtgccacagagtgtagccaggtccccctgcagctagtcctagtgaacctcaccccgaggccctgcatgggccagcccctccatctgtacttggtccaactgcaactcatcatcggtgactggttatcacaccatcgctggcccctttgggccctgcatgtagtgtgggaggctcctgttagctcctcactgtggtaaatgccacacacctttaagtagataagcagacgatagttatctgttcttttgacttaatctcatttggtttgattttccctctactaaggctttcctaccttcttcaggctgcctaagacatgtaacgaaacacttcaataattgtccatgaggagaaaaaaagcatgtgtcatgcatgaaggaaactgaacttgaggtggcctccttgcttgttacatacctgggtatgtgtaggcagtttagtgcatctttgcctctcagttgaaacctgtataaccctgttacaaagctgtgttgttgcttcttgtgaaggccatgatattttgtttttccccaattaattgctattgtgttattttactacttctctctgtattttttcttgcattgacattatagacattgaggacctcatccaaacaatttaaaaatgagtgtgaagggggaacaagtcaaaatatttttaaaagatcttcaaaaataatgcctctgtctagcatgccaacaagaatgcattgatattgtgaacatttgtgatatatgtattaataaatagagcaattacaagca

SEQ ID NO: 309833 - DNA, 1790 bp, Homo sapiens
  misc_feature (28)..(28): n is a, c, g, or t
  misc_feature (49)..(49): n is a, c, g, or t
  misc_feature (56)..(56): n is a, c, g, or t
  misc_feature (95)..(95): n is a, c, g, or t
  misc_feature (116)..(116): n is a, c, g, or t
  misc_feature (137)..(137): n is a, c, g, or t
  misc_feature (158)..(158): n is a, c, g, or t
  misc_feature (197)..(197): n is a, c, g, or t
  misc_feature (221)..(221): n is a, c, g, or t
ccaaacccctgtttgaaaaaaccttttnccccccaaaaacccccccccntccaaanaaaacctaacctccccttcggtcctttccctgggatccncccgggggggttgaacccctnccttggccttggttgggaaanccttgggggcccaaaactttnacctcctggggcaacccaaaaaatcctccccctaatttncccgaggaaccccccaccaaattnctcccctattgttccttcatcggaactggcaccactattgttgtctttggcctgtttggatgctttgctacatgtcgtggtagcccatggatgctgaaactgtatgccatgtttctgtccctggtgttcctggctgagctcgtagctggcatttcagggtttgtgtttcgtcatgagatcaaggacaccttcctgaggacttacacggacgctatgcagacttacaatggcaatgatgagaggagccgggcagtggaccatgtgcagcgcagcctgagctgctgtggtgtgcagaactacaccaactggagcaccagcccctacttcctggagcatggcatcccccccagctgctgcatgaacgaaactgattgtaatccccaggatctacacaatctgactgtggccgccaccaaagttaaccagaagggttgttatgatctggtaactagtttcatggagactaacatgggaatcatcgctggagtggcgtttggaatcgcattctcccagttaattggcatgctgctggcctgctgtctgtcccggttcatcacggccaatcagtatgagatggtgtaaggagaagtctttcaagaatgacggaataagagacctgttttaaaaaggaactgcagcaatctttgaaagacttccaaagaatgttagagcacagtacataatacacttgccctgctccctctaccccttaccccacaacgtgcaactgacactcccacccagtctctgctccacctttcagcccacgtcacgtgtagtgtccattttgtgaagccctgttgtgccacagagtgtagccaggtccccctgcagctagtcctagtgaacctcaccccgaggccctgcatgggccagcccctccatctgtacttggtccaactgcaactcatcatcggtgactggttatcacaccatcgctggcccctttgggccctgcatgtagtgtgggaggctcctgttagctcctcactgtggtaaatgccacacacctttaagtagataagcagacgatagttatctgttcttttgacttaatctcatttggtttgattttccctctactaaggctttcctaccttcttcaggctgcctaagacatgtaacgaaacacttcaataattgtccatgaggagaaaaaaagcatgtgtcatgcatgaaggaaactgaacttgaggtggcctccttgcttgttacatacctgggtatgtgtaggcagtttagtgcatctttgcctctcagttgaaacctgtataaccctgttacaaagctgtgttgttgcttcttgtgaaggccatgatattttgtttttccccaattaattgctattgtgttattttactacttctctctgtattttttcttgcattgacattatagacattgaggacctcatccaaacaatttaaaaatgagtgtgaagggggaacaagtcaaaatatttttaaaagatcttcaaaaataatgcctctgtctagcatgccaacaagaatgcattgatattgtgaacatttgtgatatatgtattaataaatagagcaattacaagca

SEQ ID NO: 309834 - DNA, 1840 bp, Homo sapiens
  misc_feature (357)..(358): n is a, c, g, or t
agcggctttcccctcccgcgcgcccgcccgccgcctgccgccgccgccgccgccgccggagctctgtagtatggcatcgaggagaatggagaccaaacctgtgataacctgtctcaaaaccctcctcatcatctactccttcgtcttctggatcactggggtgatcctgctggctgttggagtctggggcaaacttactctgggcacctatatctcccttattgccgagaactccacaaatgctccctatgtgctcatcggaactggcaccactattgttgtctttggcctgtttggatgctttgctacatgtcgtggtagcccatggatgctgaaactgtatctcttgttacaacnngaatcaatcatctcactctacccacccaccaccaccacacacacccccaactacacacacccaccaacacacccactcccacaccaatccaaccaacacatcaccccatcatcccaccacacctctctccatacttacaatggcaatgatgagaggagccgggcagtggaccatgtgcagcgcagcctgagctgctgtggtgtgcagaactacaccaactggagcaccagcccctacttcctggagcatggcatcccccccagctgctgcatgaacgaaactgattgtaatccccaggatctacacaatctgactgtggccgccaccaaagttaaccagaagggttgttatgatctggtaactagtttcatggagactaacatgggaatcatcgctggagtggcgtttggaatcgcattctcccagttaattggcatgctgctggcctgctgtctgtcccggttcatcacggccaatcagtatgagatggtgtaaggagaagtctttcaagaatgacggaataagagacctgttttaaaaaggaactgcagcaatctttgaaagacttccaaagaatgttagagcacagtacataatacacttgccctgctccctctaccccttaccccacaacgtgcaactgacactcccacccagtctctgctccacctttcagcccacgtcacgtgtagtgtccattttgtgaagccctgttgtgccacagagtgtagccaggtccccctgcagctagtcctagtgaacctcaccccgaggccctgcatgggccagcccctccatctgtacttggtccaactgcaactcatcatcggtgactggttatcacaccatcgctggcccctttgggccctgcatgtagtgtgggaggctcctgttagctcctcactgtggtaaatgccacacacctttaagtagataagcagacgatagttatctgttcttttgacttaatctcatttggtttgattttccctctactaaggctttcctaccttcttcaggctgcctaagacatgtaacgaaacacttcaataattgtccatgaggagaaaaaaagcatgtgtcatgcatgaaggaaactgaacttgaggtggcctccttgcttgttacatacctgggtatgtgtaggcagtttagtgcatctttgcctctcagttgaaacctgtataaccctgttacaaagctgtgttgttgcttcttgtgaaggccatgatattttgtttttccccaattaattgctattgtgttattttactacttctctctgtattttttcttgcattgacattatagacattgaggacctcatccaaacaatttaaaaatgagtgtgaagggggaacaagtcaaaatatttttaaaagatcttcaaaaataatgcctctgtctagcatgccaacaagaatgcattgatattgtgaacatttgtgatatatgtattaataaatagagcaattacaagca

SEQ ID NO: 309835 - DNA, 1334 bp, Homo sapiens
gagctcggtaccgggtcagtacggatgtgcagcgcagcctgagctgctgtggtgtgcagaactacaccaactggagcaccagcccctacttcctggagcatggcatcccccccagctgctgcatgaacgaaactgattgtaatccccaggatctacacaatctgactgtggccgccaccaaagttaaccagaagggttgttatgatctggtaactagtttcatggagactaacatgggaatcatcgctggagtggcgtttggaatcgcattctcccagttaattggcatgctgctggcctgctgtctgtcccggttcatcacggccaatcagtatgagatggtgtaaggagaagtctttcaagaatgacggaataagagacctgttttaaaaaggaactgcagcaatctttgaaagacttccaaagaatgttagagcacagtacataatacacttgccctgctccctctaccccttaccccacaacgtgcaactgacactcccacccagtctctgctccacctttcagcccacgtcacgtgtagtgtccattttgtgaagccctgttgtgccacagagtgtagccaggtccccctgcagctagtcctagtgaacctcaccccgaggccctgcatgggccagcccctccatctgtacttggtccaactgcaactcatcatcggtgactggttatcacaccatcgctggcccctttgggccctgcatgtagtgtgggaggctcctgttagctcctcactgtggtaaatgccacacacctttaagtagataagcagacgatagttatctgttcttttgacttaatctcatttggtttgattttccctctactaaggctttcctaccttcttcaggctgcctaagacatgtaacgaaacacttcaataattgtccatgaggagaaaaaaagcatgtgtcatgcatgaaggaaactgaacttgaggtggcctccttgcttgttacatacctgggtatgtgtaggcagtttagtgcatctttgcctctcagttgaaacctgtataaccctgttacaaagctgtgttgttgcttcttgtgaaggccatgatattttgtttttccccaattaattgctattgtgttattttactacttctctctgtattttttcttgcattgacattatagacattgaggacctcatccaaacaatttaaaaatgagtgtgaagggggaacaagtcaaaatatttttaaaagatcttcaaaaataatgcctctgtctagcatgccaacaagaatgcattgatattgtgaacatttgtgatatatgtattaataaatagagcaattacaagca

SEQ ID NO: 309836 - DNA, 1273 bp, Homo sapiens
tggcacgaggcaaatgctccctatgtgctcatcggaacatggcatcccccccagctgctgcatgaacgaaactgattgtaatccccaggatctacacaatctgactgtggccgccaccaaagttaaccagaagggttgttatgatctggtaactagtttcatggagactaacatgggaatcatcgctggagtggcgtttggaatcgcattctcccagttaattggcatgctgctggcctgctgtctgtcccggttcatcacggccaatcagtatgagatggtgtaaggagaagtctttcaagaatgacggaataagagacctgttttaaaaaggaactgcagcaatctttgaaagacttccaaagaatgttagagcacagtacataatacacttgccctgctccctctaccccttaccccacaacgtgcaactgacactcccacccagtctctgctccacctttcagcccacgtcacgtgtagtgtccattttgtgaagccctgttgtgccacagagtgtagccaggtccccctgcagctagtcctagtgaacctcaccccgaggccctgcatgggccagcccctccatctgtacttggtccaactgcaactcatcatcggtgactggttatcacaccatcgctggcccctttgggccctgcatgtagtgtgggaggctcctgttagctcctcactgtggtaaatgccacacacctttaagtagataagcagacgatagttatctgttcttttgacttaatctcatttggtttgattttccctctactaaggctttcctaccttcttcaggctgcctaagacatgtaacgaaacacttcaataattgtccatgaggagaaaaaaagcatgtgtcatgcatgaaggaaactgaacttgaggtggcctccttgcttgttacatacctgggtatgtgtaggcagtttagtgcatctttgcctctcagttgaaacctgtataaccctgttacaaagctgtgttgttgcttcttgtgaaggccatgatattttgtttttccccaattaattgctattgtgttattttactacttctctctgtattttttcttgcattgacattatagacattgaggacctcatccaaacaatttaaaaatgagtgtgaagggggaacaagtcaaaatatttttaaaagatcttcaaaaataatgcctctgtctagcatgccaacaagaatgcattgatattgtgaacatttgtgatatatgtattaataaatagagcaattacaagca

SEQ ID NO: 309837 - DNA, 1221 bp, Homo sapiens
  misc_feature (386)..(386): n is a, c, g, or t
  misc_feature (390)..(390): n is a, c, g, or t
  misc_feature (394)..(394): n is a, c, g, or t
agcggctttcccctcccgcgcgcccgcccgccgcctgccgccgccgccgccgccgccggagctctgtagtatggcatcgaggagaatggagaccaaacctgtgataacctgtctcaaaaccctcctcatcatctactccttcgtcttctggatcactggggtgatcctgctggctgttggagtctggggcaaacttactctgggcacctatatctcccttattgccgagaactccacaaatgctccctatgtgctcatcggaactggcaccactattgttgtctttggcctgtttggatgctttgctacatgtcgtggtagcccatggatgctgaaactgagaaaacaaaacaaaaaccaataaacagaacccaaaaaccaaacanacanaaancaacaaaacaaaaaaagaaaacaacaaaaaacaaaacaccaaccaaataacaaacacaaacatcaaaacagaacaaacaaaaggcaataaaaaaaaataaatccaaacaagtaaaccataatatcaatcagcatgtcagaatcaatcagaatagaacataacaacaccaatcataatcaccatctcacaacaaccctaagactcagaagtatacctccgcctcaatcaatgaatcaagagtttaaagagtataagatgagatatccccaaaaaactaactactaaggcgaaactaagaagttcgtcactcaaagttgaaacccattaagtagttaaatgtagtacagtctaattaaaactcaaagtagatgcatagttaataactaaagcatagttgaagtacagacttctaatggaggtaatactttatgtaagtaatatacgtcataaactgacctcgagttttgacatatagtgctgaactaagctaatgccgaatcaagtactagttcctcgatgtacaaaaccactgtgtgcaatgactattgaaaaaagaaaggtgtggttgagttaacacattctcttggccgagaaaagaactgttaatgaagtaagaccgcgatgttgggactactaggaaaatcaggtggcggtgcggtcgtaaagggagtgccccattgaagaagatagaatccttctgtaacaaaaaagccggagtgcccagacgtccgcggagtctcaggagccggcgcatagatgcgggtggaagtggtatctccgctagggagcgaggacgctccgtgtgggggccttggtatcgataaggg

SEQ ID NO: 309838 - DNA, 409 bp, Homo sapiens
agcggctttcccctcccgcgcgcccgcccgccgcctgccgccgccgccgccgccgccggagctctgtagtatggcatcgaggagaatggagaccaaacctgtgataacctgtctcaaaaccctcctcatcatctactccttcgtcttctgggtaagtgcccacgccgggccggtggccgagtcgctgtccatcggtccgtatgatgatgctctgagaaaagaagtggggaggaaaacccaaaccaaaaatcaaatctgggacccctctttaaggagacaggcgcggggtgctgggtcgggactgcaggatggcagggtgcgggtcggggctgctggaaccctagacctcgctccgcgcaggctgcaaggggctgcggagtgtcggtgactgcaggttgtcgaccttcca

SEQ ID NO: 309839 - DNA, 584 bp, Homo sapiens
ttttgtgtaaataagagtaaatgaggtccgagtacaagtcggagattttcttctgagttcaggcttaagcttcagtgcggggatattggtgaattttgctcagcagcatcacaggcccttcctttgtccttgtttcattgttctcaattgcaccccacatagaaaataatcattagaggaaatgaatggactttttcaagttttccacaaaagtgccatgaactagaaaaggaaaattctaaaattacttattactagaaatatatgatgtagtaacatctttaattactactgctaatattaacaaggaagaaaactattttttttataaattacttttctctcaaaaataaaatgactttgaggataaactatttaaatctaacacaggaaagctatttttttccccaagacaaatacctattttttaaaaaagacacacccagatcttggtttctcaatactactccccaagaaagggaaccaaagctccttaaaggaatgcctgattctaggactgggacaaagaatctacaagatgaagctggagaatgtgatggtgccagaaaggaggtgcaaaaaaa

SEQ ID NO: 309840 - DNA, 938 bp, Homo sapiens
tatccttcagggcaattgtgagaggtaagcaggctaacacatggtaaatactcagaacaatgcctgttagggcaaacactatagaagtacttgttacttggtgtgcgtaagagggcaggagctgactgtgggttgcaccacataaccgaaggagaatcagtgaaaaatcttcttcagtatatagactaactgtttcttttcatattagagttagccaacagaagacttcaaaaataacgagcaaagaatactccagatttcgaagggattgattctctaactcagacccatgtgggttctgcaaatctagtcattgacttgacgtttttcactctcatatcactcaggcatctcatgcttcacatgttcaaaagtcatctctgcttcccatgtctacctgctcctccttcagtcttttccataccagccacccagtcattcaaggtagaaactggaccatcagccccctttgatgcttccctctgtcttgcccctgtatttaatcagtcacaaacagatgtccattctacctcctcaatatctttggagcctgtcttttttttcctccacagccactgcctccatctgagttcaagaatcatcatcatccctcccctgtaggaactttctagcttgccatcttggtttacccctgccccatggctagaaaacctgcagggcaccttgatatagaaaaagcatgctccccaaggtcaggagatagagaccatcctggctaacacggtgaaaccccatctctactaaaaaagaaaaaatacaaaaaattagctgggcacggtggttggcacctgtagtcccagctacttgggaggctgaggcaggagaatggcgtgaactcagaaggcggagcttgcagtgagccgagatcataccactgcactccaggctgggcaacagagcgagactctgtctcaaaa

SEQ ID NO: 309841 - DNA, 141 bp, Homo sapiens
aatgtgctcctctcctggtatctgcttatctcctggaatctgagacacaacatagagcaacccccaggccagccatgactggagcctcccaagttgcagggaagggccctgtactaggccaagaacctatcctgaccagtt

SEQ ID NO: 309842 - DNA, 823 bp, Homo sapiens
gtcaccgggagtgggcgggccatttcttgttctctctcccgctctcggaagctttcgtctcgtgggtgcgaaaggtaaccgaagcggctcaggaaggcagctgtcactgagcccctggaacagagcgagagtatcgaagtgagtgcttttggtgaggaaggtgaaggtgattatctggatgactggacagtgctctgtaatggaccctactgggtgagagatggtgaggtgcggttcaaacactcttccactgaggtactgctgtctgtcacaggagaacaatatggtcgacctatcagtgggcaaaaagaggtgcatggcatggcccagccaagtcagaacaactactggaaagccatggaaggcatcttcatgaagcccagtgagttgttgaaggcagaagcccaccatgcagagctgtgaatctagaggctctgagccactgttaacgcacaatgttcacagacatctgttgctgcctcaccttgggatccctgccacaagttccttgggcagtggccatgtcaccattgagatgaagatatacaacagaaaatagtggctgtgtttggaagcttcagccctgcacatttgaactagtcactctcccagacttgcgtgggtcagttctttctgagtagaggacttgctggtaaaggggcagatgctttttattagtactgataaaacaaactgagggaaacatccctcttagctgggaaacttttactcttcaggagcttggcatcatggactgttaatgtatgtgattttccccctattttctctctccaaaatgataaaaacaataattttattatga

SEQ ID NO: 309843 - DNA, 819 bp, Homo sapiens
  misc_feature (1)..(5): n is a, c, g, or t
  misc_feature (35)..(35): n is a, c, g, or t
  misc_feature (44)..(44): n is a, c, g, or t
  misc_feature (58)..(61): n is a, c, g, or t
nnnnnaaaaaaaaaaaaaaaaaaaaaaaaaaaaanaaaaaaaanaaaaaaaaaaaaannnnttcagaaatgcagaagtgagtgcttttggtgaggaaggtgaaggtgattatctggatgactggacagtgctctgtaatggaccctactgggtgagagatggtgaggtgcggttcaaacactcttccactgaggtactgctgtctgtcacaggagaacaatatggtcgacctatcagtgggcaaaaagaggtgcatggcatggcccagccaagtcagaacaactactggaaagccatggaaggcatcttcatgaagcccagtgagttgttgaaggcagaagcccaccatgcagagctgtgaatctagaggctctgagccactgttaacgcacaatgttcacagacatctgttgctgcctcaccttgggatccctgccacaagttccttgggcagtggccatgtcaccattgagatgaagatatacaacagaaaatagtggctgtgtttggaagcttcagccctgcacatttgaactagtcactctcccagacttgcgtgggtcagttctttctgagtagaggacttgctggtaaaggggcagatgctttttattagtactgataaaacaaactgagggaaacatccctcttagctgggaaacttttactcttcaggagcttggcatcatggactgttaatgtatgtgattttccccctattttctctctccaaaatgataaaaacaataattttattatgaacacacgaagcggaaagcaagccaacgctaaaaactcggcttttttgccttcacggtg

SEQ ID NO: 309844 - DNA, 562 bp, Homo sapiens
gtcaccgggagtgggcgggccatttcttgttctctctcccgctctcggaagctttcgtctcgtgggtgcgaaaggtaaccgaagcggctcaggaaggcagctgtcactgagcccctggaacagagcgagagtatcgtagtgggcagcagtcagtgacaggtgtaacctctgtggatgacagcaacagttactggaggatacgggggaagagtgccacagtgtgtgagaggggaacccccatcaagtgtggccagcccatccggctgacacatgtcaacactggccgaaacctccatagtcaccacttcacttcacctctttctggaaaccaggaagtgagtgcttttggtgaggaaggtgaaggtgattatctggatgactggacagtgctctgtaatggaccctactgggtgagagatggtgaaggtccaatcaacctcttacctaccggggtagaattgtctggtgctgttattcttctagggtattaccttttaatctctttgtggaggttactgcacccaatcgtatcccattttagaactagattttttattagcct

SEQ ID NO: 309845 - DNA, 491 bp, Homo sapiens
cgacaaagctggacctcaccgtcgtggtgtgcgcgcttcttagaattaatgaatccctccgggatggatggtaattctatgtatcatgcttatcgagtatcgtcgtactcgtagaggttgaccgctatccaattctgtgctattgtgagtgttattaatcgcgcacacatgacagtcgtcttacaatgttttgattgggataatgctgacgaggtagtgggcagcagtcagtgacaggtgtaacctctgtggatgacagcaacagttactggaggatacgggggaagagtgccacagtgtgtgagaggggaacccccatcaagtgtggccagcccatccggctgacacatgtcaacactggccgaaacctccatagtcaccacttcacttcacctctttctggaaaccaggtgaggtggctttcgatggattgttgctgctctgcattactcagtgggtgcttgtttgatctcttggttcttaaatgtttc

SEQ ID NO: 309846 - DNA, 1340 bp, Homo sapiens
gtcaccgggagtgggcgggccatttcttgttctctctcccgctctcggaagctttcgtctcgtgggtgcgaaaggtaaccgaagcggctcaggaaggcagctgtcactgagcccctggaacagagcgagagtatcgtaagtaaccaggctcagccggtttctcaggccgctctagtcaaataaaccataaagatcagactcgggcttcttcacttccttctctccgtggtttcgccattagcttccggttccggggaggggccgagttttcttcgaagatttggggctccgcgatacagttaggatggctgtagtacctctgctgttgttggggggtttgtggagcgctgtgggagcgtccagcctgggtgtcgttacttgcggctccgtggtgaagctactcaatacgcgccacaacgtccgactgcactcacacgacgtgcgctatgggtcaggtagtgggcagcagtcagtgacaggtgtaacctctgtggatgacagcaacagttactggaggatacgggggaagagtgccacagtgtgtgagaggggaacccccatcaagtgtggccagcccatccggctgacacatgtcaacactggccgaaacctccatagtcaccacttcacttcacctctttctggaaaccaggaagtgagtgcttttggtgaggaaggtgaaggtgattatctggatgactggacagtgctctgtaatggaccctactgggtgagagatggtgaggtgcggttcaaacactcttccactgaggtactgctgtctgtcacaggagaacaatatggtcgacctatcagtgggcaaaaagaggtgcatggcatggcccagccaagtcagaacaactactggaaagccatggaaggcatcttcatgaagcccagtgagttgttgaaggcagaagcccaccatgcagagctgtgaatctagaggctctgagccactgttaacgcacaatgttcacagacatctgttgctgcctcaccttgggatccctgccacaagttccttgggcagtggccatgtcaccattgagatgaagatatacaacagaaaatagtggctgtgtttggaagcttcagccctgcacatttgaactagtcactctcccagacttgcgtgggtcagttctttctgagtagaggacttgctggtaaaggggcagatgctttttattagtactgataaaacaaactgagggaaacatccctcttagctgggaaacttttactcttcaggagcttggcatcatggactgttaatgtatgtgattttccccctattttctctctccaaaatgataaaaacaataattttattatga

SEQ ID NO: 309847 - DNA, 1093 bp, Homo sapiens
  misc_feature (22)..(22): n is a, c, g, or t
  misc_feature (29)..(29): n is a, c, g, or t
  misc_feature (34)..(34): n is a, c, g, or t
  misc_feature (36)..(36): n is a, c, g, or t
aagggctcaggtacgaggccgngtgtgantcggncnaggctccgcgatacagttaggatggctgtagtacctctgctgttgttggggggtttgtggagcgctgtgggagcgtccagcctgggtgtcgttacttgcggctccgtggtgaagctactcaatacgcgccacaacgtccgactgcactcacacgacgtgcgctatgggtcaggtagtgggcagcagtcagtgacaggtgtaacctctgtggatgacagcaacagttactggaggatacgggggaagagtgccacagtgtgtgagaggggaacccccatcaagtgtggccagcccatccggctgacacatgtcaacactggccgaaacctccatagtcaccacttcacttcacctctttctggaaaccaggaagtgagtgcttttggtgaggaaggtgaaggtgattatctggatgactggacagtgctctgtaatggaccctactgggtgagagatggtgaggtgcggttcaaacactcttccactgaggtactgctgtctgtcacaggagaacaatatggtcgacctatcagtgggcaaaaagaggtgcatggcatggcccagccaagtcagaacaactactggaaagccatggaaggcatcttcatgaagcccagtgagttgttgaaggcagaagcccaccatgcagagctgtgaatctagaggctctgagccactgttaacgcacaatgttcacagacatctgttgctgcctcaccttgggatccctgccacaagttccttgggcagtggccatgtcaccattgagatgaagatatacaacagaaaatagtggctgtgtttggaagcttcagccctgcacatttgaactagtcactctcccagacttgcgtgggtcagttctttctgagtagaggacttgctggtaaaggggcagatgctttttattagtactgataaaacaaactgagggaaacatccctcttagctgggaaacttttactcttcaggagcttggcatcatggactgttaatgtatgtgattttccccctattttctctctccaaaatgataaaaacaataattttattatga

SEQ ID NO: 309848 - DNA, 1020 bp, Homo sapiens
gtcaccgggagtgggcgggccatttcttgttctctctcccgctctcggaagctttcgtctcgtgggtgcgaaaggtaaccgaagcggctcaggaaggcagctgtcactgagcccctggaacagagcgagagtatcgtagtgggcagcagtcagtgacaggtgtaacctctgtggatgacagcaacagttactggaggatacgggggaagagtgccacagtgtgtgagaggggaacccccatcaagtgtggccagcccatccggctgacacatgtcaacactggccgaaacctccatagtcaccacttcacttcacctctttctggaaaccaggaagtgagtgcttttggtgaggaaggtgaaggtgattatctggatgactggacagtgctctgtaatggaccctactgggtgagagatggtgaggtgcggttcaaacactcttccactgaggtactgctgtctgtcacaggagaacaatatggtcgacctatcagtgggcaaaaagaggtgcatggcatggcccagccaagtcagaacaactactggaaagccatggaaggcatcttcatgaagcccagtgagttgttgaaggcagaagcccaccatgcagagctgtgaatctagaggctctgagccactgttaacgcacaatgttcacagacatctgttgctgcctcaccttgggatccctgccacaagttccttgggcagtggccatgtcaccattgagatgaagatatacaacagaaaatagtggctgtgtttggaagcttcagccctgcacatttgaactagtcactctcccagacttgcgtgggtcagttctttctgagtagaggacttgctggtaaaggggcagatgctttttattagtactgataaaacaaactgagggaaacatccctcttagctgggaaacttttactcttcaggagcttggcatcatggactgttaatgtatgtgattttccccctattttctctctccaaaatgataaaaacaataattttattatga

SEQ ID NO: 309849 - DNA, 1577 bp, Homo sapiens
gtcaccgggagtgggcgggccatttcttgttctctctcccgctctcggaagctttcgtctcgtgggtgcgaaaggtaaccgaagcggctcaggaaggcagctgtcactgagcccctggaacagagcgagagtatcgtaagtaaccaggctcagccggtttctcaggccgctctagtcaaataaaccataaagatcagactcgggcttcttcacttccttctctccgtggtttcgccattagcttccggttccggggaggggccgagttttcttcgaagatttggggctccgcgatacagttaggatggctgtagtacctctgctgttgttggggggtttgtggagcgctgtgggagcgtccagcctgggtgtcgttacttgcggctccgtggtgaagctactcaatacgcgccacaacgtccgactgcactcacacgacgtgcgctatgggtcaggtagtgggcagcagtcagtgacaggtgtaacctctgtggatgacagcaacagttactggaggatacgggggaagagtgccacagtgtgtgagaggggaacccccatcaagtgtggccagcccatccggctgacacatgtcaacactggccgaaacctccatagtcaccacttcacttcacctctttctggaaaccaggaagtgagtgcttttggtgaggaaggtgaaggtgattatctggatgactggacagtgctctgtaatggaccctactgggtgagagatggtgaggtgcggttcaaacactcttccactgaggtactgctgtctgtcacaggagaacaatatggtcgacctatcagtgggcaaaaagaggtgcatggcatggcccagccaagtcagaacaactactggaaagccatggaaggcatcttcatgaagcccagtgagttgttgaaggcagaagcccaccatgcagagctgtgaatctagaggctctgagccactgttaacgcacaatgttcacagacatctgttgctgcctcaccttgggatccctgccacaagttccttgggcagtggccatgtcaccattgagatgaagatatacaacagaaaatagtggctgtgtttggaagcttcagccctgcacatttgaactagtcactctcccagacttgcgtgggtcagttctttctgagtagaggacttgctggtaaaggggcagatgctttttattagtactgataaaacaaactgagggaaacatccctcttagctgggaaacttttactcttcaggagcttggcatcatggactgttaatgtatgtgattttccccctattttctctctccaaaatgataaaaacaataattttattatgagagtcactgtgttgttatttattaggtgtgctatttcattagctgcttaatcctttgagtcctaagactctttggagacgctatgaagctccaatgtgggcccttttaagagcttttcttgcatacaaaccttttctccctctactttgacttctctccaggcatctcatctttaatagatctttgactaattatagctaaaaactctcagagaatacagcataataaatagccagt

SEQ ID NO: 309850 - DNA, 1398 bp, Homo sapiens
gtcaccgggagtgggcgggccatttcttgttctctctcccgctctcggaagctttcgtctcgtgggtgcgaaaggtaaccgaagcggctcaggaaggcagctgtcactgagcccctggaacagagcgagagtatcgtaagtaaccaggctcagccggtttctcaggccgctctagtcaaataaaccataaagatcagactcgggcttcttcacttccttctctccgtggtttcgccattagcttccggttccggggaggggccgagttttcttcgaagatttggggctccgcgatacagttaggatggctgtagtacctctgctgttgttggggggtttgtggagcgctgtgggagcgtccagcctgggtgtcgttacttgcggctccgtggtgaagctactcaatacgcgccacaacgtccgactgcactcacacgacgtgcgctatgggtcaggtagtgggcagcagtcagtgacaggtgtaacctctgtggatgacagcaacagttactggaggatacgggggaagagtgccacagtgtgtgagaggggaacccccatcaagtgtggccagcccatccggctgacacatgtcaacactggccgaaacctccatagtcaccacttcacttcacctctttctggaaaccaggaagtgagtgcttttggtgaggaaggtgaaggtgattatctggatgactggacagtgctctgtaatggaccctactgggtgagagatggtgaggtgcggttcaaacactcttccactgaggtactgctgtctgtcacaggagaacaatatggtcgacctatcagtgggcaaaaagaggtgcatggcatggcccagccaagtcagaacaactactggaaagccatggaaggcatcttcatgaagcccagtgagttgttgaaggcagaagcccaccatgcagagctgtgaatctagaggctctgagccactgttaacgcacaatgttcacagacatctgttgctgcctcaccttgggatccctgccacaagttccttgggcagtggccatgtcaccattgagatgaagatatacaacagaaaatagtggctgtgtttggaagcttcagccctgcacatttgaactagtcactctcccagacttgcgtgggtcagttctttctgagtagaggacttgctggtaaaggggcagatgctttttattagtactgataaaacaaactgagggaaacatccctcttagctgggaaacttttactcttcaggagcttggcatcatggactgttaatgtatgtgattttccccctattttctctctccaaaatgataaaaacaataattttattatgaacacacgaagcggaaagcaagccaacgctaaaaactcggcttttttgccttcacggtg

SEQ ID NO: 309851 - DNA, 1572 bp, Homo sapiens
gtcaccgggagtgggcgggccatttcttgttctctctcccgctctcggaagctttcgtctcgtgggtgcgaaaggtaaccgaagcggctcaggaaggcagctgtcactgagcccctggaacagagcgagagtatcgtaagtaaccaggctcagccggtttctcaggccgctctagtcaaataaaccataaagatcagactcgggcttcttcacttccttctctccgtggtttcgccattagcttccggttccggggaggggccgagttttcttcgaagatttggggctccgcgatacagttaggatggctgtagtacctctgctgttgttggggggtttgtggagcgctgtgggagcgtccagcctgggtgtcgttacttgcggctccgtggtgaagctactcaatacgcgccacaacgtccgactgcactcacacgacgtgcgctatgggtcaggtagtgggcagcagtcagtgacaggtgtaacctctgtggatgacagcaacagttactggaggatacgggggaagagtgccacagtgtgtgagaggggaacccccatcaagtgtggccagcccatccggctgacacatgtcaacactggccgaaacctccatagtcaccacttcacttcacctctttctggaaaccaggaagtgagtgcttttggtgaggaaggtgaaggtgattatctggatgactggacagtgctctgtaatggaccctactgggtgagagatggtgaggtgcggttcaaacactcttccactgaggtactgctgtctgtcacaggagaacaatatggtcgacctatcagtgggcaaaaagaggtgcatggcatggcccagccaagtcagaacaactactggaaagccatggaaggcatcttcatgaagcccagtgagttgttgaaggcagaagcccaccatgcagagctgtgaatctagaggctctgagccactgttaacgcacaatgttcacagacatctgttgctgcctcaccttgggatccctgccacaagttccttgggcagtggccatgtcaccattgagatgaagatatacaacagaaaatagtggctgtgtttggaagcttcagccctgcacatttgaactagtcactctcccagacttgcgtgggtcagttctttctgagtagaggacttgctggtaaaggggcagatgctttttattagtactgataaaacaaactgagggaaacatccctcttagctgggaaacttttactcttcaggagcttggcatcatggactgttaatgtatgtgattttccccctattttctctctccaaaatgataaaaacaataattttattatgaaaaaaacaaaaaaacaaacaaaaaaaaaaaaaaaaaaaaaaaaaaacaaaacaaaaaaaaagacaaacaaaaaaaaaaaaataacaacaaagaaaagagaacaaaaaaaaaaaaaacaaagagaggaggcgggcggcggcgacgcgaacgccaccccaccccgctcgcggggcggcgctccggctagccgccccgacccgctcggtcgcacacacgagcgggcggcccccgt

SEQ ID NO: 309852 - DNA, 1432 bp, Homo sapiens
gtcaccgggagtgggcgggccatttcttgttctctctcccgctctcggaagctttcgtctcgtgggtgcgaaaggtaaccgaagcggctcaggaaggcagctgtcactgagcccctggaacagagcgagagtatcgtaagtaaccaggctcagccggtttctcaggccgctctagtcaaataaaccataaagatcagactcgggcttcttcacttccttctctccgtggtttcgccattagcttccggttccggggaggggccgagttttcttcgaagatttggggctccgcgatacagttaggatggctgtagtacctctgctgttgttggggggtttgtggagcgctgtgggagcgtccagcctgggtgtcgttacttgcggctccgtggtgaagctactcaatacgcgccacaacgtccgactgcactcacacgacgtgcgctatgggtcaggtagtgggcagcagtcagtgacaggtgtaacctctgtggatgacagcaacagttactggaggatacgggggaagagtgccacagtgtgtgagaggggaacccccatcaagtgtggccagcccatccggctgacacatgtcaacactggccgaaacctccatagtcaccacttcacttcacctctttctggaaaccagttgctctgtaaggtgatattgtgatcattttatagaggagaaaacaaaggctcaaaggatttacagaagaagggatcaagttgagattcaaggaagtgagtgcttttggtgaggaaggtgaaggtgattatctggatgactggacagtgctctgtaatggaccctactgggtgagagatggtgaggtgcggttcaaacactcttccactgaggtactgctgtctgtcacaggagaacaatatggtcgacctatcagtgggcaaaaagaggtgcatggcatggcccagccaagtcagaacaactactggaaagccatggaaggcatcttcatgaagcccagtgagttgttgaaggcagaagcccaccatgcagagctgtgaatctagaggctctgagccactgttaacgcacaatgttcacagacatctgttgctgcctcaccttgggatccctgccacaagttccttgggcagtggccatgtcaccattgagatgaagatatacaacagaaaatagtggctgtgtttggaagcttcagccctgcacatttgaactagtcactctcccagacttgcgtgggtcagttctttctgagtagaggacttgctggtaaaggggcagatgctttttattagtactgataaaacaaactgagggaaacatccctcttagctgggaaacttttactcttcaggagcttggcatcatggactgttaatgtatgtgattttccccctattttctctctccaaaatgataaaaacaataattttattatga

SEQ ID NO: 309853 - DNA, 1165 bp, Homo sapiens
gtcaccgggagtgggcgggccatttcttgttctctctcccgctctcggaagctttcgtctcgtgggtgcgaaaggtaaccgaagcggctcaggaaggcagctgtcactgagcccctggaacagagcgagagtatcgtaagtaaccaggctcagccggtttctcaggccgctctagtcaaataaaccataaagatcagactcgggcttcttcacttccttctctccgtggtttcgccattagcttccggttccggggaggggccgagttttcttcgaagatttggggctccgcgatacagttaggatggctgtagtacctctgctgttgttggggggtttgtggagcgctgtgggagcgtccagcctgggtgtcgttacttgcggctccgtggtgaagctactcaatacgcgccacaacgtccgactgcactcacacgacgtgcgctatgggtcaggtagtgggcagcagtcagtgacaggtgtaacctctgtggatgacagcaacagttactggaggatacgggggaagagtgccacagtgtgtgagaggggaacccccatcaagtgtggccagcccatccggctgacacatgtcaacactggccgaaacctccatagtcaccacttcacttcacctctttctggaaaccaggaagtgagtgcttttggtgaggaaggtgaaggtgattatctggatgactggacagtgctctgtaatggaccctactgggtgagagatggtgaggtgcggttcaaacactcttccactgaggtactgctgtctgtcacaggagaacaatatggtcgacctatcagtgggcaaaaagaggtgcatggcatggcccagccaagtcagaacaactactggaaagccatggaaggcatcttcatgaagcccagtgagttgttgaaggcagaagcccaccatgcagagctgtgaatctagaggctctgagccactgttaacgcacaatgttcacagacatctgttgctgcctcaccttgggatccctgccacaagttccttgggcagtggccatgtcaccattgagatgaagatatacaacagaaaatagtggctgtgtttggaagcttcagccctgcatttgactagcttcccaagtggggggcagatttctggtaggcccgcgtaacggcgatggtt

SEQ ID NO: 309854 - DNA, 755 bp, Homo sapiens
caaccggaccctcgacccgtcccctttcccatctttatccctccatatacacctccttacaagcgacgaagtgagtgcttttggtgaggaaggtgaaggtgattatctggatgactggacagtgctctgtaatggaccctactgggtgagagatggtgaggtgcggttcaaacactcttccactgaggtactgctgtctgtcacaggagaacaatatggtcgacctatcagtgggcaaaaagaggtgcatggcatggcccagccaagtcagaacaactactggaaagccatggaaggcatcttcatgaagcccagtgagttgttgaaggcagaagcccaccatgcagagctgtgaatctagaggctctgagccactgttaacgcacaatgttcacagacatctgttgctgcctcaccttgggatccctgccacaagttccttgggcagtggccatgtcaccattgagatgaagatatacaacagaaaatagtggctgtgtttggaagcttcagccctgcacatttgaactagtcactctcccagacttgcgtgggtcagttctttctgagtagaggacttgctggtaaaggggcagatgctttttattagtactgataaaacaaactgagggaaacatccctcttagctgggaaacttttactcttcaggagcttggcatcatggactgttaatgtatgtgattttccccctattttctctctccaaaatgataaaaacaataattttattatga

SEQ ID NO: 309855 - DNA, 1195 bp, Homo sapiens
gtcaccgggagtgggcgggccatttcttgttctctctcccgctctcggaagctttcgtctcgtgggtgcgaaaggtaaccgaagcggctcaggaaggcagctgtcactgagcccctggaacagagcgagagtatcgtaagtaaccaggctcagccggtttctcaggccgctctagtcaaataaaccataaagatcagactcgggcttcttcacttccttctctccgtggtttcgccattagcttccggttccggggaggggccgagttttcttcgaagatttggggctccgcgatacagttaggatggctgtagtacctctgctgttgttggggggtttgtggagcgctgtgggagcgtccagcctgggtgtcgttacttgcggctccgtggtgaagctactcaatacgcgccacaacgtccgactgcactcacacgacgtgcgctatgggtcaggtagtgggcagcagtcagtgacaggtgtaacctctgtggatgacagcaacagttactggaggatacgggggaagagtgccacagtgtgtgagaggggaacccccatcaagtgtggccagcccatccggctgacacatgtcaacactggccgaaacctccatagtcaccacttcacttcacctctttctggaaaccagaatatggtcgacctatcagtgggcaaaaagaggtgcatggcatggcccagccaagtcagaacaactactggaaagccatggaaggcatcttcatgaagcccagtgagttgttgaaggcagaagcccaccatgcagagctgtgaatctagaggctctgagccactgttaacgcacaatgttcacagacatctgttgctgcctcaccttgggatccctgccacaagttccttgggcagtggccatgtcaccattgagatgaagatatacaacagaaaatagtggctgtgtttggaagcttcagccctgcacatttgaactagtcactctcccagacttgcgtgggtcagttctttctgagtagaggacttgctggtaaaggggcagatgctttttattagtactgataaaacaaactgagggaaacatccctcttagctgggaaacttttactcttcaggagcttggcatcatggactgttaatgtatgtgattttccccctattttctctctccaaaatgataaaaacaataattttattatga

SEQ ID NO: 309856 - DNA, 856 bp, Homo sapiens
gtcaccgggagtgggcgggccatttcttgttctctctcccgctctcggaagctttcgtctcgtgggtgcgaaaggtaaccgaagcggctcaggaaggcagctgtcactgagcccctggaacagagcgagagtatcgtaagtaaccaggctcagccggtttctcaggccgctctagtcaaataaaccataaagatcagactcgggcttcttcacttccttctctccgtggtttcgccattagcttccggttccggggaggggccgagttttcttcgaagatttggggctccgcgatacagttaggatggctgtagtacctctgctgttgttggggggtttgtggagcgctgtgggagcgtccagcctgggtgtcgttacttgcggctccgtggtgaagctactcaatacgcgccacaacgtccgactgcactcacacgacgtgcgctatgggtcagctcttctgcatcttacacttgctcctcagtttccatctttggcccccttctacccaaaccttaacctccttcttgtaagaaacttggagcagtgacaggaattgcagagaaaactgcttttttttttttttttttttagcgtttgaaattaaaatgtttagtaataaattatttgtggattcattcagcataggtcttaatgagttcctactacatggctagaattgtactacatacaggagattcggtggtgataatcagtcaagaaaattacaatataataaaaacagactaaaaaaagaaagtcttatctgcctgaaaaaaaaagataaagttaaaaaaaaagaatgaaggtcagctagtgagatgtgagaggcatctaagatagctggtagattttt

SEQ ID NO: 309857 - DNA, 505 bp, Homo sapiens
agctgcagatgatcgagattggtcgatcactgtactccagcctgggcgaaagagtgagaatccatctcaaaaaaaaaagagaatggcttgttgacaaatcatgcattgaagctgtgataatccatttgtcttttctcttggctccacatacaggtggtgtgcagatcctgccttactaaactgtttgaagcaaaaaaacaccgtggtcaggttggttttactacttaatcctttctccctcatccacaagttgtgtttcctaaagtagttgatttgttgagcatagttcctagtctgctttcttcattctcactcagtacagtgatcgaccaatctgttccaggtctttgccagaaatcagattcttcctacaaatgtttttttcttggagtggctgtccttttcctcttagattattagaagccagcagttcctcttaagagaatcttttttaagctagcacatacctgtcaaaaggcaaagttggaggaggcatcatggagct

SEQ ID NO: 309858 - DNA, 704 bp, Homo sapiens
ggaagctgaggcaggagaattgcttgaatccgggaggtggaggttgcagcaagccaagatcgcaccattgctctccagcctgggcaacaagagcgaaactctgtctcaaaaaaaaaaaaaggaaagaacctcagttgaatgaatctacgttgtttattgtcttggaacaatgaaattaaagtctaatttgtaaactgaatagcaaatacataattcatcttgcagaatttctttttcaggcctaccccttgctcaggttcaagaagacagtgaagaggctcattccgcatcttctttctttgcagaaatttctcaatatacaagtgggtgagtaacaatccattagttcagtctattgtaataattccatttcttgttcagttgtttggcaacgtaacatttgaatcatttaaattccagttaaaaataatcagttattgcctaggttttcttgtagggtttttatggtttaggtcttacatttaaatctttaatccatcttgagttaatttttatgtaaggtgtaaggaaggggtgtagtttcagttttctgcatatggctagacagttttcccaacaccatttattaaatagggagtcctttccccattgcttgtttttgtcaggtttgtcaaagatcacatggttgtagatgtgtggtgttatttctgaggcctctgttctgttccattggtctatatatc

SEQ ID NO: 309859 - DNA, 3532 bp, Homo sapiens
ttgttcttcctaacataaaatcagaagatacaccatgccttctgtctatagatctgtttcatgttttggtgggtgctgtgttagcattcccatccttgtattgggatgaccctgttgatctgcagccttcttcagttagttcttcctataaccacctttatctcttccatttgatcaccatggcacacatgcttcagatactacttacagtagacacaggcctaccccttgctcaggttcaagaagacagtgaagaggctcattccgcatcttctttctttgcagaaatttctcaatatacaagtggctccattgggtgtgatattcctggctggtatttgtgggtctcactgaagaatggcatcaccccttatcttcgctgtgctgcattgtttttccactatttacttggggtaactccgcctgaggaactgcataccaattctgcagaaggagagtacagtgcactctgtagctatctatctttacctacaaatttgttcctgctcttccaggaatattgggatactgtaaggcccttgctccagaggtggtgtgcagatcctgccttactaaactgtttgaagcaaaaaaacaccgtggtcaggtaccctagaaaaagaaatagtttgatagagcttcctgatgactatagctgcctcctgaatcaagcttctcatttcaggtgcccacggtctgcagatgatgagcgaaagcatcctgtcctctgccttttctgtggggctatactatgttctcagaacatttgctgccaggaaattgtgaacggggaagaggttggagcttgcatttttcacgcacttcactgtggagccggagtctgcattttcctaaaaatcagagaatgccgagtggtcctggttgaaggtaaagccagaggctgtgcctatccagctccttacttggatgaatatggagaaacagaccctggcctgaagaggggcaacccccttcatttatctcgtgagcggtatcggaagctccatttggtctggcaacaacactgcattatagaagagattgctaggagccaagagactaatcagatgttatttggattcaactggcagttactgtgagctccaactctgcctcaagacaatcacaaatgacgacagtagtaaaggctgattcaaaattatggaaaactttctgagggctgggaaagtattggagggtcttttgctccatgtccaggttcacttacatcaataaaatatttcttaatggagtattgctttcaattagcaaacatatgcttcacaggaaaaaaggacatagatcaatctgttttatgtgctagtatttccaggaatttattccccttcataatttgtctcatttcattttatttcatccacttggtagatgaagtcacgtcaaacagttgtagacattttatatgttggttaactcttctgcaattttgtatttggtgttttccccccaagtttagttcaactgacattggatcactgacaaaattctaataatctgtgatagtcttccttgcagttaaagaagaattgcagaaaccatgcaatatacttgggaaagattccaaaaataaattttttattatttctcttttaaggaaatacccctaatgtgccacctgctgctatcaccacaaattaaactcaatctctatgtggacagaggatgatttctgccaatatggaaaagcttttttctcactgtaggcctcaagaaaagttagggtaatgtatttgttattcattcctgacggtacaaagagcttgcagttctcacctctgactaccagtagctttgttgagttttgaaataatacttgacattttccaaaggcaaatctcattctgcaaggagattgtggcaccatcctgtttgactctcagaaacctcttgtaattctgatgtaaaaactgtagaatgaagatgagaaaattctcgcaatgagtggatcatgacaactgtaaattagaacaatcagatttaaaccaattccgcaatcttctatatctttgtaaaagacaaatccttgatgttgtctgtgtgcaaccttttcataaactctggttttatgactagtacaaaccaccaaaaaagccatgtgatcaatagtctgtgtcctgttataacatgctgtggttgagccatcttgtttataaataatagagctctcctgaatttgtgcatagacttcttggttcctggcttttgttttttgtatcaagagattgtgatataaaacagcagaagataaatggaaaccttccattttaacttacgttgtttctggggtaatgttagaaccttgaaagatgcattcaaagactgtatcttattttgcccttggctattagtgtctcacatatgtgtgtaaatgttttcctaccttctttttgctcagcaaaggcaagcaagtaaaatatatttgctaagtgattagtgatgcacatttggggctagatttttttggtacttttatgtaaagaaaagtggattttgcagtaagggattggcatgagcaggcgtcagaatcacaatcatgattttctacttgaataattacaattcagaaggtatctggataaatagatacatgtctagtgaacaatttgtaacaataacaggtaaggatcaggaaattcagtattcagtttgtcagatttgccagaatgatgaaagtatttgaacatgtgtgtttgtttcttatataattgtattgagtggattgtttgactgggaaatctgggctagaataggaaacagaagatactgacttctaccctaatagatgggccccaatttagcaaagataaactgactttatttttagtcctttttatattaacttaataaattctggagttaggctctcaagaggacagagggactgtctggcaatggccagccagacctttactgccaaagaacccatttcatattgcgttccactgattgagattgattcagatttttgcactgtagatgagcgtatgtctcagtgctgccccaagccccagggatttctcattatgttcaaatgtcctagtgatttaccttaatcattgcaaacaattatgcttatgaagtttacttacaaacaagcaactgagtcactttattttctttagtgtagtatgtgaaggcactggttcaacaggatggctccagaactgtgtttttctaatgtttggtaaggggctagtgagaattttaatgatatggtgaagaaaaatatatctgtataattaatttattatattggtgtatgggctgtgagttcaccttttagtggtcatttgtcatttcataacaactatgcattttggttcactgtgatgatgatctatatttagtgactgcaacatgtttataccactgattcaaattccatccatgatgaagttatacaaataatgcatatattgataacttttattgcaaaaatgtaaatttaaaacttgtataatgttcttgtgctttttaaaataaaatatatgtgtatatttaaaaagaaaaa

SEQ ID NO: 309860 - DNA, 3478 bp, Homo sapiens
ttgttcttcctaacataaaatcagaagatacaccatgccttctgtctatagatctgtttcatgttttggtgggtgctgtgttagcattcccatccttgtattgggatgaccctgttgatctgcagccttcttcagttagttcttcctataaccacctttatctcttccatttgatcaccatggcacacatgcttcagatactacttacagtagacacaggcctaccccttgctcaggttcaagaagacagtgaagaggctcattccgcatcttctttctttgcagaaatttctcaatatacaagtggctccattgggtgtgatattcctggctggtatttgtgggtctcactgaagaatggcatcaccccttatcttcgctgtgctgcattgtttttccactatttacttggggtaactccgcctgaggaactgcataccaattctgcagaaggagagtacagtgcactctgtagctatctatctttacctacaaatttgttcctgctcttccaggaatattgggatactgtaaggcccttgctccagaggtggtgtgcagatcctgccttactaaactgtttgaagcaaaaaaacaccgtggtcaggtaccctagaaaaagaaatagtttgatagagcttcctgatgactatagctgcctcctgaatcaagcttctcatttcaggtgcccacggtctgcagatgatgagcgaaagcatcctgtcctctgccttttctgtggggctatactatgttctcagaacatttgctgccaggaaattgtgaacggggaagaggttggagcttgcatttttcacgcacttcactgtggagccggagtctgcattttcctaaaaatcagagaatgccgagtggtcctggttgaaggtaaagccagaggctgtgcctatccagctccttacttggatgaatatggagaaacagaccctggcctgaagaggggcaacccccttcatttatctcgtgagcggtatcggaagctccatttggtctggcaacaacactgcattatagaagagattgctaggagccaagagactaatcagatgttatttggattcaactggcagttactgtgagctccaactctgcctcaagacaatcacaaatgacgacagtagtaaaggctgattcaaaattatggaaaactttctgagggctgggaaagtattggagggtcttttgctccatgtccaggttcacttacatcaataaaatatttcttaatggagtattgctttcaattagcaaacatatgcttcacaggaaaaaaggacatagatcaatctgttttatgtgctagtatttccaggaatttattccccttcataatttgtctcatttcattttatttcatccacttggtagatgaagtcacgtcaaacagttgtagacattttatatgttggttaactcttctgcaattttgtatttggtgttttccccccaagtttagttcaactgacattggatcactgacaaaattctaataatctgtgatagtcttccttgcagttaaagaagaattgcagaaaccatgcaatatacttgggaaagattccaaaaataaattttttattatttctcttttaaggaaatacccctaatgtgccacctgctgctatcaccacaaattaaactcaatctctatgtggacagaggatgatttctgccaatatggaaaagcttttttctcactgtaggcctcaagaaaagttagggtaatgtatttgttattcattcctgacggtacaaagagcttgcagttctcacctctgactaccagtagctttgttgagttttgaaataatacttgacattttccaaaggcaaatctcattctgcaaggagattgtggcaccatcctgtttgactctcagaaacctcttgtaattctgatgtaaaaactgtagaatgaagatgagaaaattctcgcaatgagtggatcatgacaactgtaaattagaacaatcagatttaaaccaattccgcaatcttctatatctttgtaaaagacaaatccttgatgttgtctgtgtgcaaccttttcataaactctggttttatgactagtacaaaccaccaaaaaagccatgtgatcaatagtctgtgtcctgttataacatgctgtggttgagccatcttgtttataaataatagagctctcctgaatttgtgcatagacttcttggttcctggcttttgttttttgtatcaagagattgtgatataaaacagcagaagataaatggaaaccttccattttaacttacgttgtttctggggtaatgttagaaccttgaaagatgcattcaaagactgtatcttattttgcccttggctattagtgtctcacatatgtgtgtaaatgttttcctaccttctttttgctcagcaaaggcaagcaagtaaaatatatttgctaagtgattagtgatgcacatttggggctagatttttttggtacttttatgtaaagatgattttctacttgaataattacaattcagaaggtatctggataaatagatacatgtctagtgaacaatttgtaacaataacaggtaaggatcaggaaattcagtattcagtttgtcagatttgccagaatgatgaaagtatttgaacatgtgtgtttgtttcttatataattgtattgagtggattgtttgactgggaaatctgggctagaataggaaacagaagatactgacttctaccctaatagatgggccccaatttagcaaagataaactgactttatttttagtcctttttatattaacttaataaattctggagttaggctctcaagaggacagagggactgtctggcaatggccagccagacctttactgccaaagaacccatttcatattgcgttccactgattgagattgattcagatttttgcactgtagatgagcgtatgtctcagtgctgccccaagccccagggatttctcattatgttcaaatgtcctagtgatttaccttaatcattgcaaacaattatgcttatgaagtttacttacaaacaagcaactgagtcactttattttctttagtgtagtatgtgaaggcactggttcaacaggatggctccagaactgtgtttttctaatgtttggtaaggggctagtgagaattttaatgatatggtgaagaaaaatatatctgtataattaatttattatattggtgtatgggctgtgagttcaccttttagtggtcatttgtcatttcataacaactatgcattttggttcactgtgatgatgatctatatttagtgactgcaacatgtttataccactgattcaaattccatccatgatgaagttatacaaataatgcatatattgataacttttattgcaaaaatgtaaatttaaaacttgtataatgttcttgtgctttttaaaataaaatatatgtgtatatttaaaaagaaaaa

SEQ ID NO: 309861 - DNA, 1705 bp, Homo sapiens
cctttacaatcagctcgtaccctgcaaatctcattctgcaaggagattgtggcaccatcctgtttgactctcagaaacctcttgtaattctgatgtaaaaactgtagaatgaagatgagaaaattctcgcaatgagtggatcatgacaactgtaaattagaacaatcagatttaaaccaattccgcaatcttctatatctttgtaaaagacaaatccttgatgttgtctgtgtgcaaccttttcataaactctggttttatgactagtacaaaccaccaaaaaagccatgtgatcaatagtctgtgtcctgttataacatgctgtggttgagccatcttgtttataaataatagagctctcctgaatttgtgcatagacttcttggttcctggcttttgttttttgtatcaagagattgtgatataaaacagcagaagataaatggaaaccttccattttaacttacgttgtttctggggtaatgttagaaccttgaaagatgcattcaaagactgtatcttattttgcccttggctattagtgtctcacatatgtgtgtaaatgttttcctaccttctttttgctcagcaaaggcaagcaagtaaaatatatttgctaagtgattagtgatgcacatttggggctagatttttttggtacttttatgtaaagaaaagtggattttgcagtaagggattggcatgagcaggcgtcagaatcacaatcatgattttctacttgaataattacaattcagaaggtatctggataaatagatacatgtctagtgaacaatttgtaacaataacaggtaaggatcaggaaattcagtattcagtttgtcagatttgccagaatgatgaaagtatttgaacatgtgtgtttgtttcttatataattgtattgagtggattgtttgactgggaaatctgggctagaataggaaacagaagatactgacttctaccctaatagatgggccccaatttagcaaagataaactgactttatttttagtcctttttatattaacttaataaattctggagttaggctctcaagaggacagagggactgtctggcaatggccagccagacctttactgccaaagaacccatttcatattgcgttccactgattgagattgattcagatttttgcactgtagatgagcgtatgtctcagtgctgccccaagccccagggatttctcattatgttcaaatgtcctagtgatttaccttaatcattgcaaacaattatgcttatgaagtttacttacaaacaagcaactgagtcactttattttctttagtgtagtatgtgaaggcactggttcaacaggatggctccagaactgtgtttttctaatgtttggtaaggggctagtgagaattttaatgatatggtgaagaaaaatatatctgtataattaatttattatattggtgtatgggctgtgagttcaccttttagtggtcatttgtcatttcataacaactatgcattttggttcactgtgatgatgatctatatttagtgactgcaacatgtttataccactgattcaaattccatccatgatgaagttatacaaataatgcatatattgataacttttattgcaaaaatgtaaatttaaaacttgtataatgttcttgtgctttttaaaataaaatatatgtgtatatttaaaaagaaaaa

SEQ ID NO: 309862 - DNA, 3736 bp, Homo sapiens
  misc_feature (3535)..(3535): n is a, c, g, or t
ttgttcttcctaacataaaatcagaagatacaccatgccttctgtctatagatctgtttcatgttttggtgggtgctgtgttagcattcccatccttgtattgggatgaccctgttgatctgcagccttcttcagttagttcttcctataaccacctttatctcttccatttgatcaccatggcacacatgcttcagatactacttacagtagacacaggcctaccccttgctcaggttcaagaagacagtgaagaggctcattccgcatcttctttctttgcagaaatttctcaatatacaagtggctccattgggtgtgatattcctggctggtatttgtgggtctcactgaagaatggcatcaccccttatcttcgctgtgctgcattgtttttccactatttacttggggtaactccgcctgaggaactgcataccaattctgcagaaggagagtacagtgcactctgtagctatctatctttacctacaaatttgttcctgctcttccaggaatattgggatactgtaaggcccttgctccagaggtggtgtgcagatcctgccttactaaactgtttgaagcaaaaaaacaccgtggtcaggtaccctagaaaaagaaatagtttgatagagcttcctgatgactatagctgcctcctgaatcaagcttctcatttcaggtgcccacggtctgcagatgatgagcgaaagcatcctgtcctctgccttttctgtggggctatactatgttctcagaacatttgctgccaggaaattgtgaacggggaagaggttggagcttgcatttttcacgcacttcactgtggagccggagtctgcattttcctaaaaatcagagaatgccgagtggtcctggttgaaggtaaagccagaggctgtgcctatccagctccttacttggatgaatatggagaaacagaccctggcctgaagaggggcaacccccttcatttatctcgtgagcggtatcggaagctccatttggtctggcaacaacactgcattatagaagagattgctaggagccaagagactaatcagatgttatttggattcaactggcagttactgtgagctccaactctgcctcaagacaatcacaaatgacgacagtagtaaaggctgattcaaaattatggaaaactttctgagggctgggaaagtattggagggtcttttgctccatgtccaggttcacttacatcaataaaatatttcttaatggagtattgctttcaattagcaaacatatgcttcacaggaaaaaaggacatagatcaatctgttttatgtgctagtatttccaggaatttattccccttcataatttgtctcatttcattttatttcatccacttggtagatgaagtcacgtcaaacagttgtagacattttatatgttggttaactcttctgcaattttgtatttggtgttttccccccaagtttagttcaactgacattggatcactgacaaaattctaataatctgtgatagtcttccttgcagttaaagaagaattgcagaaaccatgcaatatacttgggaaagattccaaaaataaattttttattatttctcttttaaggaaatacccctaatgtgccacctgctgctatcaccacaaattaaactcaatctctatgtggacagaggatgatttctgccaatatggaaaagcttttttctcactgtaggcctcaagaaaagttagggtaatgtatttgttattcattcctgacggtacaaagagcttgcagttctcacctctgactaccagtagctttgttgagttttgaaataatacttgacattttccaaaggcaaatctcattctgcaaggagattgtggcaccatcctgtttgactctcagaaacctcttgtaattctgatgtaaaaactgtagaatgaagatgagaaaattctcgcaatgagtggatcatgacaactgtaaattagaacaatcagatttaaaccaattccgcaatcttctatatctttgtaaaagacaaatccttgatgttgtctgtgtgcaaccttttcataaactctggttttatgactagtacaaaccaccaaaaaagccatgtgatcaatagtctgtgtcctgttataacatgctgtggttgagccatcttgtttataaataatagagctctcctgaatttgtgcatagacttcttggttcctggcttttgttttttgtatcaagagattgtgatataaaacagcagaagataaatggaaaccttccattttaacttacgttgtttctggggtaatgttagaaccttgaaagatgcattcaaagactgtatcttattttgcccttggctattagtgtctcacatatgtgtgtaaatgttttcctaccttctttttgctcagcaaaggcaagcaagtaaaatatatttgctaagtgattagtgatgcacatttggggctagatttttttggtacttttatgtaaagaaaagtggattttgcagtaagggattggcatgagcaggcgtcagaatcacaatcatgattttctacttgaataattacaattcagaaggtatctggataaatagatacatgtctagtgaacaatttgtaacaataacaggtaaggatcaggaaattcagtattcagtttgtcagatttgccagaatgatgaaagtatttgaacatgtgtgtttgtttcttatataattgtattgagtggattgtttgactgggaaatctgggctagaataggaaacagaagatactgacttctaccctaatagatgggccccaatttagcaaagataaactgactttatttttagtcctttttatattaacttaataaattctggagttaggctctcaagaggacagagggactgtctggcaatggccagccagacctttactgccaaagaacccatttcatattgcgttccactgattgagattgattcagatttttgcactgtagatgagcgtatgtctcagtgctgccccaagccccagggatttctcattatgttcaaatgtcctagtgatttaccttaatcattgcaaacaattatgcttatgaagtttacttacaaacaagcaactgagtcactttattttctttagtgtagtatgtgaaggcactggttcaacaggatggctccagaactgtgtttttctaatgtttggtaaggggctagtgagaattttaatgatatggtgaagaaaaatatatctgtataattaatttattatattggtgtatgggctgtgagttcaccttttagtggtcatttgtcatttcataacaactatgcattttggttcactgtgatgatgatctatatttagtgactgcaacatgtttataccactgattcaaattccatccatgatgaagttatacaaataatgcatatattgataacttttattgcaaaaatgtaaatttaaaacttgtataatgttcttgtgctttttaaaataaaatatatgtgtatatttaaaaagaaaaaaanaaaaaaaaaaaaaaaaaacaaaaaaaataaaaaaaaaaataaaaaaaaaaaaaaaaaataaataataataaataataaaaaaaaaataattattatatctttttggccccctttgccccatttttttttaattttgaaaagatttttttttgcgcccaaattggggctcttttgccaacttcccccttttggggggcgttt

SEQ ID NO: 309863 - DNA, 431 bp, Homo sapiens
atgtccatttttctctcataggtgggtgctgtgttagcattcccatccttgtattgggatgaccctgttgatctgcagccttcttcagttagttcttcctataaccacctttatctcttccatttgatcaccatggcacacatgcttcagatactacttacagtagacacaggtaaggttttcatctgggtgttgactgtgaataacattttgccatgctttactggcaaaattaattattcttgtgattatataatgtatttctaggttctgtgttatgttttttgttgaatgattatctgttttttaatggatactgtttaaacaaggaaaggtagaataagctgtgaaaaagataattaggtgaaactacctaattatcaactgctctacagatatgcagggagaccacttggacctgcttttccctc

SEQ ID NO: 309864 - DNA, 1833 bp, Homo sapiens
agcggagttacagggagcaccaccagggaacatctcggggagcctggttggaagctgcaggcttagtctgtcggctgcgggtctctgactgccctgtggggagggtcttgccttaacatcccttgcatttggctgcaaagaaatctgcttggaagaaggggttacgctgtttggccgggcagaaactccgctgagcagaacttgccgccagaatgctcctcctgttgctgagtatcatcgtcctccacgtcgcggtgctggtgctgctgttcgtctccacgatcgtcagccaatggatcgtgggcaatggacacgcaactgatctctggcagaactgtagcacctcttcctcaggaaatgtccaccactgtttctcatcatcaccaaacgaatggctgcagtctgtccaggccaccatgatcctgtcgatcatcttcagcattctgtctctgttcctgttcttctgccaactcttcaccctcaccaaggggggcaggttttacatcactggaatcttccaaattcttgctggtctgtgcgtgatgagtgctgcggccatctacacggtgaggcacccggagtggcatctcaactcggattactcctacggtttcgcctacatcctggcctgggtggccttccccctggcccttctcagcggtgtcatctatgtgatcttgcggaaacgcgaatgaggcgcccagacggtctgtctgaggctctgagcgtacatagggaagggaggaagggaaaccagaaagcagacaaagaaaaaagagctagcccaaaatcccaaactcaaaccaaaccaaacagaaagcagtggaggtgggggttgctgttgattgaagatgtatataatatctccggtttataaaacctatttataacactttttacatatatgtacatagtattgtttgctttttatgttgaccatcagcctcgtgttgagccttaaagaagtagctaaggaactttacatcctaacagtataatccagctcagtatttttgttttgttttttgtttgtttgttttgttttacccagaaataagataactccatctcgccccttccctttcatctgaaagaagatacctccctcccagtccacctcatttagaaaaccaaagtgtgggtagaaaccccaaatgtccaaaagcccttttctggtgggtgacccagtgcatccaacagaaacagccgctgcccgaacctctgtgtgaagctttacgcgcacacggacaaaatgcccaaactggagcccttgcaaaaacacggcttgtggcattggcatacttgcccttacaggtggagtatcttcgtcacacatctaaatgagaaatcagtgacaacaagtctttgaaatggtgctatggatttaccattccttattatcactaatcatctaaacaactcactggaaatccaattaacaattttacaacataagatagaatggagacctgaataattctgtgtaatataaatggtttataactgcttttgtacctagctaggctgctattattactataatgagtaaatcataaagccttcatcactcccacatttttcttacggtcggagcatcagaacaagcgtctagactccttgggaccgtgagttcctagagcttggctgggtctaggctgttctgtgcctccaaggactgtctggcaatgacttgtattggccaccaactgtagatgtatatatggtgcccttctgatgctaagactccagaccttttgtttttgctttgcattttctgattttataccaactgtgtggactaagatgcattaaaataaacatcagagtaactca

SEQ ID NO: 309865 - DNA, 1807 bp, Homo sapiens
taaaggggaacgccaggagcctcccactgcccccttgcttcgcgcgcgcgcagccccgcagcgcagctttggcggcgccagcagcggagccaacgcacccgagtttgtgtttgaggccaccctgaggatcgggacagctgttcctttgggctgcagaaactccgctgagcagaacttgccgccagaatgctcctcctgttgctgagtatcatcgtcctccacgtcgcggtgctggtgctgctgttcgtctccacgatcgtcagccaatggatcgtgggcaatggacacgcaactgatctctggcagaactgtagcacctcttcctcaggaaatgtccaccactgtttctcatcatcaccaaacgaatggctgcagtctgtccaggccaccatgatcctgtcgatcatcttcagcattctgtctctgttcctgttcttctgccaactcttcaccctcaccaaggggggcaggttttacatcactggaatcttccaaattcttgctggtctgtgcgtgatgagtgctgcggccatctacacggtgaggcacccggagtggcatctcaactcggattactcctacggtttcgcctacatcctggcctgggtggccttccccctggcccttctcagcggtgtcatctatgtgatcttgcggaaacgcgaatgaggcgcccagacggtctgtctgaggctctgagcgtacatagggaagggaggaagggaaaccagaaagcagacaaagaaaaaagagctagcccaaaatcccaaactcaaaccaaaccaaacagaaagcagtggaggtgggggttgctgttgattgaagatgtatataatatctccggtttataaaacctatttataacactttttacatatatgtacatagtattgtttgctttttatgttgaccatcagcctcgtgttgagccttaaagaagtagctaaggaactttacatcctaacagtataatccagctcagtatttttgttttgttttttgtttgtttgttttgttttacccagaaataagataactccatctcgccccttccctttcatctgaaagaagatacctccctcccagtccacctcatttagaaaaccaaagtgtgggtagaaaccccaaatgtccaaaagcccttttctggtgggtgacccagtgcatccaacagaaacagccgctgcccgaacctctgtgtgaagctttacgcgcacacggacaaaatgcccaaactggagcccttgcaaaaacacggcttgtggcattggcatacttgcccttacaggtggagtatcttcgtcacacatctaaatgagaaatcagtgacaacaagtctttgaaatggtgctatggatttaccattccttattatcactaatcatctaaacaactcactggaaatccaattaacaattttacaacataagatagaatggagacctgaataattctgtgtaatataaatggtttataactgcttttgtacctagctaggctgctattattactataatgagtaaatcataaagccttcatcactcccacatttttcttacggtcggagcatcagaacaagcgtctagactccttgggaccgtgagttcctagagcttggctgggtctaggctgttctgtgcctccaaggactgtctggcaatgacttgtattggccaccaactgtagatgtatatatggtgcccttctgatgctaagactccagaccttttgtttttgctttgcattttctgattttataccaactgtgtggactaagatgcattaaaataaacatcagagtaactca

SEQ ID NO: 309866 - DNA, 1717 bp, Homo sapiens
tgcgcgcgcctccgtcgctcggcccagtgcgttcggcctcacgcccagcgctctcctcgcaggcagaaactccgctgagcagaacttgccgccagaatgctcctcctgttgctgagtatcatcgtcctccacgtcgcggtgctggtgctgctgttcgtctccacgatcgtcagccaatggatcgtgggcaatggacacgcaactgatctctggcagaactgtagcacctcttcctcaggaaatgtccaccactgtttctcatcatcaccaaacgaatggctgcagtctgtccaggccaccatgatcctgtcgatcatcttcagcattctgtctctgttcctgttcttctgccaactcttcaccctcaccaaggggggcaggttttacatcactggaatcttccaaattcttgctggtctgtgcgtgatgagtgctgcggccatctacacggtgaggcacccggagtggcatctcaactcggattactcctacggtttcgcctacatcctggcctgggtggccttccccctggcccttctcagcggtgtcatctatgtgatcttgcggaaacgcgaatgaggcgcccagacggtctgtctgaggctctgagcgtacatagggaagggaggaagggaaaccagaaagcagacaaagaaaaaagagctagcccaaaatcccaaactcaaaccaaaccaaacagaaagcagtggaggtgggggttgctgttgattgaagatgtatataatatctccggtttataaaacctatttataacactttttacatatatgtacatagtattgtttgctttttatgttgaccatcagcctcgtgttgagccttaaagaagtagctaaggaactttacatcctaacagtataatccagctcagtatttttgttttgttttttgtttgtttgttttgttttacccagaaataagataactccatctcgccccttccctttcatctgaaagaagatacctccctcccagtccacctcatttagaaaaccaaagtgtgggtagaaaccccaaatgtccaaaagcccttttctggtgggtgacccagtgcatccaacagaaacagccgctgcccgaacctctgtgtgaagctttacgcgcacacggacaaaatgcccaaactggagcccttgcaaaaacacggcttgtggcattggcatacttgcccttacaggtggagtatcttcgtcacacatctaaatgagaaatcagtgacaacaagtctttgaaatggtgctatggatttaccattccttattatcactaatcatctaaacaactcactggaaatccaattaacaattttacaacataagatagaatggagacctgaataattctgtgtaatataaatggtttataactgcttttgtacctagctaggctgctattattactataatgagtaaatcataaagccttcatcactcccacatttttcttacggtcggagcatcagaacaagcgtctagactccttgggaccgtgagttcctagagcttggctgggtctaggctgttctgtgcctccaaggactgtctggcaatgacttgtattggccaccaactgtagatgtatatatggtgcccttctgatgctaagactccagaccttttgtttttgctttgcattttctgattttataccaactgtgtggactaagatgcattaaaataaacatcagagtaactca

SEQ ID NO: 309867 - DNA, 1621 bp, Homo sapiens
agcggagttacagggagcaccaccagggaacatctcggggagcctggttggaagctgcaggcttagtctgtcggctgcgggtctctgactgccctgtggggagggtcttgccttaacatcccttgcatttggctgcaaagaaatctgcttggaagaaggggttacgctgtttggccggaatggctgcagtctgtccaggccaccatgatcctgtcgatcatcttcagcattctgtctctgttcctgttcttctgccaactcttcaccctcaccaaggggggcaggttttacatcactggaatcttccaaattcttgctggtctgtgcgtgatgagtgctgcggccatctacacggtgaggcacccggagtggcatctcaactcggattactcctacggtttcgcctacatcctggcctgggtggccttccccctggcccttctcagcggtgtcatctatgtgatcttgcggaaacgcgaatgaggcgcccagacggtctgtctgaggctctgagcgtacatagggaagggaggaagggaaaccagaaagcagacaaagaaaaaagagctagcccaaaatcccaaactcaaaccaaaccaaacagaaagcagtggaggtgggggttgctgttgattgaagatgtatataatatctccggtttataaaacctatttataacactttttacatatatgtacatagtattgtttgctttttatgttgaccatcagcctcgtgttgagccttaaagaagtagctaaggaactttacatcctaacagtataatccagctcagtatttttgttttgttttttgtttgtttgttttgttttacccagaaataagataactccatctcgccccttccctttcatctgaaagaagatacctccctcccagtccacctcatttagaaaaccaaagtgtgggtagaaaccccaaatgtccaaaagcccttttctggtgggtgacccagtgcatccaacagaaacagccgctgcccgaacctctgtgtgaagctttacgcgcacacggacaaaatgcccaaactggagcccttgcaaaaacacggcttgtggcattggcatacttgcccttacaggtggagtatcttcgtcacacatctaaatgagaaatcagtgacaacaagtctttgaaatggtgctatggatttaccattccttattatcactaatcatctaaacaactcactggaaatccaattaacaattttacaacataagatagaatggagacctgaataattctgtgtaatataaatggtttataactgcttttgtacctagctaggctgctattattactataatgagtaaatcataaagccttcatcactcccacatttttcttacggtcggagcatcagaacaagcgtctagactccttgggaccgtgagttcctagagcttggctgggtctaggctgttctgtgcctccaaggactgtctggcaatgacttgtattggccaccaactgtagatgtatatatggtgcccttctgatgctaagactccagaccttttgtttttgctttgcattttctgattttataccaactgtgtggactaagatgcattaaaataaacatcagagtaactca

SEQ ID NO: 309868 - DNA, 1778 bp, Homo sapiens
agcggagttacagggagcaccaccagggaacatctcggggagcctggttggaagctgcaggcttagtctgtcggctgcgggtctctgactgccctgtggggagggtcttgccttaacatcccttgcatttggctgcaaagaaatctgcttggaagaaggggttacgctgtttggccgggcagaaactccgctgagcagaacttgccgccagaatgctcctcctgttgctgagtatcatcgtcctccacgtcgcggtgctggtgctgctgttcgtctccacgatcgtcagccaatggatcgtgggcaatggacacgcaactgatctctggcagaactgtagcacctcttcctcaggaaatgtccaccactgtttctcatcatcaccaaacgaatggctgcagtctgtccaggccaccatgatcctgtcgatcatcttcagcattctgtctctgttcctgttcttctgccaactcttcaccctcaccaaggggggcaggttttacatcactggaatcttccaaattcttgctggtctgtgcgtgatgagtgctgcggccatctacacggtgaggcacccggagtggcatctcaactcggattactcctacggtttcgcctacatcctggcctgggtggccttccccctggcccttctcagcggtgtcatctatgtgatcttgcggaaacgcgaatgaggcgcccagacggtctgtctgaggctctgagcgtacatagggaagggaggaagggaaaccagaaagcagacaaagaaaaaagagctagcccaaaatcccaaactcaaaccaaaccaaacagaaagcagtggaggtgggggttgctgttgattgaagatgtatataatatctccgtttttatgttgaccatcagcctcgtgttgagccttaaagaagtagctaaggaactttacatcctaacagtataatccagctcagtatttttgttttgttttttgtttgtttgttttgttttacccagaaataagataactccatctcgccccttccctttcatctgaaagaagatacctccctcccagtccacctcatttagaaaaccaaagtgtgggtagaaaccccaaatgtccaaaagcccttttctggtgggtgacccagtgcatccaacagaaacagccgctgcccgaacctctgtgtgaagctttacgcgcacacggacaaaatgcccaaactggagcccttgcaaaaacacggcttgtggcattggcatacttgcccttacaggtggagtatcttcgtcacacatctaaatgagaaatcagtgacaacaagtctttgaaatggtgctatggatttaccattccttattatcactaatcatctaaacaactcactggaaatccaattaacaattttacaacataagatagaatggagacctgaataattctgtgtaatataaatggtttataactgcttttgtacctagctaggctgctattattactataatgagtaaatcataaagccttcatcactcccacatttttcttacggtcggagcatcagaacaagcgtctagactccttgggaccgtgagttcctagagcttggctgggtctaggctgttctgtgcctccaaggactgtctggcaatgacttgtattggccaccaactgtagatgtatatatggtgcccttctgatgctaagactccagaccttttgtttttgctttgcattttctgattttataccaactgtgtggactaagatgcattaaaataaacatcagagtaactca

SEQ ID NO: 309869 - DNA, 1233 bp, Homo sapiens
taaaggggaacgccaggagcctcccactgcccccttgcttcgcgcgcgcgcagccccgcagcgcagctttggcggcgccagcagcggagccaacgcacccgagtttgtgtttgaggccaccctgaggatcgggacagctgttcctttgggctgcagaaactccgctgagcagaacttgccgccagaatgctcctcctgttgctgagtatcatcgtcctccacgtcgcggtgctggtgctgctgttcgtctccacgatcgtcagccaatggatcgtgggcaatggacacgcaactgatctctggcagaactgtagcacctcttcctcaggaaatgtccaccactgtttctcatcatcaccaaacgaatggctgcagtctgtccaggccaccatgatcctgtcgatcatcttcagcattctgtctctgttcctgttcttctgccaactcttcaccctcaccaaggggggcaggttttacatcactggaatcttccaaattcttgctggtctgtgcgtgatgagtgctgcggccatctacacggtgaggcacccggagtggcatctcaactcggattactcctacggtttcgcctacatcctggcctgggtggccttccccctggcccttctcagcggtgtcatctatgtgatcttgcggaaacgcgaatgaggcgcccagacggtctgtctgaggctctgagcgtacatagggaagggaggaagggaaaccagaaagcagacaaagaaaaaagagctagcccaaaatcccaaactcaaaccaaaccaaacagaaagcagtggaggtgggggttgctgttgattgaagatgtatataatatctccggtttataaaacctatttataacactttttacatatatgtacatagtattgtttgctttttatgttgaccatcagcctcgtgttgagccttaaagaagtagctaaggaactttacatcctaacagtataatccagctcagtatttttgttttgctttaagttgcatgatctttctgcaggaaatagtcactcatcccactccacataaggggtttagtaagagaagtctgtctatctgatgatggatagggggcaaatctttttcccctttctgttaatagtcatcacatttctatgccaaacaggaacgatccataactttagtcttaatgtacacattgcattttgataaaattaatttggttgtttcctttgagtgtgattctggccg

SEQ ID NO: 309870 - DNA, 636 bp, Homo sapiens
tcctttcaattctggacctggaagcagatttccttccagaggtagaaatgttcttcctacccagcaattgtcagcatccggggtggcggagagggggccgctctgccatggactctccgtcacccagcttgtccctctccttccccaggtctgtgcgtgatgagtgctgcggccatctacacggtgaggcacccggagtggcatctcaactcggattactcctacggtttcgcctacatcctggcctgggtggccttccccctggcccttctcagcggtgtcatctatgtgatcttgcggaaacgcgaatgaggcgcccagacggtctgtctgaggctctgagcgtacatagggaagggaggaagggaaaccagaaagcagacaaagaaaaaagagctagcccaaaatcccaaactcaaaccaaaccaaacagaaagcagtggaggtgggggttgctgttgattgaagatgtatataatatctccggtttataaaacctatttataacactttttacatatatgtacatagtattgtttgctttttatgttgaccatcagcctcgtgttgagccttaaagaagtagctaaggaactttacatcctaacagtataatccagctcagtatttttgttt

SEQ ID NO: 309871 - DNA, 559 bp, Homo sapiens
  misc_feature (5)..(5): n is a, c, g, or t
ggccncctcctgggagggagctgaagccgctcgcaagactcccgtagtccccacctctctcagcttccggctggtagtagttccgcttcctgtccgactgtggtgtctttgctgagggtcacattgagctgcaggttgaatccggggtgcctttaggattcagcaccatggcggaagacatggagaccaaaatcaagaactacaagaccgccccttttgacagccgcttccccaaccagaaccagactagaaactgctggcagaactacctggacttccaccgctgtcagaaggcaatgaccgctaaaggaggcgatatctctgtgtgcgaatggtaccagcgtgtgtaccagtccctctgccccacatcctgggtcacagactgggatgagcaacgggctgaaggcacgtttcccgggaagatctgaactggctgcatctccctttcctctgtcctccatccttctcccaggatggtgaagggggacctggtacccagtgatccccaccccaggatcctaaatcatgacttacctgctaataaaaactcattggaaaa

SEQ ID NO: 309872 - DNA, 735 bp, Homo sapiens
ggcacgaggtgcgccaccggcgcacgcactcgggcgagcggccctacgtgtgcgaggactgtggcgagcgcttccgacacaaggtgcagatccgccgccacgagcgccagctgcacggcgcgggccgctccaggggcctcggcctgctgcgcgcctcgcggccggcggccctcggtggcccagcccgcgcggagcaggccgctacagccactgcgcccgcagacaaggcgctggggggactgggggacacagcagcagaggccaagaagctggctgtggtgtctttgctgagggtcacattgagctgcaggttgaatccggggtgcctttaggattcagcaccatggcggaagacatggagaccaaaatcaagaactacaagaccgccccttttgacagccgcttccccaaccagaaccagactagaaactgctggcagaactacctggacttccaccgctgtcagaaggcaatgaccgctaaaggaggcgatatctctgtgtgcgaatggtaccagcgtgtgtaccagtccctctgccccacatcctgggtcacagactgggatgagcaacgggctgaaggcacgtttcccgggaagatctgaactggctgcatctccctttcctctgtcctccatccttctcccaggatggtgaagggggacctggtacccagtgatccccaccccaggatcctaaatcatgacttacctgctaataaaaactcattggaaaa

SEQ ID NO: 309873 - DNA, 825 bp, Homo sapiens
  misc_feature (5)..(5): n is a, c, g, or t
ggccncctcctgggagggagctgaagccgctcgcaagactcccgtagtccccacctctctcagcttccggctggtagtagttccgcttcctgtccgactgtggtgtctttgctgagggtcacattgagctgcaggttgaatccggggtgcctttaggattcagcaccatggcggaagacatggagaccaaaatcaagaactacaagaccgccccttttgacagccgcttccccaaccagaaccagactagaaactgctggcagaactacctggacttccaccgctgtcagaaggcaatgaccgctaaaggaggcgatatctctgtgtgcgaatggtaccagcgtgtgtaccagtccctctgccccacatcctgggtcacagactgggatgagcaacgggctgaaggcacgtttcccgggaagatctgaactggctgcatctccctttcctctgtcctccatccttctcccaggatggtgaagggggacctggtacccagtgatccccaccccaggatcctaaatcatgacttacctgctaataaaaactcattggaaaaaaaaaaaaaaaaaaaaaaaaaaaaatgtgggccgcctcggcccagttgactttagactttagcaaagttatgcatgcggcccaattggagctaactgggccaattgccctatatgagggggattacaataaatggccggcgtttacaagcaggggactgggaaaccctggcgtaccaactaataacttggggaaatccccttttcaagggggggaataaaaaaaggccgaccccccgcccttcaacaatgggaacctgatggggag

SEQ ID NO: 309874 - DNA, 839 bp, Homo sapiens
  misc_feature (5)..(5): n is a, c, g, or t
ggccncctcctgggagggagctgaagccgctcgcaagactcccgtagtccccacctctctcagcttccggctggtagtagttccgcttcctgtccgactgtggtgtctttgctgagggtcacattgagctgcaggttgaatccggggtgcctttaggattcagcaccatggcggaagacatggagaccaaaatcaagaactacaagaccgccccttttgacagccgcttccccaaccagaaccagactagaaactgctggcagaactacctggacttccaccgctgtcagaaggcaatgaccgctaaaggaggcgatatctctgtgtgcgaatggtaccagcgtgtgtaccagtccctctgccccacatcctgggtcacagactgggatgagcaacgggctgaaggcacgtttcccgggaagatctgaactggctgcatctccctttcctctgtcctccatccttctcccaggatggtgaagggggacctggtacccagtgatccccaccccaggatcctaaatcatgacttacctgctaataaaaactcattggaaaaaaaaaaaaaaaaaaaaaaaaaaaaaaaaaaagttgtgtggggcggccgggccttggaaaaagttttaaaacccatcgttggggggggggccccaagtgggacgggagcacgtggccagacagtggtgccaagagaaacccgggggcacgacccgacgggcggggttccccaccaattaaaaaccccgcgcggggacaaccgaccgttttggacacatcaaagagagagtccgggaggccataggggctccatcaggggagtccaggaagcgaaataatag

SEQ ID NO: 309875 - DNA, 900 bp, Homo sapiens
  misc_feature (5)..(5): n is a, c, g, or t
ggccncctcctgggagggagctgaagccgctcgcaagactcccgtagtccccacctctctcagcttccggctggtagtagttccgcttcctgtccgactgtggtgtctttgctgagggtcacattgagctgcaggttgaatccggggtgcctttaggattcagcaccatggcggaagacatggagaccaaaatcaagaactacaagaccgccccttttgacagccgcttccccaaccagaaccagactagaaactgctggcagaactacctggacttccaccgctgtcagaaggcaatgaccgctaaaggaggcgatatctctgtgtgcgaatggtaccagcgtgtgtaccagtccctctgccccacatcctgggtcacagactgggatgagcaacgggctgaaggcacgtttcccgggaagatctgaactggctgcatctccctttcctctgtcctccatccttctcccaggatggtgaagggggacctggtacccagtgatccccaccccaggatcctaaatcatgacttacctgctaataaaaactcattggaaaaaaaaaaaaaaaaaaaaaaaaaaaaaaaaaaaaaaaaaaaaaaaaaaaaaaaaaagggggggggcaaaaaataccccgccgggggggcacacaataaacgcacacccacatttttgtttgataacgaggggacccatagagggggctataaaataaaggacgaccagcggccgccactaaacagcggggtgtcgggaaaaaacggcagcgggcaacatggagaagaacaaagtcggggggggacgtgtggacaaactcacggagagtaggcccgggacaatacaacgggacgctatggtgcaaccgcgaatcacggaggaagggaacgatgattgaaattag

SEQ ID NO: 309876 - DNA, 512 bp, Homo sapiens
gacaaacagcatagtgttgacttgaggttttcaaagcagggcccacccttggagctctgtacagtgacacatctccccatcgacagctctgcagtgggcctggggttttcctgcccattactctcctcccagcatgtcagcttgttcagaacagtgatttctgtcttttggggtcactgctgattccccggcctctagaatagaggttggcacacagcaggtacctgtggatattggttgaacaaacaggtgggcaaagtgaggaagataagaagtccatccgttcagtttccccactgcggagggaataacactgtctttccacaggtcacagactgggatgagcaacgggctgaaggcacgtttcccgggaagatctgaactggctgcatctccctttcctctgtcctccatccttctcccaggatggtgaagggggacctggtacccagtgatccccaccccaggatcctaaatcatgacttacctgctaataaaaactcattggaaaa

SEQ ID NO: 309877 - DNA, 998 bp, Homo sapiens
  misc_feature (5)..(5): n is a, c, g, or t
  misc_feature (998)..(998): n is a, c, g, or t
ggccncctcctgggagggagctgaagccgctcgcaagactcccgtagtccccacctctctcagcttccggctggtagtagttccgcttcctgtccgactgtggtgtctttgctgagggtcacattgagctgcaggttgaatccggggtgcctttaggattcagcaccatggcggaagacatggagaccaaaatcaagaactacaagaccgccccttttgacagccgcttccccaaccagaaccagactagaaactgctggcagaactacctggacttccaccgctgtcagaaggcaatgaccgctaaaggaggcgatatctctgtgtgcgaatggtaccagcgtgtgtaccagtccctctgccccacatcctgggtcacagactgggatgagcaacgggctgaaggcacgtttcccgggaagatctgaactggctgcatctccctttcctctgtcctccatccttctcccaggatggtgaagggggacctggtacccagtgatccccaccccaggatcctaaatcatgacttacctgctaataaaaactcattggaaaaaaaaaaaaaaaaaactcgagtttttttttttttttttttgggaacgtttggaaaattttttttttaaaacacaggaccaaaaaagctttggggttttccaaaccgggggaatctccaccgaaaaatggtaagcagcgcccccatggagaagccccaagtaggataaacacccctcgagtgcgcaacgggcgctctaaaaggggcggtgggcaacccctgaggtgtggaacgagaaacccgagaccctcctagagggaggaacaaatgccaccgtggggggacgccggccatttggaaaccgggggcccccaaacggaaaaaggggaatcccggaaaaactccaccttagggggtgggacgccttacgaaattccaacaaatatttacactttttaaaacgactgtttggagaggaattctaacaagtttccaagattcn

SEQ ID NO: 309878 - DNA, 925 bp, Homo sapiens
  misc_feature (5)..(5): n is a, c, g, or t
  misc_feature (624)..(624): n is a, c, g, or t
  misc_feature (633)..(634): n is a, c, g, or t
  misc_feature (767)..(767): n is a, c, g, or t
ggccncctcctgggagggagctgaagccgctcgcaagactcccgtagtccccacctctctcagcttccggctggtagtagttccgcttcctgtccgactgtggtgtctttgctgagggtcacattgagctgcaggttgaatccggggtgcctttaggattcagcaccatggcggaagacatggagaccaaaatcaagaactacaagaccgccccttttgacagccgcttccccaaccagaaccagactagaaactgctggcagaactacctggacttccaccgctgtcagaaggcaatgaccgctaaaggaggcgatatctctgtgtgcgaatggtaccagcgtgtgtaccagtccctctgccccacatcctgggtcacagactgggatgagcaacgggctgaaggcacgtttcccgggaagatctgaactggctgcatctccctttcctctgtcctccatccttctcccaggatggtgaagggggacctggtacccagtgatccccaccccaggatcctaaatcatgacttacctgctaataaaaactcattggaaaaaaaaaaaaaaaaaaaaaaaaaaaaaaaaaaaaaaaaaaaaaaaaaaaaaaaaaaaaggggggggnaaaaaattnncccgggggggccaaattagcgtaccccggttttttggttacaaagggggtgcccctaggggaggaggctataataaagaaaaaggagcgggggcgcggtttaacaaaccgtggtgagcgtgggaaaagtcggntagctgggcaagctgggggaaggagaccctcacttctcggggggcgagacagtctggggcgccatacccgaggaagattaaaggtccgagcaatttacccttgaggtcttagggtgtaccacgcgtatctgcctgaaatggccaggattgtgaaattg

SEQ ID NO: 309879 - DNA, 845 bp, Homo sapiens
  misc_feature (5)..(5): n is a, c, g, or t
ggccncctcctgggagggagctgaagccgctcgcaagactcccgtagtccccacctctctcagcttccggctggtagtagttccgcttcctgtccgactgtggtgtctttgctgagggtcacattgagctgcaggttgaatccggggtgcctttaggattcagcaccatggcggaagacatggagaccaaaatcaagaactacaagaccgccccttttgacagccgcttccccaaccagaaccagactagaaactgctggcagaactacctggacttccaccgctgtcagaaggcaatgaccgctaaaggaggcgatatctctgtgtgcgaatggtaccagcgtgtgtaccagtccctctgccccacatcctgggtcacagactgggatgagcaacgggctgaaggcacgtttcccgggaagatctgaactggctgcatctccctttcctctgtcctccatccttctcccaggatggtgaagggggacctggtacccagtgatccccaccccaggatcctaaatcatgacttacctgctaataaaaactcattggaaaaaaaaaaaaacaaaaaaaaaaaaaaaaaaaaaaaaaaaaaaaaaaaaaaaaaaaaaaaaagaaaacaaaaaaaaaaaaaaaagaggggcggcgcagcggcgcaagaagagaaacctcctccggcgagggggcggcccacaaacgaagctagcgcgcaccgcccgaggttttgtatgttcaaaaagagagggcgcccccactaaagagagggcggactaataataacacaaaggagaagccgacggcgcggcggaaaaaaaaaagggtggcaggggggagaaccacgt

SEQ ID NO: 309880 - DNA, 895 bp, Homo sapiens
  misc_feature (5)..(5): n is a, c, g, or t
  misc_feature (594)..(594): n is a, c, g, or t
  misc_feature (603)..(604): n is a, c, g, or t
  misc_feature (737)..(737): n is a, c, g, or t
ggccncctcctgggagggagctgaagccgctcgcaagactcccgtagtccccacctctctcagcttccggctggtagtagttccgcttcctgtccgactgtggtgtctttgctgagggtcacattgagctgcaggttgaatccggggtgcctttaggattcagcaccatggcggaagacatggagaccaaaatcaagaactacaagaccgccccttttgacagccgcttccccaaccagaaccagactagaaactgctggcagaactacctggacttccaccgctgtcagaaggcaatgaccgctaaaggaggcgatatctctgtgtgcgaatggtaccagcgtgtgtaccagtccctctgccccacatcctgggtcacagactgggatgagcaacgggctgaaggcacgtttcccgggaagatctgaactggctgcatctccctttcctctgtcctccatccttctcccaggatggtgaagggggacctggtacccagtgatccccaccccaggatcctaaatcatgacttacctgctaataaaaactcattggaaaaaaaacaaaaaaaaaaaaaaaagagggggggggggnaaaaaattnncccgggggggccaaattagcgtaccccggttttttggttacaaagggggtgcccctaggggaggaggctataataaagaaaaaggagcgggggcgcggtttaacaaaccgtggtgagcgtgggaaaagtcggntagctgggcaagctgggggaaggagaccctcacttctcggggggcgagacagtctggggcgccatacccgaggaagattaaaggtccgagcaatttacccttgaggtcttagggtgtaccacgcgtatctgcctgaaatggccaggattgtgaaattg

SEQ ID NO: 309881 - DNA, 1360 bp, Homo sapiens
  misc_feature (5)..(5): n is a, c, g, or t
ggccncctcctgggagggagctgaagccgctcgcaagactcccgtagtccccacctctctcagcttccggctggtagtagttccgcttcctgtccgactgtggtgtctttgctgagggtcacattgagctgcaggttgaatccggggtgcctttaggattcagcaccatggcggaagacatggagaccaaaatcaagaactacaagaccgccccttttgacagccgcttccccaaccagaaccagactagaaactgctggcagaactacctggacttccaccgctgtcagaaggcaatgaccgctaaaggaggcgatatctctgtgtgcgaatggtaccagcgtgtgtaccagtccctctgccccacatcctgggtcacagactgggatgagcaacgggctgaaggcacgtttcccgggaagatctgaactggctgcatctccctttcctctgtcctccatccttctcccaggatggtgaagggggacctggtacccagtgatccccaccccaggatcctaaatcatgacttacctgctaataaaaactcattggaaaaaaaaaaaaaaaaaaaaaaaaaaaaaaaaaaaaaaaaaaaaaaacaaaaaaaaaaaaaaaagagggggggggcgccacccacaaaaatcccccgagaggggcacccacgtccccgagcaaccccgaattttggtgtcacaaagagggggccccacaaaggggaggggcccatatacaacaccgaccagggggcgcgccgctcaacaccaccacagcgcgtcgcacggggcacaacacgcagctcccgcgggacacctcggggagagaaggcagccctcaacaccgagcgaggggaagcaaacacaccgtggggcacacacacaccccacaagagacctttacgcgcgcggagggataaaaaacactccaacgcgccggtacaagcggtggtcgcaccccacggacgacacactcgcgaccgccgatacacagcttttgctcaccggacatatatgttgacaccccttctcacgcgggagtacaataataataaactagcgcgccacacgatcacgccgcgctctacccacgtccctccaccgccacgcacgagccgctgtacactgtgcggcacctatgactgtggttttttgtcgtgttcggtaatctaacactcatgagctctccacagttacttcgcactggttagttatatgcttcagttgcgactaggtcatgttatcgtagttgagcaacatgacaacggagcagccacaaaggctgcaaggatagaatctgagacttgtccttctatgctattactgttaagcgcggccaccaaactaggtggctgtgcgccgcc

SEQ ID NO: 309882 - DNA, 838 bp, Homo sapiens
  misc_feature (5)..(5): n is a, c, g, or t
ggccncctcctgggagggagctgaagccgctcgcaagactcccgtagtccccacctctctcagcttccggctggtagtagttccgcttcctgtccgactgtggtgtctttgctgagggtcacattgagctgcaggttgaatccggggtgcctttaggattcagcaccatggcggaagacatggagaccaaaatcaagaactacaagaccgccccttttgacagccgcttccccaaccagaaccagactagaaactgctggcagaactacctggacttccaccgctgtcagaaggcaatgaccgctaaaggaggcgatatctctgtgtgcgaatggtaccagcgtgtgtaccagtccctctgccccacatcctgggtcacagactgggatgagcaacgggctgaaggcacgtttcccgggaagatctgaactggctgcatctccctttcctctgtcctccatccttctcccaggatggtgaagggggacctggtacccagtgatccccaccccaggatcctaaatcatgacttacctgctaataaaaactcattggaaaaaaaaaaaaaaaaaaaaaaaaaaaaaaaaaaagttttggggggtttgggccttagaaaaagtttttaaacccatttggttgggggggggggccccagtatagttatacggttgaacctgtggctaatggcggtgtttccatagggaagaactcgggcggatatgacatataggtgcgtgggctttcttacccatttaaaaaaggcggcggggggggagaacagaagctgtttttgagaacaaatttccagaaggggggcttagagagggccaatcacgga

SEQ ID NO: 309883 - DNA, 750 bp, Homo sapiens
  misc_feature (5)..(5): n is a, c, g, or t
ggccncctcctgggagggagctgaagccgctcgcaagactcccgtagtccccacctctctcagcttccggctggtagtagttccgcttcctgtccgactgtggtgtctttgctgagggtcacattgagctgcaggttgaatccggggtgcctttaggattcagcaccatggcggaagacatggagaccaaaatcaagaactacaagaccgccccttttgacagccgcttccccaaccagaaccagactagaaactgctggcagaactacctggacttccaccgctgtcagaaggcaatgaccgctaaaggaggcgatatctctgtgtgcgaatggtaccagcgtgtgtaccagtccctctgccccacatcctgggtcacagactgggatgagcaacgggctgaaggcacgtttcccgggaagatctgaactggctgcatctccctttcctctgtcctccatccttctcccaggatggtgaagggggacctggtacccagtgatccccaccccaggatcctaaatcatgacttacctgctaataaaaactcattggaaaaaaaaaaaaaaaaaaaaaaaaaaaaaaaaaaagaaaaaaaaacgtggggggtttttttttggggggggggaaaaaagggtattgaaggggggcgagggtgttaaaggtgtttggcaagcccttttttttgaaaagggggagaaagggggggaccaaaagagggggggaattatttagaaaagaggggacgga

SEQ ID NO: 309884 - DNA, 939 bp, Homo sapiens
  misc_feature (5)..(5): n is a, c, g, or t
  misc_feature (638)..(638): n is a, c, g, or t
  misc_feature (647)..(648): n is a, c, g, or t
  misc_feature (781)..(781): n is a, c, g, or t
ggccncctcctgggagggagctgaagccgctcgcaagactcccgtagtccccacctctctcagcttccggctggtagtagttccgcttcctgtccgactgtggtgtctttgctgagggtcacattgagctgcaggttgaatccggggtgcctttaggattcagcaccatggcggaagacatggagaccaaaatcaagaactacaagaccgccccttttgacagccgcttccccaaccagaaccagactagaaactgctggcagaactacctggacttccaccgctgtcagaaggcaatgaccgctaaaggaggcgatatctctgtgtgcgaatggtaccagcgtgtgtaccagtccctctgccccacatcctgggtcacagactgggatgagcaacgggctgaaggcacgtttcccgggaagatctgaactggctgcatctccctttcctctgtcctccatccttctcccaggatggtgaagggggacctggtacccagtgatccccaccccaggatcctaaatcatgacttacctgctaataaaaactcattggaaaaaaaaaaaaaaaaaaaaaaaaaaaaaaaaaaaaaaaaaaaaaaaaaaaaaaaaaaaaaaaaaaaaaaaaaaggggggggnaaaaaattnncccgggggggccaaattagcgtaccccggttttttggttacaaagggggtgcccctaggggaggaggctataataaagaaaaaggagcgggggcgcggtttaacaaaccgtggtgagcgtgggaaaagtcggntagctgggcaagctgggggaaggagaccctcacttctcggggggcgagacagtctggggcgccatacccgaggaagattaaaggtccgagcaatttacccttgaggtcttagggtgtaccacgcgtatctgcctgaaatggccaggattgtgaaattg

SEQ ID NO: 309885 - DNA, 665 bp, Homo sapiens
  misc_feature (5)..(5): n is a, c, g, or t
  misc_feature (570)..(570): n is a, c, g, or t
  misc_feature (573)..(574): n is a, c, g, or t
  misc_feature (577)..(578): n is a, c, g, or t
ggccncctcctgggagggagctgaagccgctcgcaagactcccgtagtccccacctctctcagcttccggctggtagtagttccgcttcctgtccgactgtggtgtctttgctgagggtcacattgagctgcaggttgaatccggggtgcctttaggattcagcaccatggcggaagacatggagaccaaaatcaagaactacaagaccgccccttttgacagccgcttccccaaccagaaccagactagaaactgctggcagaactacctggacttccaccgctgtcagaaggcaatgaccgctaaaggaggcgatatctctgtgtgcgaatggtaccagcgtgtgtaccagtccctctgccccacatcctgggtcacagactgggatgagcaacgggctgaaggcacgtttcccgggaagatctgaactggctgcatctccctttcctctgtcctccatccttctcccaggatggtgaagggggacctggtacccagtgatccccaccccaggatcctaaatcatgacttacctgctaataaaaactcattggaaaaaaaaaaatatncanntcnncccaaattcaactttactaaggggaattacccttaaaatcacccctattaaaactcaatggccatcctttttaaactattttactcc

SEQ ID NO: 309886 - DNA, 439 bp, Homo sapiens
aaatcgagtcgtacgctcacccgacggggtgctttagattcagcaccatggcggaagacatggagaccaaaatcaagaactacaagaccgccccttttgacagccgcttccccaaccagaaccagactagaaactgctggcagaactacctggacttccaccgctgtcagaaggcaatgaccgctaaaggaggcgatatctctgtgtgcgaatggtaccagcgtgtgtaccagtccctctgccccacatcctgggtcacagactgggatgagcaacgggctgaaggcacgtttcccgggaagatctgaactggctgcatctccctttcctctgtcctccatccttctcccaggatggtgaagggggacctggtacccagtgatccccaccccaggatcctaaatcatgacttacctgctaataaaaactcattggaaaa

SEQ ID NO: 309887 - DNA, 502 bp, Homo sapiens
cccgggtgtccagtccatcctcccttttggacgttggaggggccgcagcgtcatctccgatgcaccctcatcctcagataccgggtagagatctcgccggattcagcaccatggcggaagacatggagaccaaaatcaagaactacaagaccgccccttttgacagccgcttccccaaccagaaccagactagaaactgctggcagaactacctggacttccaccgctgtcagaaggcaatgaccgctaaaggaggcgatatctctgtgtgcgaatggtaccagcgtgtgtaccagtccctctgccccacatcctgggtcacagactgggatgagcaacgggctgaaggcacgtttcccgggaagatctgaactggctgcatctccctttcctctgtcctccatccttctcccaggatggtgaagggggacctggtacccagtgatccccaccccaggatcctaaatcatgacttacctgctaataaaaactcattggaaaa

SEQ ID NO: 309888 - DNA, 681 bp, Homo sapiens
ggcacgaggtgcgccaccggcgcacgcactcgggcgagcggccctacgtgtgcgaggactgtggcgagcgcttccgacacaaggtgcagatccgccgccacgagcgccagctgcacggcgcgggccgctccaggggcctcggcctgctgcgcgcctcgcggccggcggccctcggtggcccagcccgcgcggagcaggccgctacagccactgcgcccgcagacaaggcgctggggggactgggggacacagcagcagaggccaagaagctggctgtggtgtctttgctgagggtcacattgagctgcaggttgaatccggggtgcctttaggattcagcaccatggcggaagacatggagacccagactagaaactgctggcagaactacctggacttccaccgctgtcagaaggcaatgaccgctaaaggaggcgatatctctgtgtgcgaatggtaccagcgtgtgtaccagtccctctgccccacatcctgggtcacagactgggatgagcaacgggctgaaggcacgtttcccgggaagatctgaactggctgcatctccctttcctctgtcctccatccttctcccaggatggtgaagggggacctggtacccagtgatccccaccccaggatcctaaatcatgacttacctgctaataaaaactcattggaaaa

SEQ ID NO: 309889 - DNA, 1228 bp, Homo sapiens
ggcacgaggtgcgccaccggcgcacgcactcgggcgagcggccctacgtgtgcgaggactgtggcgagcgcttccgacacaaggtgcagatccgccgccacgagcgccagctgcacggcgcgggccgctccaggggcctcggcctgctgcgcgcctcgcggccggcggccctcggtggcccagcccgcgcggagcaggccgctacagccactgcgcccgcagacaaggcgctggggggactgggggacacagcagcagaggccaagaagctggctgtggtgtctttgctgagggtcacattgagctgcaggttgaatccggggtgcctttaggattcagcaccatggcggaagacatggagaccaaaatcaagaactacaagaccgccccttttgacagccgcttccccaaccagaaccagccagcagtaccgggccctgaccgtgcccgagctcacccagcagatgttcgatgccaagaacatgatggccgcctgcgacccgcgccacggccgctacctgacggtggccaccgtgttccggggccgcatgtccatgaaggaggtggacgagcagatgctggccatccagagcaagaacagcagctacttcgtggagtggatccccaacaacgtgaaggtggccgtgtgtgacatcccgccccgcggcctcaagatgtcctccaccttcatcgggaacagcacggccatccaggagctgttcaagcgcatctccgagcagttcacggccatgttccggcgcaaggccttcctgcactggtacacgggcgagggcatggacgagatggagttcaccgaggccgagagcaacatgaacgacctggtgtccgagtaccagcagtaccaggacgccacggccgaggaagagggcgagatgtacgaagacgacgaggaggagtcggaggcccagggccccaagtgaagctgctcgcagctggagtgagaggcaggtggcggccggggccgaagccagcagtgtctaaacccccggagccatcttgctgccgacaccctgctttcccctcgccctagggctcccttgccgccctcctgcagtatttatggcctcgtcctccccacctaggccacgtgtgagctgctcctgtctctgtcttattgcagctccaggcctgacgttttacggttttgttttttactggtttgtgtttatattttcggggatacttaataaatctattgctgtcagat

SEQ ID NO: 309890 - DNA, 1297 bp, Homo sapiens
  misc_feature (606)..(606): n is a, c, g, or t
  misc_feature (732)..(732): n is a, c, g, or t
  misc_feature (743)..(743): n is a, c, g, or t
  misc_feature (813)..(813): n is a, c, g, or t
  misc_feature (1272)..(1272): n is a, c, g, or t
ggcacgaggtgcgccaccggcgcacgcactcgggcgagcggccctacgtgtgcgaggactgtggcgagcgcttccgacacaaggtgcagatccgccgccacgagcgccagctgcacggcgcgggccgctccaggggcctcggcctgctgcgcgcctcgcggccggcggccctcggtggcccagcccgcgcggagcaggccgctacagccactgcgcccgcagacaaggcgctggggggactgggggacacagcagcagaggccaagaagctggctgtggtgtctttgctgagggtcacattgagctgcaggttgaatccggggtgcctttaggattcagcaccatggcggaagacatggagaccaaaatcaagaactacaagaccgccccttttgacagccgcttccccaaccagaaccagactagaaactgctggcagaactacctggacttccaccgctgtcagaaggaggtgacagcggtggtctcattcctggaaaatctcttgtgtttgcaactatggagctgctgatgttcattttagtacggcatatgccacatctcagtaccaaggtgtcagactctccaagtcacatagccactaanactcgactatcagaagaaagtgctcgtttggtggcagccacagttaccatactctctgatttaccatccctttgttcacccgctggatgtatgacaatcctgcccacaattctgttcttaattgcnagaatattganagacacagcaataaagtctgcagataatcaggttcctccaccagtcagtgcagctcttcaagggattaanagtattgtgacactttcaatggccaaaactgaggctggcgttcaaaaacagtggacagctctgattcgtagcacgcttgcttgcatcctggaatattctcaaccagactctgtacctacacctgatgaagtaagcatgctaacagcaattgcactcttcctgtggtctgctagtaatgaaataataggagtccagtcattacagaatggctgcatgaacagatttaaaaatgcattaaattcatgcgacccatgggttcaagccaaatgttaccagcttctcctctcagtcttccagcattccaatcgtgccctttcaactccttatattcattcattagctccaatagtggttgaaaagctaaaagctgttgaaagaaacagaccagccagtaacatagagcttttagcggttcaagaaggaataaaagttcttgaaacactggttgctcttggtgangacaaacagagtcagctacttgctc

SEQ ID NO: 309891 - DNA, 2523 bp, Homo sapiens
tcctccccctccgctcctccccttccctacatctagccgccgcgctttcccgctcccgcagcagcagcctcccgcgtcgctgtcgctgttgcctccgccacctcctccgccgccgcgcgcccctcggagttccgcgccccaccatgcccaacatcgtgctgttcagcggcagctcgcatcaggacctatcccagcgcgtggccgaccgcctgggcctggagctgggcaaggtggtcacgaagaagttcagcaaccaggagaccagcgtggagattggtgaaagcgtgagaggggaagatgtctacatcatccagagcggctgcggggaaattaacgacaacctgatggaactcctcatcatgatcaatgcctgcaagattgcgtcatcatccagagtaactgccgtgatcccgtgtttcccatacgcccgacaagataaaaaggacaagagtcgtgccccaatttctgcaaaacttgtggccaatatgctgtcggtggctggggcggatcacatcatcaccatggacctgcatgcttctcagatacagggattctttgatattcctgtggataatttgtatgcggagcccgcagtcctgcagtggattcgggaaaacattgccgagtggaagaactgtatcattgtttcacctgacgcagggggagccaaaagggttacatcaattgcagacaggttgaatgtggaatttgctttgatccacaaagagaggaagaaggcgaatgaagtggaccggatggtcctggtgggcgacgtgaaggaccgtgtggccatcctcgtggatgacatggctgacacttgcggcaccatctgccatgctgcggacaagctgctgtcagctggagccaccaaagtgtatgctatccttacccatgggatcttctctggaccagctatttccagaataaataatgccgcctttgaggctgttgtcgtcacaaacacaattccgcaagaggacaaaatgaaacactgcaccaagattcaggtcattgacatttccatgatcttggccgaagcaatccgaaggacacacaatggggaatccgtgtcctacctgttcagccatgtcccgctataaatccagaatgggaagtgtccagcaagcctactctgacttctgacttgtttttgttttctggatttttagctgtaggtattcagcaatgataggttaatcactggcaaaagcatcagatctttgtatatgctaagatttattgtttccccttctaaagctcaagatcatttctttccagtttttggggaaatggtggtggttatttggtctttaagtgaactgtcttaaatgagaaacgtttttgtcattttgacttttaacaggtacaggtgatctcttcctttgttctttcagtactttgaggcgacaactttcaagtatataatttcattgtggaagtcatagtttatatatttcgaggttgccaaaggtgacttcagattaaagccttctgtgtaaatatatactgataatgcctatggacatttgggtaaaaccctgtatagaattaattatccttttactttggagtgaaccttggaaaatttataattataataccatggattttgaattttccttttttttttttttttttggataactcagtttcagataaaccatcttggttactgtgcttaatttggaccaaattttatttagcttaatatggacactgacacattttggggggtatacattagacatatcagagcagtgtatttctggatcattttttaaatgacctcttctaaaacataactgtcacttacctgaaatgctgcatcctaaaattccaaaattatattgagcaatcgccaaggcctaaagccaactgacttaaaggtaatcatttcagctaagattaaatttaaagcctaagaatgtatagagctagttttaaaataatgatctcagatttttaaaaaggatataggaacctgcattgtcattctctgaattaagaactgatggtttctatcattatttagccccacctttgtattttaaaatccttcagaatacatttatgaaccaatgcgactggacttagccacacacaatggaaattcagaccttgactatttggtgtttccagttcacaaaggtgatgaagactgtcttgggagcagcttaatcccaaaatttgtacatttcttgctgctcctggcgtggaaacttaagtgagaccaccaaatacattggtcctgtccaattctactgaatgggggtggacctggcatttatctggccaaaaacaggagccagagaaatatgaatataccaaagttgtttgtttagcctccaacttaaattacattagtcaacttatagatactcatatgatcacttttctttttagatactacatcaactagattcaggagtatatcatttgcagtgcttgtattggtttaaaatgtaagattttaagatcctctaacactgtactaaaacatttcaataaaatcattctgactgc

SEQ ID NO: 309892 - DNA, 2814 bp, Homo sapiens
tcctccccctccgctcctccccttccctacatctagccgccgcgctttcccgctcccgcagcagcagcctcccgcgtcgctgtcgctgttgcctccgccacctcctccgccgccgcgcgcccctcggagttccgcgccccaccatgcccaacatcgtgctgttcagcggcagctcgcatcaggacctatcccagcgcgtggccgaccgcctgggcctggagctgggcaaggtggtcacgaagaagttcagcaaccaggagaccagcgtggagattggtgaaagcgtgagaggggaagatgtctacatcatccagagcggctgcggggaaattaacgacaacctgatggaactcctcatcatgatcaatgcctgcaagattgcgtcatcatccagagtaactgccgtgatcccgtgtttcccatacgcccgacaagataaaaaggacaagagtcgtgccccaatttctgcaaaacttgtggccaatatgctgtcggtggctggggcggatcacatcatcaccatggacctgcatgcttctcagatacagggattctttgatattcctgtggataatttgtatgcggagcccgcagtcctgcagtggattcgggaaaacattgccgagtggaagaactgtatcattgtttcacctgacgcagggggagccaaaagggttacatcaattgcagacaggttgaatgtggaatttgctttgatccacaaagagaggaagaaggcgaatgaagtggaccggatggtcctggtgggcgacgtgaaggaccgtgtggccatcctcgtggatgacatggctgacacttgcggcaccatctgccatgctgcggacaagctgctgtcagctggagccaccaaagtgtatgctatccttacccatgggatcttctctggaccagctatttccagaataaataatgccgcctttgaggctgttgtcgtcacaaacacaattccgcaagaggacaaaatgaaacactgcaccaagattcaggtcattgacatttccatgatcttggccgaagcaatccgaaggacacacaatggggaatccgtgtcctacctgttcagccatgtcccgctataaatccagaatgggaagtgtccagcaagcctactctgacttctgacttgtttttgttttctggatttttagctgtaggtattcagcaatgataggttaatcactggcaaaagcatcagatctttgtatatgctaagatttattgtttccccttctaaagctcaagatcatttctttccagtttttggggaaatggtggtggttatttggtctttaagtgaactgtcttaaatgagaaacgtttttgtcattttgacttttaacaggtacaggtgatctcttcctttgttctttcagtactttgaggcgacaactttcaagtatataatttcattgtggaagtcatagtttatatatttcgaggttgccaaaggtgacttcagattaaagccttctgtgtaaatatatactgataatgcctatggacatttgggtaaaaccctgtatagaattaattatccttttactttggagtgaaccttggaaaatttataattataataccatggattttgaattttccttttttttttttttttttggataactcagtttcagataaaccatcttggttactgtgcttaatttggaccaaattttatttagcttaatatggacactgacacattttggggggtatacattagacatatcagagcagtgtatttctggatcattttttaaatgacctcttctaaaacataactgtcacttacctgaaatgctgcatcctaaaattccaaaattatattgagcaatcgccaaggcctaaagccaactgacttaaaggtaatcatttcagctaagattaaatttaaagcctaagaatgtatagagctagttttaaaataatgatctcagatttttaaaaaggatataggaacctgcattgtcattctctgaattaagaactgatggtttctatcattatttagccccacctttgtattttaaaatccttcagaatacatttatgaaccaatgcgactggacttagccacacacaatggaaattcagaccttgactatttggtgtttccagttcacaaaggtgatgaagactgtcttgggagcagcttaatcccaaaatttgtacatttcttgctgctcctggcgtggaaacttaagtgagaccaccaaatacattggtcctgtccaattctactgaatgggggtggacctggcatttatctggccaaaaacaggagccagagaaatatgaatataccaaagttgtttgtttagcctccaacttaaattacattagtcaacttatagatactcatatgatcacttttctttttagatactacatcaactagattcaggagtatatcatttgcagtgcttgtattggtttaaaatgtaagattttaagatcctctaacactgtactaaaacatttcaataaaatcattctgactgcgttcataaaagttggtatgtatcattgtggagtaatatgttttgacggagtgatgtgttgcagtacctgaaaatgtttgctactttacgattataggccagcatacaaaattacagaaaagccagaagttaattgatgtcagctgttttccattttgaaggtgtttcttcctgaagaacttaccagcaatcgcctttcctcaaagcgtaacagctgtgccacataaggtgtccacgttgttaattccacatgtttcctataaaattaaagatggtacagtgtgttcacgca

SEQ ID NO: 309893 - DNA, 2491 bp, Homo sapiens
gaggatacagaaaatggcaaatggagtgcaggagagggggcagggaatccccggatggcagctgtgcacaggcagagagataacccaggcctgccacccctgggagggatgcctgcaagacgatgaaatgcagatgggacttgaggcctctgatcttgggagattttgattgttagtgaagggtttagggtggaatctggattcaggattcagaaaacttagcagataaaaagcgtggagattggtgaaagcgtgagaggggaagatgtctacatcatccagagcggctgcggggaaattaacgacaacctgatggaactcctcatcatgatcaatgcctgcaagattgcgtcatcatccagagtaactgccgtgatcccgtgtttcccatacgcccgacaagataaaaaggacaagagtcgtgccccaatttctgcaaaacttgtggccaatatgctgtcggtggctggggcggatcacatcatcaccatggacctgcatgcttctcagatacagggattctttgatattcctgtggataatttgtatgcggagcccgcagtcctgcagtggattcgggaaaacattgccgagtggaagaactgtatcattgtttcacctgacgcagggggagccaaaagggttacatcaattgcagacaggttgaatgtggaatttgctttgatccacaaagagaggaagaaggcgaatgaagtggaccggatggtcctggtgggcgacgtgaaggaccgtgtggccatcctcgtggatgacatggctgacacttgcggcaccatctgccatgctgcggacaagctgctgtcagctggagccaccaaagtgtatgctatccttacccatgggatcttctctggaccagctatttccagaataaataatgccgcctttgaggctgttgtcgtcacaaacacaattccgcaagaggacaaaatgaaacactgcaccaagattcaggtcattgacatttccatgatcttggccgaagcaatccgaaggacacacaatggggaatccgtgtcctacctgttcagccatgtcccgctataaatccagaatgggaagtgtccagcaagcctactctgacttctgacttgtttttgttttctggatttttagctgtaggtattcagcaatgataggttaatcactggcaaaagcatcagatctttgtatatgctaagatttattgtttccccttctaaagctcaagatcatttctttccagtttttggggaaatggtggtggttatttggtctttaagtgaactgtcttaaatgagaaacgtttttgtcattttgacttttaacaggtacaggtgatctcttcctttgttctttcagtactttgaggcgacaactttcaagtatataatttcattgtggaagtcatagtttatatatttcgaggttgccaaaggtgacttcagattaaagccttctgtgtaaatatatactgataatgcctatggacatttgggtaaaaccctgtatagaattaattatccttttactttggagtgaaccttggaaaatttataattataataccatggattttgaattttccttttttttttttttttttggataactcagtttcagataaaccatcttggttactgtgcttaatttggaccaaattttatttagcttaatatggacactgacacattttggggggtatacattagacatatcagagcagtgtatttctggatcattttttaaatgacctcttctaaaacataactgtcacttacctgaaatgctgcatcctaaaattccaaaattatattgagcaatcgccaaggcctaaagccaactgacttaaaggtaatcatttcagctaagattaaatttaaagcctaagaatgtatagagctagttttaaaataatgatctcagatttttaaaaaggatataggaacctgcattgtcattctctgaattaagaactgatggtttctatcattatttagccccacctttgtattttaaaatccttcagaatacatttatgaaccaatgcgactggacttagccacacacaatggaaattcagaccttgactatttggtgtttccagttcacaaaggtgatgaagactgtcttgggagcagcttaatcccaaaatttgtacatttcttgctgctcctggcgtggaaacttaagtgagaccaccaaatacattggtcctgtccaattctactgaatgggggtggacctggcatttatctggccaaaaacaggagccagagaaatatgaatataccaaagttgtttgtttagcctccaacttaaattacattagtcaacttatagatactcatatgatcacttttctttttagatactacatcaactagattcaggagtatatcatttgcagtgcttgtattggtttaaaatgtaagattttaagatcctctaacactgtactaaaacatttcaataaaatcattctgactgc

SEQ ID NO: 309894 - DNA, 2248 bp, Homo sapiens
tactttcctgaaaatctcaggccttgggattggaggcaactgagatcatccctagtagttttccgagttccttcaaatcgcaatgagagatttacatctctcattgcgtcatcatccagagtaactgccgtgatcccgtgtttcccatacgcccgacaagataaaaaggacaagagtcgtgccccaatttctgcaaaacttgtggccaatatgctgtcggtggctggggcggatcacatcatcaccatggacctgcatgcttctcagatacagggattctttgatattcctgtggataatttgtatgcggagcccgcagtcctgcagtggattcgggaaaacattgccgagtggaagaactgtatcattgtttcacctgacgcagggggagccaaaagggttacatcaattgcagacaggttgaatgtggaatttgctttgatccacaaagagaggaagaaggcgaatgaagtggaccggatggtcctggtgggcgacgtgaaggaccgtgtggccatcctcgtggatgacatggctgacacttgcggcaccatctgccatgctgcggacaagctgctgtcagctggagccaccaaagtgtatgctatccttacccatgggatcttctctggaccagctatttccagaataaataatgccgcctttgaggctgttgtcgtcacaaacacaattccgcaagaggacaaaatgaaacactgcaccaagattcaggtcattgacatttccatgatcttggccgaagcaatccgaaggacacacaatggggaatccgtgtcctacctgttcagccatgtcccgctataaatccagaatgggaagtgtccagcaagcctactctgacttctgacttgtttttgttttctggatttttagctgtaggtattcagcaatgataggttaatcactggcaaaagcatcagatctttgtatatgctaagatttattgtttccccttctaaagctcaagatcatttctttccagtttttggggaaatggtggtggttatttggtctttaagtgaactgtcttaaatgagaaacgtttttgtcattttgacttttaacaggtacaggtgatctcttcctttgttctttcagtactttgaggcgacaactttcaagtatataatttcattgtggaagtcatagtttatatatttcgaggttgccaaaggtgacttcagattaaagccttctgtgtaaatatatactgataatgcctatggacatttgggtaaaaccctgtatagaattaattatccttttactttggagtgaaccttggaaaatttataattataataccatggattttgaattttccttttttttttttttttttggataactcagtttcagataaaccatcttggttactgtgcttaatttggaccaaattttatttagcttaatatggacactgacacattttggggggtatacattagacatatcagagcagtgtatttctggatcattttttaaatgacctcttctaaaacataactgtcacttacctgaaatgctgcatcctaaaattccaaaattatattgagcaatcgccaaggcctaaagccaactgacttaaaggtaatcatttcagctaagattaaatttaaagcctaagaatgtatagagctagttttaaaataatgatctcagatttttaaaaaggatataggaacctgcattgtcattctctgaattaagaactgatggtttctatcattatttagccccacctttgtattttaaaatccttcagaatacatttatgaaccaatgcgactggacttagccacacacaatggaaattcagaccttgactatttggtgtttccagttcacaaaggtgatgaagactgtcttgggagcagcttaatcccaaaatttgtacatttcttgctgctcctggcgtggaaacttaagtgagaccaccaaatacattggtcctgtccaattctactgaatgggggtggacctggcatttatctggccaaaaacaggagccagagaaatatgaatataccaaagttgtttgtttagcctccaacttaaattacattagtcaacttatagatactcatatgatcacttttctttttagatactacatcaactagattcaggagtatatcatttgcagtgcttgtattggtttaaaatgtaagattttaagatcctctaacactgtactaaaacatttcaataaaatcattctgactgc

SEQ ID NO: 309895 - DNA, 1174 bp, Homo sapiens
cgcgtcgcccacgcgtcgcccacgcgtccgtggacgcggtgggcggacgcgtgggcgacaactttcaagtatataatttcattgtggaagtcatagtttatatatttcgaggttgccaaaggtgacttcagattaaagccttctgtgtaaatatatactgataatgcctatggacatttgggtaaaaccctgtatagaattaattatccttttactttggagtgaaccttggaaaatttataattataataccatggattttgaattttccttttttttttttttttttggataactcagtttcagataaaccatcttggttactgtgcttaatttggaccaaattttatttagcttaatatggacactgacacattttggggggtatacattagacatatcagagcagtgtatttctggatcattttttaaatgacctcttctaaaacataactgtcacttacctgaaatgctgcatcctaaaattccaaaattatattgagcaatcgccaaggcctaaagccaactgacttaaaggtaatcatttcagctaagattaaatttaaagcctaagaatgtatagagctagttttaaaataatgatctcagatttttaaaaaggatataggaacctgcattgtcattctctgaattaagaactgatggtttctatcattatttagccccacctttgtattttaaaatccttcagaatacatttatgaaccaatgcgactggacttagccacacacaatggaaattcagaccttgactatttggtgtttccagttcacaaaggtgatgaagactgtcttgggagcagcttaatcccaaaatttgtacatttcttgctgctcctggcgtggaaacttaagtgagaccaccaaatacattggtcctgtccaattctactgaatgggggtggacctggcatttatctggccaaaaacaggagccagagaaatatgaatataccaaagttgtttgtttagcctccaacttaaattacattagtcaacttatagatactcatatgatcacttttctttttagatactacatcaactagattcaggagtatatcatttgcagtgcttgtattggtttaaaatgtaagattttaagatcctctaacactgtactaaaacatttcaataaaatcattctgactgc

SEQ ID NO: 309896 - DNA, 706 bp, Homo sapiens
aatcttagctgaaatgattacctttaagtcagttggctttaggccttggcgattgctcaatataattttggaattttaggatgcagcatttcaggtaagtgacagtaatgtatagagctagttttaaaataatgatctcagatttttaaaaaggatataggaacctgcattgtcattctctgaattaagaactgatggtttctatcattatttagccccacctttgtattttaaaatccttcagaatacatttatgaaccaatgcgactggacttagccacacacaatggaaattcagaccttgactatttggtgtttccagttcacaaaggtgatgaagactgtcttgggagcagcttaatcccaaaatttgtacatttcttgctgctcctggcgtggaaacttaagtgagaccaccaaatacattggtcctgtccaattctactgaatgggggtggacctggcatttatctggccaaaaacaggagccagagaaatatgaatataccaaagttgtttgtttagcctccaacttaaattacattagtcaacttatagatactcatatgatcacttttctttttagatactacatcaactagattcaggagtatatcatttgcagtgcttgtattggtttaaaatgtaagattttaagatcctctaacactgtactaaaacatttcaataaaatcattctgactgc

SEQ ID NO: 309897 - DNA, 631 bp, Homo sapiens
gtgaaatccagcctgtcatctgtttctgcaaatttttatcagagcacagccacgtccattcatatatgtattgcccgtggctgctttcacgctacaatgggcaagttgagtatttgtgacagagaccctctggcttccaaggtcaaatatgttaactatttggtcctctatagtttgctgacccctgagttagatgatcacagttgtgctcttaaatgacgcagtcaccgccttttcagaaacagaaagaaaaaccttccgtataatgattaaacttaatttaaaacaacaaatgcccctggaaaaggatgtctctggttaacagtatccctgaaaagccttctgtctctgcattgaaaatctcccttccaggatcccatatgggtctggttcaacgggttgtaatttgaagacataccccaaagctgtctgtcctctcaaaagtgtcggaagttttgatagcaacacatcatgtatgctgcagaaattgtttctcagctttccagcttttcaatgtttaaagaactctaactaagatgtcctgcttcccttctccctttgtttttctcattggcatttaggtcattgacatttccatgatcttggccgaagcaatccgaaggacacacaa

SEQ ID NO: 309898 - DNA, 386 bp, Homo sapiens
cgtcaagcacttagttttgcagtagtatatgtaaatagtaaatatttgctgaataagatggaatgaatatatcttttgctgtcacaacatgtataattttctttttgatgcttcgttgattgcatctatgatttatccttctcatgtacgtcttagtgggaggaatctaacagtatccatcttttcctgttataaaattaatgttcttacttgtagagtcgtgccccaatttctgcaaaacttgtggccaatatgctgtcggtggctggggcggatcacatcatcaccatggacctgcatgcttctcagatacaggtatccgtgttttccttctgcaaatggttaaatcaagtctgttaaattaaataatcttaggtaacattact

SEQ ID NO: 309899 - DNA, 716 bp, Homo sapiens
  misc_feature (1)..(1): n is a, c, g, or t
  misc_feature (49)..(49): n is a, c, g, or t
ngcttcaaaaccgggcggtcgtagcccaagagggaaagaagaagaaagnaaaaagaggaaagaaaacctcaagctaagttctctctctctctcttcgtgcgaaattcggcacgagcatcaacttctcccaagcagagaaacccgaacccaccaaccaggggcaggatagcctgaagaaacatctacacgcagaaatcaaagttattgggtttatcatctctggctctctatcaatcgccacagagaaaaggttaaccaagcttttggtgcatagcagcctggttggaagcattctgagtgctctgtctgccctggtgggtttcattatcctgtctgtcaaacaggccaccttaaatcctgcctcactgcagtgtggaactctctctctgatgctgatttgcactctgctggaattctgcctagctgtgctcactgctgtgctgcggtggaaacaggcttactctgacttccctgggagtgtacttttcctgcctcacagttacattggtaattctggcatgtcctcaaaaatgactcatgactgtggatatgaagaactattgacttcttaagaaaaaagggagaaatattaatcagaaagttgattcttatgataatatggaaaagttaaccattatagaaaagcaaagcttgagtttcctaaatgtaagcttttaaagtaatgaacattaaaaaaaaccattatttcactgtca

SEQ ID NO: 309900 - DNA, 1004 bp, Homo sapiens
  misc_feature (892)..(892): n is a, c, g, or t
  misc_feature (939)..(939): n is a, c, g, or t
  misc_feature (973)..(973): n is a, c, g, or t
  misc_feature (996)..(996): n is a, c, g, or t
  misc_feature (1003)..(1003): n is a, c, g, or t
taatcaaagctcaggaggagagctgcattccactgtttcacagatgctgtgagggtgacaaagatgcagggcacccactggaaacacagacggcactctgcgaaagaggaaggggcgccaggagcttggattagaaaactgaagcttcaagaacagacttgcctaacaacaggaaacttgtatgtctcgaagtggcaattcacacataaggctccatgactcctgaactctcacaaatattagttggctcttttcatggttttactgaccttgctagaagtttacagcaacggaagtgcaggaacatttcacaaatctacaatctttggcaacaccatcatgacatcacaacctgttcccaatgagaccatcatagtgctcccatcaaatgtcatcaacttctcccaagcagagaaacccgaacccaccaaccaggggcaggatagcctgaagaaacatctacacgcagaaatcaaagttattgggactatccagatcttgtgtggcatgatggtattgagcttggggatcattttggcatctgcttccttctctccaaattttacccaagtgacttctacactgttgaactctgcttacccattcataggaccctttttttttatcatctctggctctctatcaatcgccacagagaaaaggttaaccaagcttttggtgcatagcagcctggttggaagcattctgagtgctctgtctgccctggtgggtttcattatcctgtctgtcaaacaggccaccttaaatcctgcctcactgcagtgtgagttggacaaaaataatataccaacaagaagttatgtttcttacttttatcatgattcactttataccacggactgctatacagccaaagccagtctggctgaantctctcttctggatggctggatttggcacttctggctgggaattctngcctaggctggtggctccacttgctggtgcttgncgggtggggaaacagggcttaantctggant

SEQ ID NO: 309901 - DNA, 1435 bp, Homo sapiens
taatcaaagctcaggaggagagctgcattccactgtttcacagatgctgtgagggtgacaaagatgcagggcacccactggaaacacagacggcactctgcgaaagaggaaggggcgccaggagcttgggtgagcaaggttggaggtgattctgcccctctccccaggctttctgtattagaaaactgaagcttcaagaacagacttgcctaacaacaggaaacttgtatgtctcgaagtggcaattcacacataaggctccatgactcctgaactctcacaaatattagttggctcttttcatggttttactgaccttgctagaagtttacagcaacggaagtgcaggaacatttcacaaatctacaatctgtgagtatcacatcctgtatagctgtaaacactggaataaggaagggctgatgactttcagaagatgaaggtaagtagaaaccgttgatgggactgagaaaccagagttaaaacctctttggagcttctgaggactcagctggaaccaacgggcacagttggcaacaccatcatgacatcacaacctgttcccaatgagaccatcatagtgctcccatcaaatgtcatcaacttctcccaagcagagaaacccgaacccaccaaccaggggcaggatagcctgaagaaacatctacacgcagaaatcaaagttattgggactatccagatcttgtgtggcatgatggtattgagcttggggatcattttggcatctgcttccttctctccaaattttacccaagtgacttctacactgttgaactctgcttacccattcataggaccctttttttttatcatctctggctctctatcaatcgccacagagaaaaggttaaccaagcttttggtgcatagcagcctggttggaagcattctgagtgctctgtctgccctggtgggtttcattatcctgtctgtcaaacaggccaccttaaatcctgcctcactgcagtgtgagttggacaaaaataatataccaacaagaagttatgtttcttacttttatcatgattcactttataccacggactgctatacagccaaagccagtctggctggaactctctctctgatgctgatttgcactctgctggaattctgcctagctgtgctcactgctgtgctgcggtggaaacaggcttactctgacttccctgggagtgtacttttcctgcctcacagttacattggtaattctggcatgtcctcaaaaatgactcatgactgtggatatgaagaactattgacttcttaagaaaaaagggagaaatattaatcagaaagttgattcttatgataatatggaaaagttaaccattatagaaaagcaaagcttgagtttcctaaatgtaagcttttaaagtaatgaacattaaaaaaaaccattatttcactgtca

SEQ ID NO: 309902 - DNA, 1724 bp, Homo sapiens
taatcaaagctcaggaggagagctgcattccactgtttcacagatgctgtgagggtgacaaagatgcagggcacccactggaaacacagacggcactctgcgaaagaggaaggggcgccaggagcttgggtgagcaaggttggaggtgattctgcccctctccccaggctttctgtattagaaaactgaagcttcaagaacagacttgcctaacaacaggaaacttgtatgtctcgaagtggcaattcacacataaggctccatgactcctgaactctcacaaatattagttggctcttttcatggttttactgaccttgctagaagtttacagcaacggaagtgcaggaacatttcacaaatctacaatctgtgagtatcacatcctgtatagctgtaaacactggaataaggaagggctgatgactttcagaagatgaaggtaagtagaaaccgttgatgggactgagaaaccagagttaaaacctctttggagcttctgaggactcagctggaaccaacgggcacagttggcaacaccatcatgacatcacaacctgttcccaatgagaccatcatagtgctcccatcaaatgtcatcaacttctcccaagcagagaaacccgaacccaccaaccaggggcaggatagcctgaagaaacatctacacgcagaaatcaaagttattgggactatccagatcttgtgtggcatgatggtattgagcttggggatcattttggcatctgcttccttctctccaaattttacccaagtgacttctacactgttgaactctgcttacccattcataggaccctttttttttatcatctctggctctctatcaatcgccacagagaaaaggttaaccaagcttttggtgcatagcagcctggttggaagcattctgagtgctctgtctgccctggtgggtttcattatcctgtctgtcaaacaggccaccttaaatcctgcctcactgcagtgtgagttggacaaaaataatataccaacaagaagttatgtttcttacttttatcatgattcactttataccacggactgctatacagccaaagccagtctggctggaactctctctctgatgctgatttgcactctgctggaattctgcctagctgtgctcactgctgtgctgcggtggaaacaggcttactctgacttccctggggtgagtgtgctggccggcttcacttaaccttgcctagtgtatcttatccctgcactgtgttgagtatgtcaccaagagtggtagaaggaacaaccagccaatcacgagatacacatgggagggcatttgcattgtgatggaagacagagaagaaaagcagatggcaattgagtagctgataagctgaaaattcactggatatgaaaatagttaatcatgagaaatcaactgattcaatcttcctattttgtcagcgaagggaatgagactctgggaagttaaatgactggcctggcattatgctatgagtttgtgcctttgctgaggacactagaacctggcttgcctcccttataagcagaaacaatttctgccacaaccactagtctctttaatagtattgacttggtaaagggcatttacacacgtaactggatccagtgaatgtcttatgctctgcatttgcccctggtgatcttaaaattcgtttgcctttttaaagctatattaaaaatgtattgttgaatca

SEQ ID NO: 309903 - DNA, 1853 bp, Homo sapiens
taatcaaagctcaggaggagagctgcattccactgtttcacagatgctgtgagggtgacaaagatgcagggcacccactggaaacacagacggcactctgcgaaagaggaaggggcgccaggagcttgggtgagcaaggttggaggtgattctgcccctctccccaggctttctgtattagaaaactgaagcttcaagaacagacttgcctaacaacaggaaacttgtatgtctcgaagtggcaattcacacataaggctccatgactcctgaactctcacaaatattagttggctcttttcatggttttactgaccttgctagaagtttacagcaacggaagtgcaggaacatttcacaaatctacaatctgtgagtatcacatcctgtatagctgtaaacactggaataaggaagggctgatgactttcagaagatgaaggtaagtagaaaccgttgatgggactgagaaaccagagttaaaacctctttggagcttctgaggactcagctggaaccaacgggcacagttggcaacaccatcatgacatcacaacctgttcccaatgagaccatcatagtgctcccatcaaatgtcatcaacttctcccaagcagagaaacccgaacccaccaaccaggggcaggatagcctgaagaaacatctacacgcagaaatcaaagttattgggactatccagatcttgtgtggcatgatggtattgagcttggggatcattttggcatctgcttccttctctccaaattttacccaagtgacttctacactgttgaactctgcttacccattcataggaccctttttttttatcatctctggctctctatcaatcgccacagagaaaaggttaaccaagcttttggtgcatagcagcctggttggaagcattctgagtgctctgtctgccctggtgggtttcattatcctgtctgtcaaacaggccaccttaaatcctgcctcactgcagtgtgagttggacaaaaataatataccaacaagaagttatgtttcttacttttatcatgattcactttataccacggactgctatacagccaaagccagtctggctggaactctctctctgatgctgatttgcactctgctggaattctgcctagctgtgctcactgctgtgctgcggtggaaacaggcttactctgacttccctgggagtgtacttttcctgcctcacagttacattggtaattctggcatgtcctcaaaaatgactcatgactgtggatatgaagaactattgacttcttaagaaaaaagggagaaatattaatcagaaagttgattcttatgataatatggaaaagttaaccattatagaaaagcaaagcttgagtttcctaaatgtaagcttttaaagtaatgaacattaaaaaaaaccattatttcactgtcaaaaaagatatgtgttcattggggatctcttgatttgcctgacattgacttcagcaaaagcacggggctgtaaattaccatttactagattagccaaatagtctgaatttccagaaaacaaggcagaatgatcattcccagaaacatttcccagaaaatgtttcccagaaaactagacagaatgatcattcaatggatcacagtgaagcaaaggacacaactttttattgtaccccttaattgtcaacaggagttaactgatttgttgtggtgctcagacttttttatacaggtgctagtgttttatcctatgtattttaactcattagtgcataaaggcaagccccatataatgaagtctcagggtatatgaaagtagctggcttcaaaataaaatttttgagtgcatattttgtttt

SEQ ID NO: 309904 - DNA, 2627 bp, Homo sapiens
taatcaaagctcaggaggagagctgcattccactgtttcacagatgctgtgagggtgacaaagatgcagggcacccactggaaacacagacggcactctgcgaaagaggaaggggcgccaggagcttgggtgagcaaggttggaggtgattctgcccctctccccaggctttctgtattagaaaactgaagcttcaagaacagacttgcctaacaacaggaaacttgtatgtctcgaagtggcaattcacacataaggctccatgactcctgaactctcacaaatattagttggctcttttcatggttttactgaccttgctagaagtttacagcaacggaagtgcaggaacatttcacaaatctacaatctgtgagtatcacatcctgtatagctgtaaacactggaataaggaagggctgatgactttcagaagatgaaggtaagtagaaaccgttgatgggactgagaaaccagagttaaaacctctttggagcttctgaggactcagctggaaccaacgggcacagttggcaacaccatcatgacatcacaacctgttcccaatgagaccatcatagtgctcccatcaaatgtcatcaacttctcccaagcagagaaacccgaacccaccaaccaggggcaggatagcctgaagaaacatctacacgcagaaatcaaagttattgggactatccagatcttgtgtggcatgatggtattgagcttggggatcattttggcatctgcttccttctctccaaattttacccaagtgacttctacactgttgaactctgcttacccattcataggaccctttttttttatcatctctggctctctatcaatcgccacagagaaaaggttaaccaagcttttggtgcatagcagcctggttggaagcattctgagtgctctgtctgccctggtgggtttcattatcctgtctgtcaaacaggccaccttaaatcctgcctcactgcagtgtgagttggacaaaaataatataccaacaagaagttatgtttcttacttttatcatgattcactttataccacggactgctatacagccaaagccagtctggctggaactctctctctgatgctgatttgcactctgctggaattctgcctagctgtgctcactgctgtgctgcggtggaaacaggcttactctgacttccctggggtgagtgtgctggccggcttcacttaaccttgcctagtgtatcttatccctgcactgtgttgagtatgtcaccaagagtggtagaaggaacaaccagccaatcacgagatacacatgggagggcatttgcattgtgatggaagacagagaagaaaagcagatggcaattgagtagctgataagctgaaaattcactggatatgaaaatagttaatcatgagaaatcaactgattcaatcttcctattttgtcagcgaagggaatgagactctgggaagttaaatgactggcctggcattatgctatgagtttgtgcctttgctgaggacactagaacctggcttgcctcccttataagcagaaacaatttctgccacaaccactagtctctttaatagtattgacttggtaaagggcatttacacacgtaactggatccagtgaatgtcttatgctctgcatttgcccctggtgatcttaaaattcgtttgcctttttaaagctatattaaaaatgtattgttgaatcaaacccctatggacttatggctttatttaactgaattaaaaagccttgatttatccaaaattgtattatagagtgtagaatgaatactagggtgataaattgcaattatttgaagaacctggtgatatgctctacttatcttggattagctaagaattctatgtatacagttggaaaaatggcatatatacatctatcttgaacctgattgaagtctgaagacctaacatattttgtttcttctagagtgtacttttcctgcctcacagttacattggtaattctggcatgtcctcaaaaatgactcatgactgtggatatgaagaactattgacttcttaagaaaaaagggagaaatattaatcagaaagttgattcttatgataatatggaaaagttaaccattatagaaaagcaaagcttgagtttcctaaatgtaagcttttaaagtaatgaacattaaaaaaaaccattatttcactgtcaaaaaagatatgtgttcattggggatctcttgatttgcctgacattgacttcagcaaaagcacggggctgtaaattaccatttactagattagccaaatagtctgaatttccagaaaacaaggcagaatgatcattcccagaaacatttcccagaaaatgtttcccagaaaactagacagaatgatcattcaatggatcacagtgaagcaaaggacacaactttttattgtaccccttaattgtcaacaggagttaactgatttgttgtggtgctcagacttttttatacaggtgctagtgttttatcctatgtattttaactcattagtgcataaaggcaagccccatataatgaagtctcagggtatatgaaagtagctggcttcaaaataaaatttttgagtgcatattttgtttt

SEQ ID NO: 309905 - DNA, 2209 bp, Homo sapiens
taatcaaagctcaggaggagagctgcattccactgtttcacagatgctgtgagggtgacaaagatgcagggcacccactggaaacacagacggcactctgcgaaagaggaaggggcgccaggagcttgggtgagcaaggttggaggtgattctgcccctctccccaggctttctgtattagaaaactgaagcttcaagaacagacttgcctaacaacaggaaacttgtatgtctcgaagtggcaattcacacataaggctccatgactcctgaactctcacaaatattagttggctcttttcatggttttactgaccttgctagaagtttacagcaacggaagtgcaggaacatttcacaaatctacaatctgtgagtatcacatcctgtatagctgtaaacactggaataaggaagggctgatgactttcagaagatgaaggtaagtagaaaccgttgatgggactgagaaaccagagttaaaacctctttggagcttctgaggactcagctggaaccaacgggcacagttggcaacaccatcatgacatcacaacctgttcccaatgagaccatcatagtgctcccatcaaatgtcatcaacttctcccaagcagagaaacccgaacccaccaaccaggggcaggatagcctgaagaaacatctacacgcagaaatcaaagttattgggactatccagatcttgtgtggcatgatggtattgagcttggggatcattttggcatctgcttccttctctccaaattttacccaagtgacttctacactgttgaactctgcttacccattcataggaccctttttttttatcatctctggctctctatcaatcgccacagagaaaaggttaaccaagcttttggtgcatagcagcctggttggaagcattctgagtgctctgtctgccctggtgggtttcattatcctgtctgtcaaacaggccaccttaaatcctgcctcactgcagtgtgagttggacaaaaataatataccaacaagaagttatgtttcttacttttatcatgattcactttataccacggactgctatacagccaaagccagtctggctggaactctctctctgatgctgatttgcactctgctggaattctgcctagctgtgctcactgctgtgctgcggtggaaacaggcttactctgacttccctggggtgagtgtgctggccggcttcacttaaccttgcctagtgtatcttatccctgcactgtgttgagtatgtcaccaagagtggtagaaggaacaaccagccaatcacgagatacacatgggagggcatttgcattgtgatggaagacagagaagaaaagcagatggcaattgagtagctgataagctgaaaattcactggatatgaaaatagttaatcatgagaaatcaactgattcaatcttcctattttgtcagcgaagggaatgagactctgggaagttaaatgactggcctggcattatgctatgagtttgtgcctttgctgaggacactagaacctggcttgcctcccttataagcagaaacaatttctgccacaaccactagtctctttaatagtattgacttggtaaagggcatttacacacgtaactggatccagtgaatgtcttatgctctgcatttgcccctggtgatcttaaaattcgtttgcctttttaaagctatattaaaaatgtattgttgaatcaaacccctatggacttatggctttatttaactgaattaaaaagccttgatttatccaaaattgtattatagagtgtagaatgaatactagggtgataaattgcaattatttgaagaacctggtgatatgctctacttatcttggattagctaagaattctatgtatacagttggaaaaatggcatatatacatctatcttgaacctgattgaagtctgaagacctaacatattttgtttcttctagagtgtacttttcctgcctcacagttacattggtaattctggcatgtcctcaaaaatgactcatgactgtggatatgaagaactattgacttcttaagaaaaaagggagaaatattaatcagaaagttgattcttatgataatatggaaaagttaaccattatagaaaagcaaagcttgagtttcctaaatgtaagcttttaaagtaatgaacattaaaaaaaaccattatttcactgtca

SEQ ID NO: 309906 - DNA, 1337 bp, Homo sapiens
ccgaagggttctgtgctaggaaccttacacgtgttgtctcacataatccttaaaactcagaaatgattttaaattaaatagcacagagaggaaaactgactggagagggagcctttgcttagattagaaaactgaagcttcaagaacagacttgcctaacaacaggaaacttgtatgtctcgaagtggcaattcacacataaggctccatgactcctgaactctcacaaatattagttggctcttttcatggttttactgaccttgctagaagtttacagcaacggaagtgcaggaacatttcacaaatctacaatctgtgagtatcacatcctgtatagctgtaaacactggaataaggaagggctgatgactttcagaagatgaaggtaagtagaaaccgttgatgggactgagaaaccagagttaaaacttggcaacaccatcatgacatcacaacctgttcccaatgagaccatcatagtgctcccatcaaatgtcatcaacttctcccaagcagagaaacccgaacccaccaaccaggggcaggatagcctgaagaaacatctacacgcagaaatcaaagttattgggactatccagatcttgtgtggcatgatggtattgagcttggggatcattttggcatctgcttccttctctccaaattttacccaagtgacttctacactgttgaactctgcttacccattcataggaccctttttttttatcatctctggctctctatcaatcgccacagagaaaaggttaaccaagcttttggtgcatagcagcctggttggaagcattctgagtgctctgtctgccctggtgggtttcattatcctgtctgtcaaacaggccaccttaaatcctgcctcactgcagtgtgagttggacaaaaataatataccaacaagaagttatgtttcttacttttatcatgattcactttataccacggactgctatacagccaaagccagtctggctggaactctctctctgatgctgatttgcactctgctggaattctgcctagctgtgctcactgctgtgctgcggtggaaacaggcttactctgacttccctgggagtgtacttttcctgcctcacagttacattggtaattctggcatgtcctcaaaaatgactcatgactgtggatatgaagaactattgacttcttaagaaaaaagggagaaatattaatcagaaagttgattcttatgataatatggaaaagttaaccattatagaaaagcaaagcttgagtttcctaaatgtaagcttttaaagtaatgaacattaaaaaaaaccattatttcactgtca

SEQ ID NO: 309907 - DNA, 1030 bp, Homo sapiens
gctcggtacctctagttatgggttggttctatttcatggtttgtaccttggaaggttgtaccaactttacagcaaagacgcgatgtgcctggaacgatttcacagaatctacaatcttagtcgacttggcaacaccatcatgacatcacaacctgttcccaatgagaccatcatagtgctcccatcaaatgtcatcaacttctcccaagcagagaaacccgaacccaccaaccaggggcaggatagcctgaagaaacatctacacgcagaaatcaaagttattgggactatccagatcttgtgtggcatgatggtattgagcttggggatcattttggcatctgcttccttctctccaaattttacccaagtgacttctacactgttgaactctgcttacccattcataggaccctttttttttatcatctctggctctctatcaatcgccacagagaaaaggttaaccaagcttttggtgcatagcagcctggttggaagcattctgagtgctctgtctgccctggtgggtttcattatcctgtctgtcaaacaggccaccttaaatcctgcctcactgcagtgtgagttggacaaaaataatataccaacaagaagttatgtttcttacttttatcatgattcactttataccacggactgctatacagccaaagccagtctggctggaactctctctctgatgctgatttgcactctgctggaattctgcctagctgtgctcactgctgtgctgcggtggaaacaggcttactctgacttccctgggagtgtacttttcctgcctcacagttacattggtaattctggcatgtcctcaaaaatgactcatgactgtggatatgaagaactattgacttcttaagaaaaaagggagaaatattaatcagaaagttgattcttatgataatatggaaaagttaaccattatagaaaagcaaagcttgagtttcctaaatgtaagcttttaaagtaatgaacattaaaaaaaaccattatttcactgtca

SEQ ID NO: 309908 - DNA, 1368 bp, Homo sapiens
taatcaaagctcaggaggagagctgcattccactgtttcacagatgctgtgagggtgacaaagatgcagggcacccactggaaacacagacggcactctgcgaaagaggaaggggcgccaggagcttgggtgagcaaggttggaggtgattctgcccctctccccaggctttctgtattagaaaactgaagcttcaagaacagacttgcctaacaacaggaaacttgtatgtctcgaagtggcaattcacacataaggctccatgactcctgaactctcacaaatattagttggctcttttcatggttttactgaccttgctagaagtttacagcaacggaagtgcaggaacatttcacaaatctacaatctgtgagtatcacatcctgtatagctgtaaacactggaataaggaagggctgatgactttcagaagatgaaggtaagtagaaaccgttgatgggactgagaaaccagagttaaaacctctttggagcttctgaggactcagctggaaccaacgggcacagcatcaacttctcccaagcagagaaacccgaacccaccaaccaggggcaggatagcctgaagaaacatctacacgcagaaatcaaagttattgggactatccagatcttgtgtggcatgatggtattgagcttggggatcattttggcatctgcttccttctctccaaattttacccaagtgacttctacactgttgaactctgcttacccattcataggaccctttttttttatcatctctggctctctatcaatcgccacagagaaaaggttaaccaagcttttggtgcatagcagcctggttggaagcattctgagtgctctgtctgccctggtgggtttcattatcctgtctgtcaaacaggccaccttaaatcctgcctcactgcagtgtgagttggacaaaaataatataccaacaagaagttatgtttcttacttttatcatgattcactttataccacggactgctatacagccaaagccagtctggctggaactctctctctgatgctgatttgcactctgctggaattctgcctagctgtgctcactgctgtgctgcggtggaaacaggcttactctgacttccctgggagtgtacttttcctgcctcacagttacattggtaattctggcatgtcctcaaaaatgactcatgactgtggatatgaagaactattgacttcttaagaaaaaagggagaaatattaatcagaaagttgattcttatgataatatggaaaagttaaccattatagaaaagcaaagcttgagtttcctaaatgtaagcttttaaagtaatgaacattaaaaaaaaccattatttcactgtca

SEQ ID NO: 309909 - DNA, 1429 bp, Homo sapiens
taatcaaagctcaggaggagagctgcattccactgtttcacagatgctgtgagggtgacaaagatgcagggcacccactggaaacacagacggcactctgcgaaagaggaaggggcgccaggagcttgggtgagcaaggttggaggtgattctgcccctctccccaggctttctgtattagaaaactgaagcttcaagaacagacttgcctaacaacaggaaacttgtatgtctcgaagtggcaattcacacataaggctccatgactcctgaactctcacaaatattagttggctcttttcatggttttactgaccttgctagaagtttacagcaacggaagtgcaggaacatttcacaaatctacaatctgtgagtatcacatcctgtatagctgtaaacactggaataaggaagggctgatgactttcagaagatgaaggtaagtagaaaccgttgatgggactgagaaaccagagttaaaacctctttggagcttctgaggactcagctggaaccaacgggcacagttggcaacaccatcatgacatcacaacctgttcccaatgagaccatcatagtgctcccatcaaatgtcatcaacttctcccaagcagagaaacccgaacccaccaaccaggggcaggatagcctgaagaaacatctacacgcagaaatcaaagttattgggatcattttggcatctgcttccttctctccaaattttacccaagtgacttctacactgttgaactctgcttacccattcataggaccctttttttttatcatctctggctctctatcaatcgccacagagaaaaggttaaccaagcttttggggtttttgagttgagcgagagagaaactgcatctggtgcatagcagcctggttggaagcattctgagtgctctgtctgccctggtgggtttcattatcctgtctgtcaaacaggccaccttaaatcctgcctcactgcagtgtgagttggacaaaaataatataccaacaagaagttatgtttcttacttttatcatgattcactttataccacggactgctatacagccaaagccagtctggctggaactctctctctgatgctgatttgcactctgctggaattctgcctagctgtgctcactgctgtgctgcggtggaaacaggcttactctgacttccctgggagtgtacttttcctgcctcacagttacattggtaattctggcatgtcctcaaaaatgactcatgactgtggatatgaagaactattgacttcttaagaaaaaagggagaaatattaatcagaaagttgattcttatgataatatggaaaagttaaccattatagaaaagcaaagcttgagtttcctaaatgtaagcttttaaagtaatgaacattaaaaaaaaccattatttcactgtca

SEQ ID NO: 309910 - DNA, 2594 bp, Homo sapiens
taatcaaagctcaggaggagagctgcattccactgtttcacagatgctgtgagggtgacaaagatgcagggcacccactggaaacacagacggcactctgcgaaagaggaaggggcgccaggagcttgggtgagcaaggttggaggtgattctgcccctctccccaggctttctgtattagaaaactgaagcttcaagaacagacttgcctaacaacaggaaacttgtatgtctcgaagtggcaattcacacataaggctccatgactcctgaactctcacaaatattagttggctcttttcatggttttactgaccttgctagaagtttacagcaacggaagtgcaggaacatttcacaaatctacaatctgtgagtatcacatcctgtatagctgtaaacactggaataaggaagggctgatgactttcagaagatgaaggtaagtagaaaccgttgatgggactgagaaaccagagttaaaacctctttggagcttctgaggactcagctggaaccaacgggcacagttggcaacaccatcatgacatcacaacctgttcccaatgagaccatcatagtgctcccatcaaatgtcatcaacttctcccaagcagagaaacccgaacccaccaaccaggggcaggatagcctgaagaaacatctacacgcagaaatcaaagttattgggactatccagatcttgtgtggcatgatggtattgagcttggggatcattttggcatctgcttccttctctccaaattttacccaagtgacttctacactgttgaactctgcttacccattcataggaccctttttttttatcatctctggctctctatcaatcgccacagagaaaaggttaaccaagcttttggtgcatagcagcctggttggaagcattctgagtgctctgtctgccctggtgggtttcattatcctgtctgtcaaacaggccaccttaaatcctgcctcactgcagtgtgagttggacaaaaataatataccaacaagaagttatgtttcttacttttatcatgattcactttataccacggactgctatacagccaaagccagtctggctctggaattctgcctagctgtgctcactgctgtgctgcggtggaaacaggcttactctgacttccctggggtgagtgtgctggccggcttcacttaaccttgcctagtgtatcttatccctgcactgtgttgagtatgtcaccaagagtggtagaaggaacaaccagccaatcacgagatacacatgggagggcatttgcattgtgatggaagacagagaagaaaagcagatggcaattgagtagctgataagctgaaaattcactggatatgaaaatagttaatcatgagaaatcaactgattcaatcttcctattttgtcagcgaagggaatgagactctgggaagttaaatgactggcctggcattatgctatgagtttgtgcctttgctgaggacactagaacctggcttgcctcccttataagcagaaacaatttctgccacaaccactagtctctttaatagtattgacttggtaaagggcatttacacacgtaactggatccagtgaatgtcttatgctctgcatttgcccctggtgatcttaaaattcgtttgcctttttaaagctatattaaaaatgtattgttgaatcaaacccctatggacttatggctttatttaactgaattaaaaagccttgatttatccaaaattgtattatagagtgtagaatgaatactagggtgataaattgcaattatttgaagaacctggtgatatgctctacttatcttggattagctaagaattctatgtatacagttggaaaaatggcatatatacatctatcttgaacctgattgaagtctgaagacctaacatattttgtttcttctagagtgtacttttcctgcctcacagttacattggtaattctggcatgtcctcaaaaatgactcatgactgtggatatgaagaactattgacttcttaagaaaaaagggagaaatattaatcagaaagttgattcttatgataatatggaaaagttaaccattatagaaaagcaaagcttgagtttcctaaatgtaagcttttaaagtaatgaacattaaaaaaaaccattatttcactgtcaaaaaagatatgtgttcattggggatctcttgatttgcctgacattgacttcagcaaaagcacggggctgtaaattaccatttactagattagccaaatagtctgaatttccagaaaacaaggcagaatgatcattcccagaaacatttcccagaaaatgtttcccagaaaactagacagaatgatcattcaatggatcacagtgaagcaaaggacacaactttttattgtaccccttaattgtcaacaggagttaactgatttgttgtggtgctcagacttttttatacaggtgctagtgttttatcctatgtattttaactcattagtgcataaaggcaagccccatataatgaagtctcagggtatatgaaagtagctggcttcaaaataaaatttttgagtgcatattttgtttt

SEQ ID NO: 309911 - DNA, 2583 bp, Homo sapiens
taatcaaagctcaggaggagagctgcattccactgtttcacagatgctgtgagggtgacaaagatgcagggcacccactggaaacacagacggcactctgcgaaagaggaaggggcgccaggagcttgggtgagcaaggttggaggtgattctgcccctctccccaggctttctgtattagaaaactgaagcttcaagaacagacttgcctaacaacaggaaacttgtatgtctcgaagtggcaattcacacataaggctccatgactcctgaactctcacaaatattagttggctcttttcatggttttactgaccttgctagaagtttacagcaacggaagtgcaggaacatttcacaaatctacaatctgtgagtatcacatcctgtatagctgtaaacactggaataaggaagggctgatgactttcagaagatgaaggtaagtagaaaccgttgatgggactgagaaaccagagttaaaacctctttggagcttctgaggactcagctggaaccaacgggcacagttggcaacaccatcatgacatcacaacctgttcccaatgagaccatcatagtgctcccatcaaatgtcatcaacttctcccaagcagagaaacccgaacccaccaaccaggggcaggatagcctgaagaaacatctacacgcagaaatcaaagttattgggactatccagatcttgtgtggcatgatggtattgagcttggggatcattttggcatctgcttccttctctccaaattttacccaagtgacttctacactgttgaactctgcttacccattcataggaccctttttttttatcatctctggctctctatcaatcgccacagagaaaaggttaaccaagcttttggtgcatagcagcctggttggaagcattctgagtgctctgtctgccctggtgggtttcattatcctgtctgtcaaacaggccaccttaaatcctgcctcactgcagtgtataccacggactgctatacagccaaagccagtctggctggaactctctctctgatgctgatttgcactctgctggaattcttgcctagctgctggaattctgcctagctgtgctcactgctgtgctgcggtggaaacaggcttactctgacttccctggggtgagtgtgctggccggcttcacttaaccttgcctagtgtatcttatccctgcactgtgttgagtatgtcaccaagagtggtagaaggaacaaccagccaatcacgagatacacatgggagggcatttgcattgtgatggaagacagagaagaaaagcagatggcaattgagtagctgataagctgaaaattcactggatatgaaaatagttaatcatgagaaatcaactgattcaatcttcctattttgtcagcgaagggaatgagactctgggaagttaaatgactggcctggcattatgctatgagtttgtgcctttgctgaggacactagaacctggcttgcctcccttataagcagaaacaatttctgccacaaccactagtctctttaatagtattgacttggtaaagggcatttacacacgtaactggatccagtgaatgtcttatgctctgcatttgcccctggtgatcttaaaattcgtttgcctttttaaagctatattaaaaatgtattgttgaatcaaacccctatggacttatggctttatttaactgaattaaaaagccttgatttatccaaaattgtattatagagtgtagaatgaatactagggtgataaattgcaattatttgaagaacctggtgatatgctctacttatcttggattagctaagaattctatgtatacagttggaaaaatggcatatatacatctatcttgaacctgattgaagtctgaagacctaacatattttgtttcttctagagtgtacttttcctgcctcacagttacattggtaattctggcatgtcctcaaaaatgactcatgactgtggatatgaagaactattgacttcttaagaaaaaagggagaaatattaatcagaaagttgattcttatgataatatggaaaagttaaccattatagaaaagcaaagcttgagtttcctaaatgtaagcttttaaagtaatgaacattaaaaaaaaccattatttcactgtcaaaaaagatatgtgttcattggggatctcttgatttgcctgacattgacttcagcaaaagcacggggctgtaaattaccatttactagattagccaaatagtctgaatttccagaaaacaaggcagaatgatcattcccagaaacatttcccagaaaatgtttcccagaaaactagacagaatgatcattcaatggatcacagtgaagcaaaggacacaactttttattgtaccccttaattgtcaacaggagttaactgatttgttgtggtgctcagacttttttatacaggtgctagtgttttatcctatgtattttaactcattagtgcataaaggcaagccccatataatgaagtctcagggtatatgaaagtagctggcttcaaaataaaatttttgagtgcatattttgtttt

SEQ ID NO: 309912 - DNA, 1333 bp, Homo sapiens
taatcaaagctcaggaggagagctgcattccactgtttcacagatgctgtgagggtgacaaagatgcagggcacccactggaaacacagacggcactctgcgaaagaggaaggggcgccaggagcttgggtgagcaaggttggaggtgattctgcccctctccccaggctttctgtattagaaaactgaagcttcaagaacagacttgcctaacaacaggaaacttgtatgtctcgaagtggcaattcacacataaggctccatgactcctgaactctcacaaatattagttggctcttttcatggttttactgaccttgctagaagtttacagcaacggaagtgcaggaacatttcacaaatctacaatctgtgagtatcacatcctgtatagctgtaaacactggaataaggaagggctgatgactttcagaagatgaaggtaagtagaaaccgttgatgggactgagaaaccagagttaaaacctctttggagcttctgaggactcagctggaaccaacgggcacagttggcaacaccatcatgacatcacaacctgttcccaatgagaccatcatagtgctcccatcaaatgtcatcaacttctcccaagcagagaaacccgaacccaccaaccaggggcaggatagcctgaagaaacatctacacgcagaaatcaaagttattgggactatccagatcttgtgtggcatgatggtattgagcttggggatcattttggcatctgcttccttctctccaaattttacccaagtgacttctacactgttgaactctgcttacccattcataggaccctttttttttatcatctctggctctctatcaatcgccacagagaaaaggttaaccaagcttttggtgcatagcagcctggttggaagcattctgagtgctctgtctgccctggtgggtttcattatcctgtctgtcaaacaggccaccttaaatcctgcctcactgcagtgtggaactctctctctgatgctgatttgcactctgctggaattctgcctagctgtgctcactgctgtgctgcggtggaaacaggcttactctgacttccctgggagtgtacttttcctgcctcacagttacattggtaattctggcatgtcctcaaaaatgactcatgactgtggatatgaagaactattgacttcttaagaaaaaagggagaaatattaatcagaaagttgattcttatgataatatggaaaagttaaccattatagaaaagcaaagcttgagtttcctaaatgtaagcttttaaagtaatgaacattaaaaaaaaccattatttcactgtca

SEQ ID NO: 309913 - DNA, 1751 bp, Homo sapiens
taatcaaagctcaggaggagagctgcattccactgtttcacagatgctgtgagggtgacaaagatgcagggcacccactggaaacacagacggcactctgcgaaagaggaaggggcgccaggagcttgggtgagcaaggttggaggtgattctgcccctctccccaggctttctgtattagaaaactgaagcttcaagaacagacttgcctaacaacaggaaacttgtatgtctcgaagtggcaattcacacataaggctccatgactcctgaactctcacaaatattagttggctcttttcatggttttactgaccttgctagaagtttacagcaacggaagtgcaggaacatttcacaaatctacaatctgtgagtatcacatcctgtatagctgtaaacactggaataaggaagggctgatgactttcagaagatgaaggtaagtagaaaccgttgatgggactgagaaaccagagttaaaacctctttggagcttctgaggactcagctggaaccaacgggcacagttggcaacaccatcatgacatcacaacctgttcccaatgagaccatcatagtgctcccatcaaatgtcatcaacttctcccaagcagagaaacccgaacccaccaaccaggggcaggatagcctgaagaaacatctacacgcagaaatcaaagttattgggactatccagatcttgtgtggcatgatggtattgagcttggggatcattttggcatctgcttccttctctccaaattttacccaagtgacttctacactgttgaactctgcttacccattcataggaccctttttttttatcatctctggctctctatcaatcgccacagagaaaaggttaaccaagcttttggtgcatagcagcctggttggaagcattctgagtgctctgtctgccctggtgggtttcattatcctgtctgtcaaacaggccaccttaaatcctgcctcactgcagtgtggaactctctctctgatgctgatttgcactctgctggaattctgcctagctgtgctcactgctgtgctgcggtggaaacaggcttactctgacttccctgggagtgtacttttcctgcctcacagttacattggtaattctggcatgtcctcaaaaatgactcatgactgtggatatgaagaactattgacttcttaagaaaaaagggagaaatattaatcagaaagttgattcttatgataatatggaaaagttaaccattatagaaaagcaaagcttgagtttcctaaatgtaagcttttaaagtaatgaacattaaaaaaaaccattatttcactgtcaaaaaagatatgtgttcattggggatctcttgatttgcctgacattgacttcagcaaaagcacggggctgtaaattaccatttactagattagccaaatagtctgaatttccagaaaacaaggcagaatgatcattcccagaaacatttcccagaaaatgtttcccagaaaactagacagaatgatcattcaatggatcacagtgaagcaaaggacacaactttttattgtaccccttaattgtcaacaggagttaactgatttgttgtggtgctcagacttttttatacaggtgctagtgttttatcctatgtattttaactcattagtgcataaaggcaagccccatataatgaagtctcagggtatatgaaagtagctggcttcaaaataaaatttttgagtgcatattttgtttt

SEQ ID NO: 309914 - DNA, 1209 bp, Homo sapiens
  misc_feature (1097)..(1097): n is a, c, g, or t
  misc_feature (1144)..(1144): n is a, c, g, or t
  misc_feature (1178)..(1178): n is a, c, g, or t
  misc_feature (1201)..(1201): n is a, c, g, or t
  misc_feature (1208)..(1208): n is a, c, g, or t
taatcaaagctcaggaggagagctgcattccactgtttcacagatgctgtgagggtgacaaagatgcagggcacccactggaaacacagacggcactctgcgaaagaggaaggggcgccaggagcttgggtgagcaaggttggaggtgattctgcccctctccccaggctttctgtattagaaaactgaagcttcaagaacagacttgcctaacaacaggaaacttgtatgtctcgaagtggcaattcacacataaggctccatgactcctgaactctcacaaatattagttggctcttttcatggttttactgaccttgctagaagtttacagcaacggaagtgcaggaacatttcacaaatctacaatctgtgagtatcacatcctgtatagctgtaaacactggaataaggaagggctgatgactttcagaagatgaaggtaagtagaaaccgttgatgggactgagaaaccagagttaaaacctctttggagcttctgaggactcagctggaaccaacgggcacagttggcaacaccatcatgacatcacaacctgttcccaatgagaccatcatagtgctcccatcaaatgtcatcaacttctcccaagcagagaaacccgaacccaccaaccaggggcaggatagcctgaagaaacatctacacgcagaaatcaaagttattgggactatccagatcttgtgtggcatgatggtattgagcttggggatcattttggcatctgcttccttctctccaaattttacccaagtgacttctacactgttgaactctgcttacccattcataggaccctttttttttatcatctctggctctctatcaatcgccacagagaaaaggttaaccaagcttttggtgcatagcagcctggttggaagcattctgagtgctctgtctgccctggtgggtttcattatcctgtctgtcaaacaggccaccttaaatcctgcctcactgcagtgtgagttggacaaaaataatataccaacaagaagttatgtttcttacttttatcatgattcactttataccacggactgctatacagccaaagccagtctggctgaantctctcttctggatggctggatttggcacttctggctgggaattctngcctaggctggtggctccacttgctggtgcttgncgggtggggaaacagggcttaantctggant

SEQ ID NO: 309915 - DNA, 1119 bp, Homo sapiens
  misc_feature (1087)..(1087): n is a, c, g, or t
taatcaaagctcaggaggagagctgcattccactgtttcacagatgctgtgagggtgacaaagatgcagggcacccactggaaacacagacggcactctgcgaaagaggaaggggcgccaggagcttgggtgagcaaggttggaggtgattctgcccctctccccaggctttctgtattagaaaactgaagcttcaagaacagacttgcctaacaacaggaaacttgtatgtctcgaagtggcaattcacacataaggctccatgactcctgaactctcacaaatattagttggctcttttcatggttttactgaccttgctagaagtttacagcaacggaagtgcaggaacatttcacaaatctacaatctgtgagtatcacatcctgtatagctgtaaacactggaataaggaagggctgatgactttcagaagatgaaggtaagtagaaaccgttgatgggactgagaaaccagagttaaaacctctttggagcttctgaggactcagctggaaccaacgggcacagttggcaacaccatcatgacatcacaacctgttcccaatgagaccatcatagtgctcccatcaaatgtcatcaacttctcccaagcagagaaacccgaacccaccaaccaggggcaggatagcctgaagaaacatctacacgcagaaatcaaagttattgggactatccagatcttgtgtggcatgatggtattgagcttggggatcattttggcatctgcttccttctctccaaattttacccaagtgacttctacactgttgaactctgcttacccattcataggaccctttttttttatcatctctggctctctatcaatcgccacagagaaaaggttaaccaagcttttggtgcatagcagcctggttggaagcattctgagtgctctgtctgccctggtgggtttcattatcctgtctgtcaaacaggccaccttaaatcctgcctcactgcagtgtataccacggactgctatacagccaaagccagtctggctggaactctctctctgatgctgatttgcactctgctggaattcttgcctagctgtgctnacttgtgtgctgcggtggcaggctctctgctt

SEQ ID NO: 309916 - DNA, 2472 bp, Homo sapiens
taatcaaagctcaggaggagagctgcattccactgtttcacagatgctgtgagggtgacaaagatgcagggcacccactggaaacacagacggcactctgcgaaagaggaaggggcgccaggagcttgggtgagcaaggttggaggtgattctgcccctctccccaggctttctgtattagaaaactgaagcttcaagaacagacttgcctaacaacaggaaacttgtatgtctcgaagtggcaattcacacataaggctccatgactcctgaactctcacaaatattagttggctcttttcatggttttactgaccttgctagaagtttacagcaacggaagtgcaggaacatttcacaaatctacaatctgtgagtatcacatcctgtatagctgtaaacactggaataaggaagggctgatgactttcagaagatgaaggtaagtagaaaccgttgatgggactgagaaaccagagttaaaacctctttggagcttctgaggactcagctggaaccaacgggcacagttggcaacaccatcatgacatcacaacctgttcccaatgagaccatcatagtgctcccatcaaatgtcatcaacttctcccaagcagagaaacccgaacccaccaaccaggggcaggatagcctgaagaaacatctacacgcagaaatcaaagttattgggactatccagatcttgtgtggcatgatggtattgagcttggggatcattttggcatctgcttccttctctccaaattttacccaagtgacttctacactgttgaactctgcttacccattcataggaccctttttttttatcatctctggctctctatcaatcgccacagagtgctctgtctgccctggtgggtttcattatcctgtctgtcaaacaggccaccttaaatcctgcctcactgcagtgtggaactctctctctgatgctgatttgcactctgctggaattctgcctagctgtgctcactgctgtgctgcggtggaaacaggcttactctgacttccctggggtgagtgtgctggccggcttcacttaaccttgcctagtgtatcttatccctgcactgtgttgagtatgtcaccaagagtggtagaaggaacaaccagccaatcacgagatacacatgggagggcatttgcattgtgatggaagacagagaagaaaagcagatggcaattgagtagctgataagctgaaaattcactggatatgaaaatagttaatcatgagaaatcaactgattcaatcttcctattttgtcagcgaagggaatgagactctgggaagttaaatgactggcctggcattatgctatgagtttgtgcctttgctgaggacactagaacctggcttgcctcccttataagcagaaacaatttctgccacaaccactagtctctttaatagtattgacttggtaaagggcatttacacacgtaactggatccagtgaatgtcttatgctctgcatttgcccctggtgatcttaaaattcgtttgcctttttaaagctatattaaaaatgtattgttgaatcaaacccctatggacttatggctttatttaactgaattaaaaagccttgatttatccaaaattgtattatagagtgtagaatgaatactagggtgataaattgcaattatttgaagaacctggtgatatgctctacttatcttggattagctaagaattctatgtatacagttggaaaaatggcatatatacatctatcttgaacctgattgaagtctgaagacctaacatattttgtttcttctagagtgtacttttcctgcctcacagttacattggtaattctggcatgtcctcaaaaatgactcatgactgtggatatgaagaactattgacttcttaagaaaaaagggagaaatattaatcagaaagttgattcttatgataatatggaaaagttaaccattatagaaaagcaaagcttgagtttcctaaatgtaagcttttaaagtaatgaacattaaaaaaaaccattatttcactgtcaaaaaagatatgtgttcattggggatctcttgatttgcctgacattgacttcagcaaaagcacggggctgtaaattaccatttactagattagccaaatagtctgaatttccagaaaacaaggcagaatgatcattcccagaaacatttcccagaaaatgtttcccagaaaactagacagaatgatcattcaatggatcacagtgaagcaaaggacacaactttttattgtaccccttaattgtcaacaggagttaactgatttgttgtggtgctcagacttttttatacaggtgctagtgttttatcctatgtattttaactcattagtgcataaaggcaagccccatataatgaagtctcagggtatatgaaagtagctggcttcaaaataaaatttttgagtgcatattttgtttt

SEQ ID NO: 309917 - DNA, 2796 bp, Homo sapiens
  misc_feature (1372)..(1372): n is a, c, g, or t
  misc_feature (2178)..(2178): n is a, c, g, or t
taatcaaagctcaggaggagagctgcattccactgtttcacagatgctgtgagggtgacaaagatgcagggcacccactggaaacacagacggcactctgcgaaagaggaaggggcgccaggagcttgggtgagcaaggttggaggtgattctgcccctctccccaggctttctgtattagaaaactgaagcttcaagaacagacttgcctaacaacaggaaacttgtatgtctcgaagtggcaattcacacataaggctccatgactcctgaactctcacaaatattagttggctcttttcatggttttactgaccttgctagaagtttacagcaacggaagtgcaggaacatttcacaaatctacaatctgtgagtatcacatcctgtatagctgtaaacactggaataaggaagggctgatgactttcagaagatgaaggtaagtagaaaccgttgatgggactgagaaaccagagttaaaacctctttggagcttctgaggactcagctggaaccaacgggcacagttggcaacaccatcatgacatcacaacctgttcccaatgagaccatcatagtgctcccatcaaatgtcatcaacttctcccaagcagagaaacccgaacccaccaaccaggggcaggatagcctgaagaaacatctacacgcagaaatcaaagttattgggggtaaatctaattcagaacgtgttggagaggggttgggggaagtgccaagagatgatatatgtcttgggactggacatctgtcgtgagtgtggagaccctaaaattttgctagagggactttagggtagaagccacttggagaaaactgtcccagaacttttccacaagaggttgtcttaaaaatatattttcccttattctgaatatgaggaattgattttctattgttgtctttgtatttttacaatacagtgcttttctatattttcttttacaaaagtaatggtggtaaataatgacatattgtgtgtatgtgtatatattccacaactgcatgcttaataatccaaactgactttttgcaaataatttttccctcactgcaaattagaggaaatatacaactccttttcctcttttctcctaacgtttttgagaatggaaatgatattcaccttttgtttgtctgtttctcctctcacccagaatttattaaagaagctgtattgcatgaagggaggagagaaagaagggatctatcttggattgggagggaaacacagagttttggtttctagaattgcctctgcacttatgtgatctgaggtgaggcactctgtttgactggatttcaggacctggtgggactggtttccttgcctcatgtacaatcacatggntttctatgaggctcatgtgacataaggtctagaaaactttttggtaaatgataatagagctgtgaatctctgaggtggatgtcaggaaggaaaactacctcctaagacagagcttcagttatacatgagaacatgcagtatttggtttctgtccctgtgttagtctgctaagggggatggcctctaaatgatgagaacacatggacacgtagaacagaacaatgcacactgaggcctttcagagggtggagggtgggaggagagagaggatcaggaaaaataactaatggatactaggcttaatacctgggtgatgaaataatctgtacagcaaacccccatgacacaagtttatctatgtaacagacatgcagttgtacccttgaacttaaaataaaagctaaaaataaaagagcttccagagcttcagctatagggttgtgaactgcagtttccgaggaagtgaccaaaggggcaaactccatgtccagtggagtctgggagatgaggggagggccttctgcactgccaatactgcagagaatgtgggggctttcagatgtcccctgttttcagagagatagaaagagagttaactagtcatggacttagaggtcctgagagctgggaaagtaaatctcagcacttgctgtgagctggaagcaagtctcatgagcagaccagggcctgagaggcagaaatgcagaagccttcctgagcacctgccagacacctgagactgtggcttctgtggcagagctgcacaccctccaggatgtcttttcatatttctcactccagagttnccacagggtttgtatcctcattaggatcttgcagaaggcgataatgcattagtgccatgggagcggcaaaaaggccctgtctttacaaatgctggttttcatcctcaatctcactttctcttcccacagactatccagatcttgtgtggcatgatggtattgagcttggggatcattttggcatctgcttccttctctccaaattttacccaagtgacttctacactgttgaactctgcttacccattcataggacccttttttgtgagtagagtttctgaggagggcaggatggggcaaagaggggaggaagatgccaatagcttagacttcccacctgccagcttgctatgtttgatctgccaggagcaaggagtcaacggtgaatcttgttctcctgtcgggtaggatgacaggggttgcttgattttagatcaatttcttatcagactcaaataaacatttcttttgaagatcatcttattcttcacattatcatcttgagctatgatgaagctagtgacttctctccaggtttaggcgaaaaaaaaatccatgaattaggataaagttgggaaggaacattttatacaaaaaaaaaaagagcataaatggaag

SEQ ID NO: 309918 - DNA, 1840 bp, Homo sapiens
taatcaaagctcaggaggagagctgcattccactgtttcacagatgctgtgagggtgacaaagatgcagggcacccactggaaacacagacggcactctgcgaaagaggaaggggcgccaggagcttgggtgagcaaggttggaggtgattctgcccctctccccaggctttctgtattagaaaactgaagcttcaagaacagacttgcctaacaacaggaaacttgtatgtctcgaagtggcaattcacacataaggctccatgactcctgaactctcacaaatattagttggctcttttcatggttttactgaccttgctagaagtttacagcaacggaagtgcaggaacatttcacaaatctacaatctgtgagtatcacatcctgtatagctgtaaacactggaataaggaagggctgatgactttcagaagatgaaggtaagtagaaaccgttgatgggactgagaaaccagagttaaaacctctttggagcttctgaggactcagctggaaccaacgggcacagttggcaacaccatcatgacatcacaacctgttcccaatgagaccatcatagtgctcccatcaaatgtcatcaacttctcccaagcagagaaacccgaacccaccaaccaggggcaggatagcctgaagaaacatctacacgcagaaatcaaagttattgggactatccagatcttgtgtggcatgatggtattgagcttggggatcattttggcatctgcttccttctctccaaattttacccaagtgacttctacactgttgaactctgcttacccattcataggaccctttttttttatcatctctggctctctatcaatcgccacagagaaaaggttaaccaagcttttggggttgatgttggagattatgtgagagaatgtcataccatgcaattgcaccgagactcaatttggaagctctggctacaaaaatctcccaaagccagcaaggaagtgagaaacggcatccagaaaaatgccaattctttttctcatcggtatttagagattattatttggaaccctcagttagactcggaactactaactagatctgtgctgtttaatttaactttctttgaggatggaaatgaaatgtaactttctatgatgatagaaatgaaatgtaactttctatgatgatggaaatgcactacagctgtactgtacaatatggcagtcacatgtggctatcgatgatgtgaaatatagtgcaactgaataaaaatttctcttaattttactttaaatatagatagtctatgtggctattggcaaccatactgagtagcctggcacaagggtagtgctttcaaacttttaggaggaaatatatgggcctgttactccagagaacaatcccacagtgaacatgcaggaagctcaaggatgcaggatgtggtctcggggtgggctcagacttaccagagacatcgaggctttagcgagttctactcttgtcacacattgcaccagccctttttgagattgaagaagagtgccatctcaagacaaatctagcttattctaagaaatatagactctaggcatcaagaatactactggctactaggaggcccaggagtgtacacttcagtcattatgttgggaaattggggtcccagagcatcaactggtgagttcctaaaagaagaagtgcccatgtgggattaagtaacattctactgtatggctgtgaggtgtgccctggagcctacctacctgtaactatagctctcagagtactcttagctcaattctcttttctgtgtgagttggagtacaaaagaagtcacttctgaggtta

SEQ ID NO: 309919 - DNA, 1780 bp, Homo sapiens
taatcaaagctcaggaggagagctgcattccactgtttcacagatgctgtgagggtgacaaagatgcagggcacccactggaaacacagacggcactctgcgaaagaggaaggggcgccaggagcttgggtgagcaaggttggaggtgattctgcccctctccccaggctttctgtattagaaaactgaagcttcaagaacagacttgcctaacaacaggaaacttgtatgtctcgaagtggcaattcacacataaggctccatgactcctgaactctcacaaatattagttggctcttttcatggttttactgaccttgctagaagtttacagcaacggaagtgcaggaacatttcacaaatctacaatctgtgagtatcacatcctgtatagctgtaaacactggaataaggaagggctgatgactttcagaagatgaaggtaagtagaaaccgttgatgggactgagaaaccagagttaaaacctctttggagcttctgaggactcagctggaaccaacgggcacagttggcaacaccatcatgacatcacaacctgttcccaatgagaccatcatagtgctcccatcaaatgtcatcaacttctcccaagcagagaaacccgaacccaccaaccaggggcaggatagcctgaagaaacatctacacgcagaaatcaaagttattgggactatccagatcttgtgtggcatgatggtattgagcttggggatcattttggcatctgcttccttctctccaaattttacccaagtgacttctacactgttgaactctgcttacccattcataggaccctttttttttatcatctctggctctctatcaatcgccacagagaaaaggttaaccaagcttttggggttgatgttggagattatgtgagagaatgtcataccatgcaattgcaccgagactcaatttggaagctctggctacaaaaatctcccaaagccagcaaggaagtgagaaacggcatccagaactcggaactactaactagatctgtgctgtttaatttaactttctttgaggatggaaatgaaatgtaactttctatgatgatagaaatgaaatgtaactttctatgatgatggaaatgcactacagctgtactgtacaatatggcagtcacatgtggctatcgatgatgtgaaatatagtgcaactgaataaaaatttctcttaattttactttaaatatagatagtctatgtggctattggcaaccatactgagtagcctggcacaagggtagtgctttcaaacttttaggaggaaatatatgggcctgttactccagagaacaatcccacagtgaacatgcaggaagctcaaggatgcaggatgtggtctcggggtgggctcagacttaccagagacatcgaggctttagcgagttctactcttgtcacacattgcaccagccctttttgagattgaagaagagtgccatctcaagacaaatctagcttattctaagaaatatagactctaggcatcaagaatactactggctactaggaggcccaggagtgtacacttcagtcattatgttgggaaattggggtcccagagcatcaactggtgagttcctaaaagaagaagtgcccatgtgggattaagtaacattctactgtatggctgtgaggtgtgccctggagcctacctacctgtaactatagctctcagagtactcttagctcaattctcttttctgtgtgagttggagtacaaaagaagtcacttctgaggtta

SEQ ID NO: 309920 - DNA, 2333 bp, Homo sapiens
taatcaaagctcaggaggagagctgcattccactgtttcacagatgctgtgagggtgacaaagatgcagggcacccactggaaacacagacggcactctgcgaaagaggaaggggcgccaggagcttgggtgagcaaggttggaggtgattctgcccctctccccaggctttctgtattagaaaactgaagcttcaagaacagacttgcctaacaacaggaaacttgtatgtctcgaagtggcaattcacacataaggctccatgactcctgaactctcacaaatattagttggctcttttcatggttttactgaccttgctagaagtttacagcaacggaagtgcaggaacatttcacaaatctacaatctgtgagtatcacatcctgtatagctgtaaacactggaataaggaagggctgatgactttcagaagatgaaggtaagtagaaaccgttgatgggactgagaaaccagagttaaaacctctttggagcttctgaggactcagctggaaccaacgggcacagttggcaacaccatcatgacatcacaacctgttcccaatgagaccatcatagtgctcccatcaaatgtcatcaacttctcccaagcagagaaacccgaacccaccaaccaggggcaggatagcctgaagaaacatctacacgcagaaatcaaagttattggggtgcatagcagcctggttggaagcattctgagtgctctgtctgccctggtgggtttcattatcctgtctgtcaaacaggccaccttaaatcctgcctcactgcagtgtggaactctctctctgatgctgatttgcactctgctggaattctgcctagctgtgctcactgctgtgctgcggtggaaacaggcttactctgacttccctggggtgagtgtgctggccggcttcacttaaccttgcctagtgtatcttatccctgcactgtgttgagtatgtcaccaagagtggtagaaggaacaaccagccaatcacgagatacacatgggagggcatttgcattgtgatggaagacagagaagaaaagcagatggcaattgagtagctgataagctgaaaattcactggatatgaaaatagttaatcatgagaaatcaactgattcaatcttcctattttgtcagcgaagggaatgagactctgggaagttaaatgactggcctggcattatgctatgagtttgtgcctttgctgaggacactagaacctggcttgcctcccttataagcagaaacaatttctgccacaaccactagtctctttaatagtattgacttggtaaagggcatttacacacgtaactggatccagtgaatgtcttatgctctgcatttgcccctggtgatcttaaaattcgtttgcctttttaaagctatattaaaaatgtattgttgaatcaaacccctatggacttatggctttatttaactgaattaaaaagccttgatttatccaaaattgtattatagagtgtagaatgaatactagggtgataaattgcaattatttgaagaacctggtgatatgctctacttatcttggattagctaagaattctatgtatacagttggaaaaatggcatatatacatctatcttgaacctgattgaagtctgaagacctaacatattttgtttcttctagagtgtacttttcctgcctcacagttacattggtaattctggcatgtcctcaaaaatgactcatgactgtggatatgaagaactattgacttcttaagaaaaaagggagaaatattaatcagaaagttgattcttatgataatatggaaaagttaaccattatagaaaagcaaagcttgagtttcctaaatgtaagcttttaaagtaatgaacattaaaaaaaaccattatttcactgtcaaaaaagatatgtgttcattggggatctcttgatttgcctgacattgacttcagcaaaagcacggggctgtaaattaccatttactagattagccaaatagtctgaatttccagaaaacaaggcagaatgatcattcccagaaacatttcccagaaaatgtttcccagaaaactagacagaatgatcattcaatggatcacagtgaagcaaaggacacaactttttattgtaccccttaattgtcaacaggagttaactgatttgttgtggtgctcagacttttttatacaggtgctagtgttttatcctatgtattttaactcattagtgcataaaggcaagccccatataatgaagtctcagggtatatgaaagtagctggcttcaaaataaaatttttgagtgcatattttgtttt

SEQ ID NO: 309921 - DNA, 2056 bp, Homo sapiens
taatcaaagctcaggaggagagctgcattccactgtttcacagatgctgtgagggtgacaaagatgcagggcacccactggaaacacagacggcactctgcgaaagaggaaggggcgccaggagcttgggtgagcaaggttggaggtgattctgcccctctccccaggctttctgtattagaaaactgaagcttcaagaacagacttgcctaacaacaggaaacttgtatgtctcgaagtggcaattcacacataaggctccatgactcctgaactctcacaaatattagttggctcttttcatggttttactgaccttgctagaagtttacagcaacggaagtgcaggaacatttcacaaatctacaatctgtgagtatcacatcctgtatagctgtaaacactggaataaggaagggctgatgactttcagaagatgaaggtaagtagaaaccgttgatgggactgagaaaccagagttaaaacctctttggagcttctgaggactcagctggaaccaacgggcacagttggcaacaccatcatgacatcacaacctgttcccaatgagaccatcatagtgctcccatcaaatgtcatcaacttctcccaagcagagaaacccgaacccaccaaccaggggcaggatagcctgaagaaacatctacacgcagaaatcaaagttattgggactatccagatcttgtgtggcatgatggtattgagcttggggatcattttggcatctgcttccttctctccaaattttacccaagtgacttctacactgttgaactctgcttacccattcataggacccttttttgtgagtagagtttctgaggagggcaggatggggcaaagaggggaggaagatgccaatagcttagacttcccacctgccagcttgctatgtttgatctgccaggagcaaggagtcaacggtgaatcttgttctcctgtcgggtaggatgacaggggttgcttgattttagatcaatttcttatcagactcaaataaacatttcttttgaagatcatcttattcttcacattatcatcttgagctatgatgaagctagtgacttctctccaggtttaggcgaaaaaaaaatccatgaattaggataaagttgggaaggaacattttatacaaaaaaaaaaagagcataaatggaagacatcacacactcacagagaaaccacactgttatcccccccatgcttgtggggatcatggaggaaggagaacttacacctctgagcattttgaaaatacttttactgcattgactgattcccaggtaaggctgagcagatatctatgcccagtgattgacaggaaattcctctgaaatagctgcaagtctggagtttcttctcataggtaagtttccctttcatagatgttttttccttcaacttcctgcaattcagtagctatttgtttttcttacatttgtgtatttgatgcaccaagaagtccacctttttgtgtatcttgtccatttttcttgtcttattaactaaagttacacttggatttggatttcattggttttccccaaatgacctttttctgttccaagatccatgccaagctactactttacactacattacattttgtcatgatgtctcctcagggtcctctaggctgtctaagattttccttttccttgagaactttgatagttttgggtagcgctggctgagatttttatagaatgttcctaaatttgggtttgtctgatttttttttttgatgtttaaagtatggtgatgaatttttgggtggtgatgatgaggtaaagcaccattttcatcaagtcgtatcaagggtcatgctaccaacataatgtcactgacacaattaaccttgattatgtggttggggtagtattttccagatttctcctctgtaaaattactacttttttttttaaccattgcttttatgtccttccctagagaacatcttacaccaaaactgtctcattttattaaaaaaacaaaaattatttcctggcttttaaggtctttttttgtttagtgg

SEQ ID NO: 309922 - DNA, 2110 bp, Homo sapiens
taatcaaagctcaggaggagagctgcattccactgtttcacagatgctgtgagggtgacaaagatgcagggcacccactggaaacacagacggcactctgcgaaagaggaaggggcgccaggagcttgggtgagcaaggttggaggtgattctgcccctctccccaggctttctgtattagaaaactgaagcttcaagaacagacttgcctaacaacaggaaacttgtatgtctcgaagtggcaattcacacataaggctccatgactcctgaactctcacaaatattagttggctcttttcatggttttactgaccttgctagaagtttacagcaacggaagtgcaggaacatttcacaaatctacaatctgtgagtatcacatcctgtatagctgtaaacactggaataaggaagggctgatgactttcagaagatgaaggtaagtagaaaccgttgatgggactgagaaaccagagttaaaacctctttggagcttctgaggactcagctggaaccaacgggcacagttggcaacaccatcatgacatcacaacctgttcccaatgagaccatcatagtgctcccatcaaatgtcatcaacttctcccaagcagagaaacccgaacccaccaaccaggggcaggatagcctgaagaaacatctacacgcagaaatcaaagttattgggactatccagatcttgtgtggcatgatggtattgagcttggggatcattttggcatctgcttccttctctccaaattttacccaagtgacttctacactgttgaactctgcttacccattcataggacccttttttgtgagtagagtttctgaggagggcaggatggggcaaagaggggaggaagatgccaatagcttagacttcccacctgccagcttgctatgtttgatctgccaggagcaaggagtcaacggtgaatcttgttctcctgtcgggtaggatgacaggggttgcttgattttagatcaatttcttatcagactcaaataaacatttcttttgaagatcatcttattcttcacattatcatcttgagctatgatgaagctagtgacttctctccaggtttaggcgaaaaaaaaatccatgaattaggataaagttgggaaggaacattttatacaaaaaaaaaaagagcataaatggaagacatcacacactcacagagaaaccacactgttatcccccccatgcttgtggggatcatggaggaaggagaacttacacctctgagcattttgaaaatacttttactgcattgactgattcccaggtaaggctgagcagatatctatgcccagtgattgacaggaaattcctctgaaatagctgcaagtctggagtttcaaaaggacttagtagtcctttcctcagagaactgctttctctaagatgggggctttctcataggtaagtttccctttcatagatgttttttccttcaacttcctgcaattcagtagctatttgtttttcttacatttgtgtatttgatgcaccaagaagtccacctttttgtgtatcttgtccatttttcttgtcttattaactaaagttacacttggatttggatttcattggttttccccaaatgacctttttctgttccaagatccatgccaagctactactttacactacattacattttgtcatgatgtctcctcagggtcctctaggctgtctaagattttccttttccttgagaactttgatagttttgggtagcgctggctgagatttttatagaatgttcctaaatttgggtttgtctgatttttttttttgatgtttaaagtatggtgatgaatttttgggtggtgatgatgaggtaaagcaccattttcatcaagtcgtatcaagggtcatgctaccaacataatgtcactgacacaattaaccttgattatgtggttggggtagtattttccagatttctcctctgtaaaattactacttttttttttaaccattgcttttatgtccttccctagagaacatcttacaccaaaactgtctcattttattaaaaaaacaaaaattatttcctggcttttaaggtctttttttgtttagtgg

SEQ ID NO: 309923 - DNA, 2725 bp, Homo sapiens
gtttttgctttcatttctcctgctgggagaagtggcggttcatgtgtcattccagtatctcacatactcacacggggcaggggggagggggaaacggggaactatagcaatatttaaagatgctttggaaaccaaccgtgaacacatcaacaccacgacgtctacgattacttgctattggccctcggatacatttaagagaaagagacagtcactcttttttttcttaaatgatatacatataaacagttatttttatcctattataattgtcttttgtctttatctagtactatgtggaaagggtttgcatcatagatttttcccagccttataatataccataagctcctacttccctgcccctccctaatcagtattctttcaagagttctttggtgaagccatctatctgaaactaaaatgaaccaaacccatatttcactggtggttggagaaaaccatggccaggccgattcccaagaacagagttttcttttgttttgcagaggcattcaatgtgtctagtgcttgctggccacagcagttactaccacagagccttctgggaggggccgttgtgttgaaggaggctcctgcctgagggacagcatcaggcagtgggctctgtagagtgagaaccaggtggaggccttctgtgcccagctcagagttctgcaccacgccaggactgcccaggccaagggctactgacgcaagttccactcattccactctgtggggggcgccttgggcctctcctggaagggctcttggagaaggaattggagttacgtacaagtgacctaaatgggaagcttttctagatgagattggattaaattccatgtgatttctctttccctttaatccaggttgggactcgtttctttctggtggatcacagctgcccagatgttgcaattgatttttatgtttctgtagagaagtatttttctttcatcttcaggattttttttgccaccaaaagaaaacattggaactctgtgtttcctcttgattgtgacttcccagtgttgacagttaagtccttagtgtcgtaggtcccagcccaccaatactatatcaaacactgttatgcacataatgcagcactgtgatctaatttaaataatacttttttattatttatactactatatataatatacatcaacacttttgctatataacctaagtgataaccctcttttagttacctgccaaactctggacttggtttatattgcagttaacacagttacaaagctgtaatggtgtctttttttcctttgtaacggaatgtgtaaatcaaagtatatacattgtgtggtgttcctgtttctggagtttcatgaggatttacacatggcattcagtgttctgtatagatctgcctacctttgtgaattcatctgttaacccctcttcctttgagagagcaccggcgatggtggttaactccttgtgttttctctctctcctactggttattcttgaattaagcacagactcgtcagctcggttgctttatcatgaataatgtgtgtgaccttgcagttcttccacagttcagcaaacaagtgctagcttcactgaccaaaaattaaggaaggaaaacacagtttttaaaacgatccatcttttaacagccgaaaccgatgtgtctatggtgctgcaccttgctgttgtacttctgaaatcagacgtgtgtgaacgatcatttctgacttaaccgtgagatgctcacgagtacccttcctgttgttttgttagcattgaaatcgagactatttatttggaatatatacaacagtgtttttccactgtatttcatttgcaaaagttgagaactgctttctctaccttttgcaaaataattgatattccatattggattctcaaagacttcgatatggtgaacctattaaacctagaaattgtattcatcctttcatgactgtggcctgagttccccagcccctctcctccttttttttagatgagatttagcacactctcagttatttaaacatgcaacatttcttgagtatgtatgttgaggccatctgagctcatagctgattcagtaaccagtttcatgctgtgtcattcacactcactacttaatactgccatggtgaaaatgtggaggaaaaatgtatccatgtgtgtctgggaagcatatacacttgtacattttttaatactctgattctgtaacatttctgagttttgttttgttttacagaaaaaaaaaaaaagtgataaagcaatcagaagaccaagaggtttactattgatgcttagggtcgtctgaccttggctggccaatagacctacacggccaaattaatttacgagagtaataatttttcaaaagccaattttttttctgtattttctgtatgaaactgccaatatcatgaatagaaagggagaaccataaaggagaaagaacgtgatgttctgttatgttcatgtaaacctaaagaaacagtgtggaggcaggcgcgatcagccgaactctagggacttggtgttgcttggaaggcatccatacctgcattttgcattcttcgtatgtaatcatattgccaaagacaaactatttcatcatttattgtaaataacacttttccccagacctaccataaagtttctgtgatgtattgtcttccagttgcaataaaaattactgagttgcatcaattgaagaaaaaca

SEQ ID NO: 309924 - DNA, 2725 bp, Homo sapiens
gtttttgctttcatttctcctgctgggagaagtggcggttcatgtgtcattccagtatctcacatactcacacggggcaggggggagggggaaacggggaactatagcaatatttaaagatgctttggaaaccaaccgtgaacacatcaacaccacgacgtctacgattacttgctattggccctcggatacatttaagagaaagagacagtcactcttttttttcttaaatgatatacatataaacagttatttttatcctattataattgtcttttgtctttatctagtactatgtggaaagggtttgcatcatagatttttcccagccttataatataccataagctcctacttccctgcccctccctaatcagtattctttcaagagttctttggtgaagccatctatctgaaactaaaatgaaccaaacccatatttcactggtggttggagaaaaccatggccaaaacgattgtggcaggtctcaatcttgggagtttttaagaaggaatgtgccagaggccgattcccaagaacagagttttcttttgttttgcagaggcattcaatgtgtctagtgcttgctggccacagcagttactaccacagagccttctgggaggggccgttgtgttgaaggaggctcctgcctgagggacagcatcaggcagtgggctctgtagagtgagaaccaggtggaggccttctgtgcccagctcagagttctgcaccacgccaggactgcccaggccaagggctactgacgcaagttccactcattccactctgtggggggcgccttgggcctctcctggaagggctcttggagaaggaattggagttacgtacaagtgacctaaatgggaagcttttctagatgagattggattaaattccatgtgatttctctttccctttaatccaggttgggactcgtttctttctggtggatcacagctgcccagatgttgcaattgatttttatgtttctgtagagaagtatttttctttcatcttcaggattttttttgccaccaaaagaaaacattggaactctgtgtttcctcttgattgtgacttcccagtgttgacagttaagtccttagtgtcgtaggtcccagcccaccaatactatatcaaacactgttatgcacataatgcagcactgtgatctaatttaaataatacttttttattatttatactactatatataatatacatcaacacttttgctatataacctaagtgataaccctcttttagttacctgccaaactctggacttggtttatattgcagttaacacagttacaaagctgtaatggtgtctttttttcctttgtaacggaatgtgtaaatcaaagtatatacattgtgtggtgttcctgtttctggagtttcatgaggatttacacatggcattcagtgttctgtatagatctgcctacctttgtgaattcatctgttaacccctcttcctttgagagagcaccggcgatggtggttaactccttgtgttttctctctctcctactggttattcttgaattaagcacagactcgtcagctcggttgctttatcatgaataatgtgtgtgaccttgcagttcttccacagttcagcaaacaagtgctagcttcactgaccaaaaattaaggaaggaaaacacagtttttaaaacgatccatcttttaacagccgaaaccgatgtgtctatggtgctgcaccttgctgttgtacttctgaaatcagacgtgtgtgaacgatcatttctgacttaaccgtgagatgctcacgagtacccttcctgttgttttgttagcattgaaatcgagactatttatttggaatatatacaacagtgtttttccactgtatttcatttgcaaaagttgagaactgctttctctaccttttgcaaaataattgatattccatattggattctcaaagacttcgatatggtgaacctattaaacctagaaattgtattcatcctttcatgactgtggcctgagttccccagcccctctcctccttttttttagatgagatttagcacactctcagttatttaaacatgcaacatttcttgagtatgtatgttgaggccatctgagctcatagctgattcagtaaccagtttcatgctgtgtcattcacactcactacttaatactgccatggtgaaaatgtggaggaaaaatgtatccatgtgtgtctgggaagcatatacacttgtacattttttaatactctgattctgtaacatttctgagttttgttttgttttacagaaaaaaaaaaaaagtgataaagcaatcagaagaccaagaggtttactattgatgcttagggtcgtctgaccttggctggccaatagacctacacggccaaattaatttacgagagtaataatttttcaaaagggagaaccataaaggagaaagaacgtgatgttctgttatgttcatgtaaacctaaagaaacagtgtggaggcaggcgcgatcagccgaactctagggacttggtgttgcttggaaggcatccatacctgcattttgcattcttcgtatgtaatcatattgccaaagacaaactatttcatcatttattgtaaataacacttttccccagacctaccataaagtttctgtgatgtattgtcttccagttgcaataaaaattactgagttgcatcaattgaagaaaaaca

SEQ ID NO: 309925 - DNA, 2764 bp, Homo sapiens
gtttttgctttcatttctcctgctgggagaagtggcggttcatgtgtcattccagtatctcacatactcacacggggcaggggggagggggaaacggggaactatagcaatatttaaagatgctttggaaaccaaccgtgaacacatcaacaccacgacgtctacgattacttgctattggccctcggatacatttaagagaaagagacagtcactcttttttttcttaaatgatatacatataaacagttatttttatcctattataattgtcttttgtctttatctagtactatgtggaaagggtttgcatcatagatttttcccagccttataatataccataagctcctacttccctgcccctccctaatcagtattctttcaagagttctttggtgaagccatctatctgaaactaaaatgaaccaaacccatatttcactggtggttggagaaaaccatggccaaaacgattgtggcaggtctcaatcttgggagtttttaagaaggaatgtgccagaggccgattcccaagaacagagttttcttttgttttgcagaggcattcaatgtgtctagtgcttgctggccacagcagttactaccacagagccttctgggaggggccgttgtgttgaaggaggctcctgcctgagggacagcatcaggcagtgggctctgtagagtgagaaccaggtggaggccttctgtgcccagctcagagttctgcaccacgccaggactgcccaggccaagggctactgacgcaagttccactcattccactctgtggggggcgccttgggcctctcctggaagggctcttggagaaggaattggagttacgtacaagtgacctaaatgggaagcttttctagatgagattggattaaattccatgtgatttctctttccctttaatccaggttgggactcgtttctttctggtggatcacagctgcccagatgttgcaattgatttttatgtttctgtagagaagtatttttctttcatcttcaggattttttttgccaccaaaagaaaacattggaactctgtgtttcctcttgattgtgacttcccagtgttgacagttaagtccttagtgtcgtaggtcccagcccaccaatactatatcaaacactgttatgcacataatgcagcactgtgatctaatttaaataatacttttttattatttatactactatatataatatacatcaacacttttgctatataacctaagtgataaccctcttttagttacctgccaaactctggacttggtttatattgcagttaacacagttacaaagctgtaatggtgtctttttttcctttgtaacggaatgtgtaaatcaaagtatatacattgtgtggtgttcctgtttctggagtttcatgaggatttacacatggcattcagtgttctgtatagatctgcctacctttgtgaattcatctgttaacccctcttcctttgagagagcaccggcgatggtggttaactccttgtgttttctctctctcctactggttattcttgaattaagcacagactcgtcagctcggttgctttatcatgaataatgtgtgtgaccttgcagttcttccacagttcagcaaacaagtgctagcttcactgaccaaaaattaaggaaggaaaacacagtttttaaaacgatccatcttttaacagccgaaaccgatgtgtctatggtgctgcaccttgctgttgtacttctgaaatcagacgtgtgtgaacgatcatttctgacttaaccgtgagatgctcacgagtacccttcctgttgttttgttagcattgaaatcgagactatttatttggaatatatacaacagtgtttttccactgtatttcatttgcaaaagttgagaactgctttctctaccttttgcaaaataattgatattccatattggattctcaaagacttcgatatggtgaacctattaaacctagaaattgtattcatcctttcatgactgtggcctgagttccccagcccctctcctccttttttttagatgagatttagcacactctcagttatttaaacatgcaacatttcttgagtatgtatgttgaggccatctgagctcatagctgattcagtaaccagtttcatgctgtgtcattcacactcactacttaatactgccatggtgaaaatgtggaggaaaaatgtatccatgtgtgtctgggaagcatatacacttgtacattttttaatactctgattctgtaacatttctgagttttgttttgttttacagaaaaaaaaaaaaagtgataaagcaatcagaagaccaagaggtttactattgatgcttagggtcgtctgaccttggctggccaatagacctacacggccaaattaatttacgagagtaataatttttcaaaagccaattttttttctgtattttctgtatgaaactgccaatatcatgaatagaaagggagaaccataaaggagaaagaacgtgatgttctgttatgttcatgtaaacctaaagaaacagtgtggaggcaggcgcgatcagccgaactctagggacttggtgttgcttggaaggcatccatacctgcattttgcattcttcgtatgtaatcatattgccaaagacaaactatttcatcatttattgtaaataacacttttccccagacctacctgggttaggtctacctgggttaggtctaccaggtctacctgggttaggtctacctgg

SEQ ID NO: 309926 - DNA, 1016 bp, Homo sapiens
gcaggtgtttaaggtttaaccttcttcagggacaaattctgactgttggggaacttactctgcaatataaaaatatcttcatgctctggtagggcttggatggttgaactctgtactgccttgtgtgcacttcagccccgaccccctctgattctctgttgaaaagtgtgtcctttctctctgtctgtacatgtttaacatgacgcaataatttgagggcaaacttagtagtgagtgtgtatgatagaatcaagagaattatgggacgcttacttgagaaaatcattaccatgatttggttctaggaaaaaggcattatttaaacatgcaacatttcttgagtatgtatgttgaggccatctgagctcatagctgattcagtaaccagtttcatgctgtgtcattcacactcactacttaatactgccatggtgaaaatgtggaggaaaaatgtatccatgtgtgtctgggaagcatatacacttgtacattttttaatactctgattctgtaacatttctgagttttgttttgttttacagaaaaaaaaaaaaagtgataaagcaatcagaagaccaagaggtttactattgatgcttagggtcgtctgaccttggctggccaatagacctacacggccaaattaatttacgagagtaataatttttcaaaagccaattttttttctgtattttctgtatgaaactgccaatatcatgaatagaaagggagaaccataaaggagaaagaacgtgatgttctgttatgttcatgtaaacctaaagaaacagtgtggaggcaggcgcgatcagccgaactctagggacttggtgttgcttggaaggcatccatacctgcattttgcattcttcgtatgtaatcatattgccaaagacaaactatttcatcatttattgtaaataacacttttccccagacctaccataaagtttctgtgatgtattgtcttccagttgcaataaaaattactgagttgcatcaattgaagaaaaaca

SEQ ID NO: 309927 - DNA, 2779 bp, Homo sapiens
gtttttgctttcatttctcctgctgggagaagtggcggttcatgtgtcattccagtatctcacatactcacacggggcaggggggagggggaaacggggaactatagcaatatttaaagatgctttggaaaccaaccgtgaacacatcaacaccacgacgtctacgattacttgctattggccctcggatacatttaagagaaagagacagtcactcttttttttcttaaatgatatacatataaacagttatttttatcctattataattgtcttttgtctttatctagtactatgtggaaagggtttgcatcatagatttttcccagccttataatataccataagctcctacttccctgcccctccctaatcagtattctttcaagagttctttggtgaagccatctatctgaaactaaaatgaaccaaacccatatttcactggtggttggagaaaaccatggccaaaacgattgtggcaggtctcaatcttgggagtttttaagaaggaatgtgccagaggccgattcccaagaacagagttttcttttgttttgcagaggcattcaatgtgtctagtgcttgctggccacagcagttactaccacagagccttctgggaggggccgttgtgttgaaggaggctcctgcctgagggacagcatcaggcagtgggctctgtagagtgagaaccaggtggaggccttctgtgcccagctcagagttctgcaccacgccaggactgcccaggccaagggctactgacgcaagttccactcattccactctgtggggggcgccttgggcctctcctggaagggctcttggagaaggaattggagttacgtacaagtgacctaaatgggaagcttttctagatgagattggattaaattccatgtgatttctctttccctttaatccaggttgggactcgtttctttctggtggatcacagctgcccagatgttgcaattgatttttatgtttctgtagagaagtatttttctttcatcttcaggattttttttgccaccaaaagaaaacattggaactctgtgtttcctcttgattgtgacttcccagtgttgacagttaagtccttagtgtcgtaggtcccagcccaccaatactatatcaaacactgttatgcacataatgcagcactgtgatctaatttaaataatacttttttattatttatactactatatataatatacatcaacacttttgctatataacctaagtgataaccctcttttagttacctgccaaactctggacttggtttatattgcagttaacacagttacaaagctgtaatggtgtctttttttcctttgtaacggaatgtgtaaatcaaagtatatacattgtgtggtgttcctgtttctggagtttcatgaggatttacacatggcattcagtgttctgtatagatctgcctacctttgtgaattcatctgttaacccctcttcctttgagagagcaccggcgatggtggttaactccttgtgttttctctctctcctactggttattcttgaattaagcacagactcgtcagctcggttgctttatcatgaataatgtgtgtgaccttgcagttcttccacagttcagcaaacaagtgctagcttcactgaccaaaaattaaggaaggaaaacacagtttttaaaacgatccatcttttaacagccgaaaccgatgtgtctatggtgctgcaccttgctgttgtacttctgaaatcagacgtgtgtgaacgatcatttctgacttaaccgtgagatgctcacgagtacccttcctgttgttttgttagcattgaaatcgagactatttatttggaatatatacaacagtgtttttccactgtatttcatttgcaaaagttgagaactgctttctctaccttttgcaaaataattgatattccatattggattctcaaagacttcgatatggtgaacctattaaacctagaaattgtattcatcctttcatgactgtggcctgagttccccagcccctctcctccttttttttagatgagatttagcacactctcagttatttaaacatgcaacatttcttgagtatgtatgttgaggccatctgagctcatagctgattcagtaaccagtttcatgctgtgtcattcacactcactacttaatactgccatggtgaaaatgtggaggaaaaatgtatccatgtgtgtctgggaagcatatacacttgtacattttttaatactctgattctgtaacatttctgagttttgttttgttttacagaaaaaaaaaaaaagtgataaagcaatcagaagaccaagaggtttactattgatgcttagggtcgtctgaccttggctggccaatagacctacacggccaaattaatttacgagagtaataatttttcaaaagccaattttttttctgtattttctgtatgaaactgccaatatcatgaatagaaagggagaaccataaaggagaaagaacgtgatgttctgttatgttcatgtaaacctaaagaaacagtgtggaggcaggcgcgatcagccgaactctagggacttggtgttgcttggaaggcatccatacctgcattttgcattcttcgtatgtaatcatattgccaaagacaaactatttcatcatttattgtaaataacacttttccccagacctaccataaagtttctgtgatgtattgtcttccagttgcaataaaaattactgagttgcatcaattgaagaaaaaca

SEQ ID NO: 309928 - DNA, 2202 bp, Homo sapiens
gtttttgctttcatttctcctgctgggagaagtggcggttcatgtgtcattccagtatctcacatactcacacggggcaggggggagggggaaacggggaactatagcaatatttaaagatgctttggaaaccaaccgtgaacacatcaacaccacgacgtctacgattacttgctattggccctcggatacatttaagagaaagagacagtcactcttttttttcttaaatgatatacatataaacagttatttttatcctattataattgtcttttgtctttatctagtactatgtggaaagggtttgcatcatagatttttcccagccttataatataccataagctcctacttccctgcccctccctaatcagtattctttcaagagttctttggtgaagccatctatctgaaactaaaatgaaccaaacccatatttcactggtggttggagaaaaccatggccaaaacgattgtggcaggtctcaatcttgggagtttttaagaaggaatgtgccagaggccgattcccaagaacagagttttcttttgttttgcagaggcattcaatgtgtctagtgcttgctggccacagcagttactaccacagagccttctgggaggggccgttgtgttgaaggaggctcctgcctgagggacagcatcaggcagtgggctctgtagagtgagaaccaggtggaggccttctgtgcccagctcagagttctgcaccacgccaggactgcccaggccaagggctactgacgcaagttccactcattccactctgtggggggcgccttgggcctctcctggaagggctcttggagaaggaattggagttacgtacaagtgacctaaatgggaagcttttctagatgagattggattaaattccatgtgatttctctttccctttaatccaggttgggactcgtttctttctggtggatcacagctgcccagatgttgcaattgatttttatgtttctgtagagaagtatttttctttcatcttcaggattttttttgccaccaaaagaaaacattggaactctgtgtttcctcttgattgtgacttcccagtgttgacagttaagtccttagtgtcgtaggtcccagcccaccaatactatatcaaacactgttatgcaccttgctgttgtacttctgaaatcagacgtgtgtgaacgatcatttctgacttaaccgtgagatgctcacgagtacccttcctgttgttttgttagcattgaaatcgagactatttatttggaatatatacaacagtgtttttccactgtatttcatttgcaaaagttgagaactgctttctctaccttttgcaaaataattgatattccatattggattctcaaagacttcgatatggtgaacctattaaacctagaaattgtattcatcctttcatgactgtggcctgagttccccagcccctctcctccttttttttagatgagatttagcacactctcagttatttaaacatgcaacatttcttgagtatgtatgttgaggccatctgagctcatagctgattcagtaaccagtttcatgctgtgtcattcacactcactacttaatactgccatggtgaaaatgtggaggaaaaatgtatccatgtgtgtctgggaagcatatacacttgtacattttttaatactctgattctgtaacatttctgagttttgttttgttttacagaaaaaaaaaaaaagtgataaagcaatcagaagaccaagaggtttactattgatgcttagggtcgtctgaccttggctggccaatagacctacacggccaaattaatttacgagagtaataatttttcaaaagccaattttttttctgtattttctgtatgaaactgccaatatcatgaatagaaagggagaaccataaaggagaaagaacgtgatgttctgttatgttcatgtaaacctaaagaaacagtgtggaggcaggcgcgatcagccgaactctagggacttggtgttgcttggaaggcatccatacctgcattttgcattcttcgtatgtaatcatattgccaaagacaaactatttcatcatttattgtaaataacacttttccccagacctaccataaagtttctgtgatgtattgtcttccagttgcaataaaaattactgagttgcatcaattgaagaaaaaca

SEQ ID NO: 309929 - DNA, 3089 bp, Homo sapiens
gtttttgctttcatttctcctgctgggagaagtggcggttcatgtgtcattccagtatctcacatactcacacggggcaggggggagggggaaacggggaactatagcaatatttaaagatgctttggaaaccaaccgtgaacacatcaacaccacgacgtctacgattacttgctattggccctcggatacatttaagagaaagagacagtcactcttttttttcttaaatgatatacatataaacagttatttttatcctattataattgtcttttgtctttatctagtactatgtggaaagggtttgcatcatagatttttcccagccttataatataccataagctcctacttccctgcccctccctaatcagtattctttcaagagttctttggtgaagccatctatctgaaactaaaatgaaccaaacccatatttcactggtggttggagaaaaccatggccaaaacgattgtggcaggtctcaatcttgggagtttttaagaaggaatgtgccagaggccgattcccaagaacagagttttcttttgttttgcagaggcattcaatgtgtctagtgcttgctggccacagcagttactaccacagagccttctgggaggggccgttgtgttgaaggaggctcctgcctgagggacagcatcaggcagtgggctctgtagagtgagaaccaggtggaggccttctgtgcccagctcagagttctgcaccacgccaggactgcccaggccaagggctactgacgcaagttccactcattccactctgtggggggcgccttgggcctctcctggaagggctcttggagaaggaattggagttacgtacaagtgacctaaatgggaagcttttctagatgagattggattaaattccatgtgatttctctttccctttaatccaggttgggactcgtttctttctggtggatcacagctgcccagatgttgcaattgatttttatgtttctgtagagaagtatttttctttcatcttcaggattttttttgccaccaaaagaaaacattggaactctgtgtttcctcttgattgtgacttcccagtgttgacagttaagtccttagtgtcgtaggtcccagcccaccaatactatatcaaacactgttatgcacataatgcagcactgtgatctaatttaaataatacttttttattatttatactactatatataatatacatcaacacttttgctatataacctaagtgataaccctcttttagttacctgccaaactctggacttggtttatattgcagttaacacagttacaaagctgtaatggtgtctttttttcctttgtaacggaatgtgtaaatcaaagtatatacattgtgtggtgttcctgtttctggagtttcatgaggatttacacatggcattcagtgttctgtatagatctgcctacctttgtgaattcatctgttaacccctcttcctttgagagagcaccggcgatggtggttaactccttgtgttttctctctctcctactggttattcttgaattaagcacagactcgtcagctcggttgctttatcatgaataatgtgtgtgaccttgcagttcttccacagttcagcaaacaagtgctagcttcactgaccaaaaattaaggaaggaaaacacagtttttaaaacgatccatcttttaacagccgaaaccgatgtgtctatggtgctgcaccttgctgttgtacttctgaaatcagacgtgtgtgaacgatcatttctgacttaaccgtgagatgctcacgagtacccttcctgttgttttgttagcattgaaatcgagactatttatttggaatatatacaacagtgtttttccactgtatttcatttgcaaaagttgagaactgctttctctaccttttgcaaaataattgatattccatattggattctcaaagacttcgatatggtgaacctattaaacctagaaattgtattcatcctttcatgactgtggcctgagttccccagcccctctcctccttttttttagatgagatttagcacactctcagttatttaaacatgcaacatttcttgagtatgtatgttgaggccatctgagctcatagctgattcagtaaccagtttcatgctgtgtcattcacactcactacttaatactgccatggtgaaaatgtggaggaaaaatgtatccatgtgtgtctgggaagcatatacacttgtacattttttaatactctgattctgtaacatttctgagttttgttttgttttacagaaaaaaaaaaaaagtgataaagcaatcagaagaccaagaggtttactattgatgcttagggtcgtctgaccttggctggccaatagacctacacggccaaattaatttacgagagtaataatttttcaaaagccaattttttttctgtattttctgtatgaaactgccaatatcatgaatagaaagggagaaccataaaggagaaagaacgtgatgttctgttatgttcatgtaaacctaaagaaacagtgtggaggcaggcgcgatcagccgaactctagggacttggtgttgcttggaaggcatccatacctgcattttgcattcttcgtatgtaatcatattgccaaagacaaactatttcatcatttattgtaaataacacttttccccagacctaccataaagtttctgtgatgtattgtcttccagttgcaataaaaattactgagttgcatcaattgaagaaaaacaaaaaaaaaaaaaaaaaaaaaaaaaaaaaaaaaaaaaaaaaaaaaaaaaaaaaaaaaaaaaaaaaaaaaaaaaaaaaaaaaaaaaaaaaaaaaaaaaaaaaaaaaaaaaaaaaaaaaaaaaaaaaaaaaaaaaaaaaaaaaaaaaaaaaaaaaaaaaaaaaaaaaaaatgtctccccccttctgcccccaccttatttaacatccaaaaattttacttttggcccaaaaatccgcatctttttgcgaatttccccctatagggggctcataaaatttccacgcccgggtttttaaacactattgcttggga

SEQ ID NO: 309930 - DNA, 4521 bp, Homo sapiens
tcctctcccttccccgcgtccctccgcccgccctcggaagaccgagacagcggagaggttgcgggtgagctgcgctgagcccaggagccgaggagtcgggagcgcagcgcagcccgagcccgagcccgagcggccccgcgtcccgagcgcatcggagcggccgagccgcccggcgcagcgcctgtcccgggcagcgcagccccggccgcaggatctcacccaaggtggcagaaggaggccttctggagctgacccacccccgacgaccatcagggtgaggcaactccaaggtcctactctctttctgtgcctgttacccaccccgtcctcctagggtgcccttgagccgcaaaactgctgtccacgtggaccgggggtgacatcgcacgtccatctgccaggacccctgcgtccaaattccgagacatggcgaccaacggcagcaaggtggccgacgggcagatctccaccgaggtcagcgaggcccctgtggccaatgacaagcccaaaaccttggtggtcaaggtgcagaagaaggcggcagacctccccgaccgggacacgtggaagggccgcttcgacttcctcatgtcctgtgtgggctatgccatcggcctgggcaacgtctggaggttcccctatctctgcgggaaaaatggtgggggagccttcctgatcccctatttcctgacactcatctttgcgggggtcccactcttcctgctggagtgctccctgggccagtacacctccatcggggggctaggggtatggaagctggctcctatgttcaagggcgtgggccttgcggctgctgtgctatcattctggctgaacatctactacatcgtcatcatctcctgggccatttactacctgtacaactccttcaccacgacactgccgtggaaacagtgcgacaacccctggaacacagaccgctgcttctccaactacagcatggtcaacactaccaacatgaccagcgctgtggtggagttctgggagcgcaacatgcatcagatgacggacgggctggataagccaggtcagatccgctggccactggccatcacgctggccatcgcctggatccttgtgtatttctgtatctggaagggtgttggctggactggaaaggtggtctacttttcagccacatacccctacatcatgctgatcatcctgttcttccgtggagtgacgctgcccggggccaaggagggcatcctcttctacatcacacccaacttccgcaagctgtctgactccgaggtgtggctggatgcggcaacccagatcttcttctcatacgggctgggcctggggtccctgatcgctctcgggagctacaactctttccacaacaatgtctacagggactccatcatcgtctgctgcatcaattcgtgcaccagcatgttcgcaggattcgtcatcttctccatcgtgggcttcatggcccatgtcaccaagaggtccattgctgatgtggcggcctcaggccccgggctggcgttcctggcatacccagaggcggtgacccagctgcctatctccccactctgggccatcctcttcttctccatgctgttgatgctgggcattgacagccagttctgcactgtggagggcttcatcacagccctggtggatgagtaccccaggctcctccgcaaccgcagagagctcttcattgctgctgtctgcatcatctcctacctgatcggtctctctaacatcactcaggggggtatttatgtcttcaaactctttgactactactctgccagtggcatgagcctgctgttcctcgtgttctttgaatgtgtctctatttcctggttttacggtgtcaaccgattctatgacaatatccaagagatggttggatccaggccctgcatctggtggaaactctgctggtctttcttcacaccaatcattgtggcgggcgtgttcattttcagtgctgtgcagatgacgccactcaccatgggaaactatgttttccccaagtggggccagggtgtgggctggctgatggctctgtcttccatggtcctcatccccgggtacatggcctacatgttcctcaccttaaagggctccctgaagcagcgcatccaagtcatggtccagcccagcgaagacatcgttcgcccagagaatggtcctgagcagcccaggcgggcagctccaccagcaaggaggcctacatctagggtgggggccactcaccgacccgacactctcaccccccgacctggctgagtgcgaccaccacttgatgtctgaggataccttccatctcaacctacctcgagtggcgagtccagacaccatcaccacgcagagaggggaggtgggaggacagttagacccctgggtgggccctgccgtgggcaaggatacccggtggcttctggcacctggcgggctggtgacctttttaatccaggccccatcagcatcccacgatcggccttggtaaccgccgcggtagatcatttttatcccgccagggagtgtgatgcaggaagaccacatgcgctcctggcttttaaacctgttcctgactgttctcttactgccgaaacccttgactgttatctcggactttgcaggagttcctttccctccgaacgctgctccatgcacaggaaaagggcattttgtacaatggggacttcccgggaacgcttgctcttaagtaccagaagccggcggagctctggctttcgtgtttttggttttctccttcccaaggcagctggattgaaaaaacaaaacaaaacaaaaaaacccaggggcgtcagtcgatattcccagggccgcttctcctgcagtctgtggagcgtccttgtccccgccgccggaatgaatgagcattctgcagcccgatgtccctgtcccctcctcgccgggccattctgattggacctggcccagtgcaatctgtccagacaagccctgcttgctggaaaactgccacaagcacaattgatctctttttatcgccattccaggggcctcaggtcctactggggaaacttcctataccggagctccagtttctcttaagctgcccaatttcacagagtacaaaatagttgtaggggaaatcaaggtgaaggatctgtccgacagtcaagacggatccacagtaatctttcggtctccttaaactaccaccctcgctgccacccaccccaagctgctgccgcctcaccttccttgaaatttctcagcgggagtctcctcactgccactaaaacccacccagcccactaactgaggagctagtgttaatccagagaaccccccgcaatgtgcttccgagattcagactgcttcattgggaagtatgatttgttcctttctggaattgggctccgtggtggcggcggcacttcaagcaaagacagtttcttgcaagctccagtagctccgcgtgtctcatttgccaggaagatgggttcccacgtagcaaatcgtacattgtgccctgtagctccttagctagttagctcacaagccgtgttttatgactaatccttaataactatggtaaataactgtgactgtggggtttttaatctcttgtcattctcatccaaaagtgaccagcataccagttcttgcaataagatattaccctcagaatattaagcacattattgtagagaaaaaaaaatatgtgtacacatatgaacgcacaacatgcacattcatcctcacatgtggcacgtaaggtctcatttgatattgtgtaggaaatctgaagccttttcctgaggtcatctgtaaaatagtctcattgccaaggcatccccagtgccagctggtgaatccatgatcaaaatgcatacgtattgttaaatgataaggtttagaatgacaggaacccatcactgtgtctcatggtcccacttccccatctgtgtgtgaattcctttagactaagggcaggaagacttccagctttctctttgttcttcaatgtgaaactgagaccaagtctctctaagacaaatgcagtgtatttaatgtttgtaagcaattctaagtgagatgtttggcaagaaatcccctaactgatttccatccaaacctaccttatagagcacaatattaagtgttgtacaattactgtgagaactgtgaatatgtgtaacttttttttagtatttgcccggggggaaaaagatattgtattatcatatatgcttttttgcaataaggatttattctcagaacaccaagtaaatctatctctatataaaaaatatatgtaatatatacatattcaaagtatatacagagcctgttttaaaaaatacagtattatttagtaaaattatctgttctatggaccaaatgtaaaatatttataaatgaagatgcattttaaatgtctataaatggtgtcataactagagcacgggcgttatgtaagtttctaagaatttagaggataaataataaaggttctatgatatacaacatcagaccttcaat

SEQ ID NO: 309931 - DNA, 4463 bp, Homo sapiens
tcctctcccttccccgcgtccctccgcccgccctcggaagaccgagacagcggagaggttgcgggtgagctgcgctgagcccaggagccgaggagtcgggagcgcagcgcagcccgagcccgagcccgagcggccccgcgtcccgagcgcatcggagcggccgagccgcccggcgcagcgcctgtcccgggcagcgcagccccggccgcaggatctcacccaaggtggcagaaggaggccttctggagctgacccacccccgacgaccatcagggtgaggcaactccaaggtcctactctctttctgtgcctgttacccaccccgtcctcctagggtgcccttgagccgcaaaactgctgtccacgtggaccgggggtgacatcgcacgtccatctgccaggacccctgcgtccaaattccgagacatggcgaccaacggcagcaaggtggccgacgggcagatctccaccgaggtcagcgaggcccctgtggccaatgacaagcccaaaaccttggtggtcaaggtgcagaagaaggcggcagacctccccgaccgggacacgtggaagggccgcttcgacttcctcatgtcctgtgtgggctatgccatcggcctgggcaacgtctggaggttcccctatctctgcgggaaaaatggtgggggagccttcctgatcccctatttcctgacactcatctttgcgggggtcccactcttcctgctggagtgctccctgggccagtacacctccatcggggggctaggggtatggaagctggctcctatgttcaagggcgtgggccttgcggctgctgtgctatcattctggctgaacatctactacatcgtcatcatctcctgggccatttactacctgtacaactccttcaccacgacactgccgtggaaacagtgcgacaacccctggaacacagaccgctgcttctccaactacagcatggtcaacactaccaacatgaccagcgctgtggtggagttctgggagcgcaacatgcatcagatgacggacgggctggataagccaggtcagatccgctggccactggccatcacgctggccatcgcctggatccttgtgtatttctgtatctggaagggtgttggctggactggaaaggtggtctacttttcagccacatacccctacatcatgctgatcatcctgttcttccgtggagtgacgctgcccggggccaaggagggcatcctcttctacatcacacccaacttccgcaagctgtctgactccgaggtgtggctggatgcggcaacccagatcttcttctcatacgggctgggcctggggtccctgatcgctctcgggagctacaactctttccacaacaatgtctacagggactccatcatcgtctgctgcatcaattcgtgcaccagcatgttcgcaggattcgtcatcttctccatcgtgggcttcatggcccatgtcaccaagaggtccattgctgatgtggcggcctcaggccccgggctggcgttcctggcatacccagaggcggtgacccagctgcctatctccccactctgggccatcctcttcttctccatgctgttgatgctgggcattgacagccagttctgcactgtggagggcttcatcacagccctggtggatgagtaccccaggctcctccgcaaccgcagagagctcttcattgctgctgtctgcatcatctcctacctgatcggtctctctaacatcactcaggggggtatttatgtcttcaaactctttgactactactctgccagtggcatgagcctgctgttcctcgtgttctttgaatgtgtctctatttcctggttttacggtgtcaaccgattctatgacaatatccaagagatggttggatccaggccctgcatctggtggaaactctgctggtctttcttcacaccaatcattgtggcgggcgtgttcattttcagtgctgtgcagatgacgccactcaccatgggaaactatgttttccccaagtggggccagggtgtgggctggctgatggctctgtcttccatggtcctcatccccgggtacatggcctacatgttcctcaccttaaagggctccctgaagcagcgcatccaagtcatggtccagcccagcgaagacatcgttcgcccagagaatggtcctgagcagcccaggcgggcagctccaccagcaaggaggcctacatctagggtgggggccactcaccgacccgacactctcaccccccgacctggctgagtgcgaccaccacttgatgtctgaggataccttccatctcaacctacctcgagtggcgagtccagacaccatcaccacgcagagaggggaggtgggaggacagttagacccctgggtgggccctgccgtgggcaaggatacccggtggcttctggcacctggcgggctggtgacctttttaatccaggccccatcagcatcccacgatcggccttggtaaccgccgcggtagatcatttttatcccgccagggagtgtgatgcaggaagaccacatgcgctcctggcttttaaacctgttcctgactgttctcttactgccgaaacccttgactgttatctcggactttgcaggagttcctttccctccgaacgctgctccatgcacaggaaaagggcattttgtacaatggggacttcccgggaacgcttgctcttaagtaccagaagccggcggagctctggctttcgtgtttttggttttctccttcccaaggcagctggattgaaaaaacaaaacaaaacaaaaaaacccaggggcgtcagtcgatattcccagggccgcttctcctgcagtctgtggagcgtccttgtccccgccgccggaatgaatgagcattctgcagcccgatgtccctgtcccctcctcgccgggccattctgattggacctggcccagtgcaatctgtccagacaagccctgcttgctggaaaactgccacaagcacaattgatctctttttatcgccattccaggggcctcaggtcctactggggaaacttcctataccggagctccagtttctcttaagctgcccaatttcacagagtacaaaatagttgtaggggaaatcaaggtgaaggatctgtccgacagtcaagacggatccacagtaatctttcggtctccttaaactaccaccctcgctgccacccaccccaagctgctgccgcctcaccttccttgaaatttctcagcgggagtctcctcactgccactaaaacccacccagcccactaactgaggagctagtgttaatccagagaaccccccgcaatgtgcttccgagattcagactgcttcattgggaagtatgatttgttcctttctggaattgggctccgtggtggcggcggcacttcaagcaaagacagtttcttgcaagctccagtagctccgcgtgtctcatttgccaggaagatgggttcccacgtagcaaatcgtacattgtgccctgtagctccttagctagttagctcacaagccgtgttttatgactaatccttaataactatggtaaataactgtgactgtggggtttttaatctcttgtcattctcatccaaaagtgaccagcataccagttcttgcaataagatattaccctcagaatattaagcacattattgtagagacacgtaaggtctcatttgatattgtgtaggaaatctgaagccttttcctgaggtcatctgtaaaatagtctcattgccaaggcatccccagtgccagctggtgaatccatgatcaaaatgcatacgtattgttaaatgataaggtttagaatgacaggaacccatcactgtgtctcatggtcccacttccccatctgtgtgtgaattcctttagactaagggcaggaagacttccagctttctctttgttcttcaatgtgaaactgagaccaagtctctctaagacaaatgcagtgtatttaatgtttgtaagcaattctaagtgagatgtttggcaagaaatcccctaactgatttccatccaaacctaccttatagagcacaatattaagtgttgtacaattactgtgagaactgtgaatatgtgtaacttttttttagtatttgcccggggggaaaaagatattgtattatcatatatgcttttttgcaataaggatttattctcagaacaccaagtaaatctatctctatataaaaaatatatgtaatatatacatattcaaagtatatacagagcctgttttaaaaaatacagtattatttagtaaaattatctgttctatggaccaaatgtaaaatatttataaatgaagatgcattttaaatgtctataaatggtgtcataactagagcacgggcgttatgtaagtttctaagaatttagaggataaataataaaggttctatgatatacaacatcagaccttcaat

SEQ ID NO: 309932 - DNA, 4467 bp, Homo sapiens
tcctctcccttccccgcgtccctccgcccgccctcggaagaccgagacagcggagaggttgcgggtgagctgcgctgagcccaggagccgaggagtcgggagcgcagcgcagcccgagcccgagcccgagcggccccgcgtcccgagcgcatcggagcggccgagccgcccggcgcagcgcctgtcccgggcagcgcagccccggccgcaggatctcacccaaggtggcagaaggaggccttctggagctgacccacccccgacgaccatcagggtgaggcaactccaaggtcctactctctttctgtgcctgttacccaccccgtcctcctagggtgcccttgagccgcaaaactgctgtccacgtggaccgggggtgacatcgcacgtccatctgccaggacccctgcgtccaaattccgagacatggcgaccaacggcagcaaggtggccgacgggcagatctccaccgaggtcagcgaggcccctgtggccaatgacaagcccaaaaccttggtggtcaaggtgcagaagaaggcggcagacctccccgaccgggacacgtggaagggccgcttcgacttcctcatgtcctgtgtgggctatgccatcggcctgggcaacgtctggaggttcccctatctctgcgggaaaaatggtgggggagccttcctgatcccctatttcctgacactcatctttgcgggggtcccactcttcctgctggagtgctccctgggccagtacacctccatcggggggctaggggtatggaagctggctcctatgttcaagggcgtgggccttgcggctgctgtgctatcattctggctgaacatctactacatcgtcatcatctcctgggccatttactacctgtacaactccttcaccacgacactgccgtggaaacagtgcgacaacccctggaacacagaccgctgcttctccaactacagcatggtcaacactaccaacatgaccagcgctgtggtggagttctgggagcgcaacatgcatcagatgacggacgggctggataagccaggtcagatccgctggccactggccatcacgctggccatcgcctggatccttgtgtatttctgtatctggaagggtgttggctggactggaaaggtggtctacttttcagccacatacccctacatcatgctgatcatcctgttcttccgtggagtgacgctgcccggggccaaggagggcatcctcttctacatcacacccaacttccgcaagctgtctgactccgaggtgtggctggatgcggcaacccagatcttcttctcatacgggctgggcctggggtccctgatcgctctcgggagctacaactctttccacaacaatgtctacagggactccatcatcgtctgctgcatcaattcgtgcaccagcatgttcgcaggattcgtcatcttctccatcgtgggcttcatggcccatgtcaccaagaggtccattgctgatgtggcggcctcaggccccgggctggcgttcctggcatacccagaggcggtgacccagctgcctatctccccactctgggccatcctcttcttctccatgctgttgatgctgggcattgacagccagttctgcactgtggagggcttcatcacagccctggtggatgagtaccccaggctcctccgcaaccgcagagagctcttcattgctgctgtctgcatcatctcctacctgatcggtctctctaacatcactcaggggggtatttatgtcttcaaactctttgactactactctgccagtggcatgagcctgctgttcctcgtgttctttgaatgtgtctctatttcctggttttacggtgtcaaccgattctatgacaatatccaagagatggttggatccaggccctgcatctggtggaaactctgctggtctttcttcacaccaatcattgtggcgggcgtgttcattttcagtgctgtgcagatgacgccactcaccatgggaaactatgttttccccaagtggggccagggtgtgggctggctgatggctctgtcttccatggtcctcatccccgggtacatggcctacatgttcctcaccttaaagggctccctgaagcagcgcatccaagtcatggtccagcccagcgaagacatcgttcgcccagagaatggtcctgagcagcccaggcgggcagctccaccagcaaggaggcctacatctagggtgggggccactcaccgacccgacactctcaccccccgacctggctgagtgcgaccaccacttgatgtctgaggataccttccatctcaacctacctcgagtggcgagtccagacaccatcaccacgcagagaggggaggtgggaggacagttagacccctgggtgggccctgccgtgggcaaggatacccggtggcttctggcacctggcgggctggtgacctttttaatccaggccccatcagcatcccacgatcggccttggtaaccgccgcggtagatcatttttatcccgccagggagtgtgatgcaggaagaccacatgcgctcctggcttttaaacctgttcctgactgttctcttactgccgaaacccttgactgttatctcggactttgcaggagttcctttccctccgaacgctgctccatgcacaggaaaagggcattttgtacaatggggacttcccgggaacgcttgctcttaagtaccagaagccggcggagctctggctttcgtgtttttggttttctccttcccaaggcagctggattgaaaaaacaaaacaaaacaaaaaaacccaggggcgtcagtcgatattcccagggccgcttctcctgcagtctgtggagcgtccttgtccccgccgccggaatgaatgagcattctgcagcccgatgtccctgtcccctcctcgccgggccattctgattggacctggcccagtgcaatctgtccagacaagccctgcttgctggaaaactgccacaagcacaattgatctctttttatcgccattccaggggcctcaggtcctactggggaaacttcctataccggagctccagtttctcttaagctgcccaatttcacagagtacaaaatagttgtaggggaaatcaaggtgaaggatctgtccgacagtcaagacggatccacagtaatctttcggtctccttaaactaccaccctcgctgccacccaccccaagctgctgccgcctcaccttccttgaaatttctcagcgggagtctcctcactgccaccgcaatgtgcttccgagattcagactgcttcattgggaagtatgatttgttcctttctggaattgggctccgtggtggcggcggcacttcaagcaaagacagtttcttgcaagctccagtagctccgcgtgtctcatttgccaggaagatgggttcccacgtagcaaatcgtacattgtgccctgtagctccttagctagttagctcacaagccgtgttttatgactaatccttaataactatggtaaataactgtgactgtggggtttttaatctcttgtcattctcatccaaaagtgaccagcataccagttcttgcaataagatattaccctcagaatattaagcacattattgtagagaaaaaaaaatatgtgtacacatatgaacgcacaacatgcacattcatcctcacatgtggcacgtaaggtctcatttgatattgtgtaggaaatctgaagccttttcctgaggtcatctgtaaaatagtctcattgccaaggcatccccagtgccagctggtgaatccatgatcaaaatgcatacgtattgttaaatgataaggtttagaatgacaggaacccatcactgtgtctcatggtcccacttccccatctgtgtgtgaattcctttagactaagggcaggaagacttccagctttctctttgttcttcaatgtgaaactgagaccaagtctctctaagacaaatgcagtgtatttaatgtttgtaagcaattctaagtgagatgtttggcaagaaatcccctaactgatttccatccaaacctaccttatagagcacaatattaagtgttgtacaattactgtgagaactgtgaatatgtgtaacttttttttagtatttgcccggggggaaaaagatattgtattatcatatatgcttttttgcaataaggatttattctcagaacaccaagtaaatctatctctatataaaaaatatatgtaatatatacatattcaaagtatatacagagcctgttttaaaaaatacagtattatttagtaaaattatctgttctatggaccaaatgtaaaatatttataaatgaagatgcattttaaatgtctataaatggtgtcataactagagcacgggcgttatgtaagtttctaagaatttagaggataaataataaaggttctatgatatacaacatcagaccttcaat

SEQ ID NO: 309933 - DNA, 4344 bp, Homo sapiens
tcctctcccttccccgcgtccctccgcccgccctcggaagaccgagacagcggagaggttgcgggtgagctgcgctgagcccaggagccgaggagtcgggagcgcagcgcagcccgagcccgagcccgagcggccccgcgtcccgagcgcatcggagcggccgagccgcccggcgcagcgcctgtcccgggcagcgcagccccggccgcaggatctcacccaaggtggcagaaggaggccttctggagctgacccacccccgacgaccatcagggtgaggcaactccaaggtcctactctctttctgtgcctgttacccaccccgtcctcctagggtgcccttgagccgcaaaactgctgtccacgtggaccgggggtgacatcgcacgtccatctgccaggacccctgcgtccaaattccgagacatggcgaccaacggcagcaaggtggccgacgggcagatctccaccgaggtcagcgaggcccctgtggccaatgacaagcccaaaaccttggtggtcaaggtgcagaagaaggcggcagacctccccgaccgggacacgtggaagggccgcttcgacttcctcatgtcctgtgtgggctatgccatcggcctgggcaacgtctggaggttcccctatctctgcgggaaaaatggtgggggagccttcctgatcccctatttcctgacactcatctttgcgggggtcccactcttcctgctggagtgctccctgggccagtacacctccatcggggggctaggggtatggaagctggctcctatgttcaagggcgtgggccttgcggctgctgtgctatcattctggctgaacatctactacatcgtcatcatctcctgggccatttactacctgtacaactccttcaccacgacactgccgtggaaacagtgcgacaacccctggaacacagaccgctgcttctccaactacagcatggtcaacactaccaacatgaccagcgctgtggtggagttctgggagcgcaacatgcatcagatgacggacgggctggataagccaggtcagatccgctggccactggccatcacgctggccatcgcctggatccttgtgtatttctgtatctggaagggtgttggctggactggaaaggtggtctacttttcagccacatacccctacatcatgctgatcatcctgttcttccgtggagtgacgctgcccggggccaaggagggcatcctcttctacatcacacccaacttccgcaagctgtctgactccgaggtgtggctggatgcggcaacccagatcttcttctcatacgggctgggcctggggtccctgatcgctctcgggagctacaactctttccacaacaatgtctacagggactccatcatcgtctgctgcatcaattcgtgcaccagcatgttcgcaggattcgtcatcttctccatcgtgggcttcatggcccatgtcaccaagaggtccattgctgatgtggcggcctcaggccccgggctggcgttcctggcatacccagaggcggtgacccagctgcctatctccccactctgggccatcctcttcttctccatgctgttgatgctgggcattgacagccagttctgcactgtggagggcttcatcacagccctggtggatgagtaccccaggctcctccgcaaccgcagagagctcttcattgctgctgtctgcatcatctcctacctgatcggtctctctaacatcactcaggggggtatttatgtcttcaaactctttgactactactctgccagtggcatgagcctgctgttcctcgtgttctttgaatgtgtctctatttcctggttttacggtgtcaaccgattctatgacaatatccaagagatggttggatccaggccctgcatctggtggaaactctgctggtctttcttcacaccaatcattgtggcgggcgtgttcattttcagtgctgtgcagatgacgccactcaccatgggaaactatgttttccccaagtggggccagggtgtgggctggctgatggctctgtcttccatggtcctcatccccgggtacatggcctacatgttcctcaccttaaagggctccctgaagcagcgcatccaagtcatggtccagcccagcgaagacatcgttcgcccagagaatggtcctgagcagcccaggcgggcagctccaccagcaaggaggcctacatctagggtgggggccactcaccgacccgacactctcaccccccgacctggctgagtgcgaccaccacttgatgtctgaggataccttccatctcaacctacctcgagtggcgagtccagacaccatcaccacgcagagaggggaggtgggaggacagttagacccctgggtgggccctgccgtgggcaaggatacccggtggcttctggcacctggcgggctggtgacctttttaatccaggccccatcagcatcccacgatcggccttggtaaccgccgcggtagatcatttttatcccgccagggagtgtgatgcaggaagaccacatgcgctcctggcttttaaacctgttcctgactgttctcttactgccgaaacccttgactgttatctcggactttgcaggagttcctttccctccgaacgctgctccatgcacaggaaaagggcattttgtacaatggggacttcccgggaacgcttgctcttaagtaccagaagccggcggagctctggctttcgtgtttttggttttctccttcccaaggcagctggattgaaaaaacaaaacaaaacaaaaaaacccaggggcgtcagtcgatattcccagggccgcttctcctgcagtctgtggagcgtccttgtccccgccgccggaatgaatgagcattctgcagcccgatgtccctgtcccctcctcgccgggccattctgattggacctggcccagtgcaatctgtccagacaagccctgcttgctggaaaactgccacaagcacaattgatctctttttatcgccattccaggggcctcaggtcctactggggaaacttcctataccggagctccagtttctcttaagctgcccaatttcacagagtacaaaatagttgtaggggaaatcaaggtgaaggatctgtccgacagtcaagacggatccacagtaatctttcggtctccttaaactaccaccctcgctgccacccaccccaagctgctgccgcctcaccttccttgaaatttctcagcgggagtctcctcactgccactccgcgtgtctcatttgccaggaagatgggttcccacgtagcaaatcgtacattgtgccctgtagctccttagctagttagctcacaagccgtgttttatgactaatccttaataactatggtaaataactgtgactgtggggtttttaatctcttgtcattctcatccaaaagtgaccagcataccagttcttgcaataagatattaccctcagaatattaagcacattattgtagagaaaaaaaaatatgtgtacacatatgaacgcacaacatgcacattcatcctcacatgtggcacgtaaggtctcatttgatattgtgtaggaaatctgaagccttttcctgaggtcatctgtaaaatagtctcattgccaaggcatccccagtgccagctggtgaatccatgatcaaaatgcatacgtattgttaaatgataaggtttagaatgacaggaacccatcactgtgtctcatggtcccacttccccatctgtgtgtgaattcctttagactaagggcaggaagacttccagctttctctttgttcttcaatgtgaaactgagaccaagtctctctaagacaaatgcagtgtatttaatgtttgtaagcaattctaagtgagatgtttggcaagaaatcccctaactgatttccatccaaacctaccttatagagcacaatattaagtgttgtacaattactgtgagaactgtgaatatgtgtaacttttttttagtatttgcccggggggaaaaagatattgtattatcatatatgcttttttgcaataaggatttattctcagaacaccaagtaaatctatctctatataaaaaatatatgtaatatatacatattcaaagtatatacagagcctgttttaaaaaatacagtattatttagtaaaattatctgttctatggaccaaatgtaaaatatttataaatgaagatgcattttaaatgtctataaatggtgtcataactagagcacgggcgttatgtaagtttctaagaatttagaggataaataataaaggttctatgatatacaacatcagaccttcaat

SEQ ID NO: 309934 - DNA, 4398 bp, Homo sapiens
tcctctcccttccccgcgtccctccgcccgccctcggaagaccgagacagcggagaggttgcgggtgagctgcgctgagcccaggagccgaggagtcgggagcgcagcgcagcccgagcccgagcccgagcggccccgcgtcccgagcgcatcggagcggccgagccgcccggcgcagcgcctgtcccgggcagcgcagccccggccgcaggatctcacccaaggtggcagaaggaggccttctggagctgacccacccccgacgaccatcagggtgaggcaactccaaggtcctactctctttctgtgcctgttacccaccccgtcctcctagggtgcccttgagccgcaaaactgctgtccacgtggaccgggggtgacatcgcacgtccatctgccaggacccctgcgtccaaattccgagacatggcgaccaacggcagcaaggtggccgacgggcagatctccaccgaggtcagcgaggcccctgtggccaatgacaagcccaaaaccttggtggtcaaggtgcagaagaaggcggcagacctccccgaccgggacacgtggaagggccgcttcgacttcctcatgtcctgtgtgggctatgccatcggcctgggcaacgtctggaggttcccctatctctgcgggaaaaatggtgggggagccttcctgatcccctatttcctgacactcatctttgcgggggtcccactcttcctgctggagtgctccctgggccagtacacctccatcggggggctaggggtatggaagctggctcctatgttcaagggcgtgggccttgcggctgctgtgctatcattctggctgaacatctactacatcgtcatcatctcctgggccatttactacctgtacaactccttcaccacgacactgccgtggaaacagtgcgacaacccctggaacacagaccgctgcttctccaactacagcatggtcaacactaccaacatgaccagcgctgtggtggagttctgggagcgcaacatgcatcagatgacggacgggctggataagccaggtcagatccgctggccactggccatcacgctggccatcgcctggatccttgtgtatttctgtatctggaagggtgttggctggactggaaaggtggtctacttttcagccacatacccctacatcatgctgatcatcctgttcttccgtggagtgacgctgcccggggccaaggagggcatcctcttctacatcacacccaacttccgcaagctgtctgactccgaggtgtggctggatgcggcaacccagatcttcttctcatacgggctgggcctggggtccctgatcgctctcgggagctacaactctttccacaacaatgtctacagggactccatcatcgtctgctgcatcaattcgtgcaccagcatgttcgcaggattcgtcatcttctccatcgtgggcttcatggcccatgtcaccaagaggtccattgctgatgtggcggcctcaggccccgggctggcgttcctggcatacccagaggcggtgacccagctgcctatctccccactctgggccatcctcttcttctccatgctgttgatgctgggcattgacagccagttctgcactgtggagggcttcatcacagccctggtggatgagtaccccaggctcctccgcaaccgcagagagctcttcattgctgctgtctgcatcatctcctacctgatcggtctctctaacatcactcaggggggtatttatgtcttcaaactctttgactactactctgccagtggcatgagcctgctgttcctcgtgttctttgaatgtgtctctatttcctggttttacggtgtcaaccgattctatgacaatatccaagagatggttggatccaggccctgcatctggtggaaactctgctggtctttcttcacaccaatcattgtggcgggcgtgttcattttcagtgctgtgcagatgacgccactcaccatgggaaactatgttttccccaagtggggccagggtgtgggctggctgatggctctgtcttccatggtcctcatccccgggtacatggcctacatgttcctcaccttaaagggctccctgaagcagcgcatccaagtcatggtccagcccagcgaagacatcgttcgcccagagaatggtcctgagcagcccaggcgggcagctccaccagcaaggaggcctacatctagggtgggggccactcaccgacccgacactctcaccccccgacctggctgagtgcgaccaccacttgatgtctgaggataccttccatctcaacctacctcgagtggcgagtccagacaccatcaccacgcagagaggggaggtgggaggacagttagacccctgggtgggccctgccgtgggcaaggatacccggtggcttctggcacctggcgggctggtgacctttttaatccaggccccatcagcatcccacgatcggccttggtaaccgccgcggtagatcatttttatcccgccagggagtgtgatgcaggaagaccacatgcgctcctggcttttaaacctgttcctgactgttctcttactgccgaaacccttgactgttatctcggactttgcaggagttcctttccctccgaacgctgctccatgcacaggaaaagggcattttgtacaatggggacttcccgggaacgcttgctcttaagtaccagaagccggcggagctctggctttcgtgtttttggttttctccttcccaaggcagctggattgaaaaaacaaaacaaaacaaaaaaacccaggggcgtcagtcgatattcccagggccgcttctcctgcagtctgtggagcgtccttgtccccgccgccggaatgaatgagcattctgcagcccgatgtccctgtcccctcctcgccgggccattctgattggacctggcccagtgcaatctgtccagacaagccctgcttgctggaaaactgccacaagcacaattgatctctttttatcgccattccaggggcctcaggtcctactggggaaacttcctataccggagctccagtttctcttaagctgcccaatttcacagagtacaaaatagttgtaggggaaatcaaggtgaaggatctgtccgacagtcaagacggatccacagtaatctttcggtctccttaaactaccaccctcgctgccacccaccccaagctgctgccgcctcaccttccttgaaatttctcagcgggagtctcctcactgccactaaaacccacccagcccattcaagcaaagacagtttcttgcaagctccagtagctccgcgtgtctcatttgccaggaagatgggttcccacgtagcaaatcgtacattgtgccctgtagctccttagctagttagctcacaagccgtgttttatgactaatccttaataactatggtaaataactgtgactgtggggtttttaatctcttgtcattctcatccaaaagtgaccagcataccagttcttgcaataagatattaccctcagaatattaagcacattattgtagagaaaaaaaaatatgtgtacacatatgaacgcacaacatgcacattcatcctcacatgtggcacgtaaggtctcatttgatattgtgtaggaaatctgaagccttttcctgaggtcatctgtaaaatagtctcattgccaaggcatccccagtgccagctggtgaatccatgatcaaaatgcatacgtattgttaaatgataaggtttagaatgacaggaacccatcactgtgtctcatggtcccacttccccatctgtgtgtgaattcctttagactaagggcaggaagacttccagctttctctttgttcttcaatgtgaaactgagaccaagtctctctaagacaaatgcagtgtatttaatgtttgtaagcaattctaagtgagatgtttggcaagaaatcccctaactgatttccatccaaacctaccttatagagcacaatattaagtgttgtacaattactgtgagaactgtgaatatgtgtaacttttttttagtatttgcccggggggaaaaagatattgtattatcatatatgcttttttgcaataaggatttattctcagaacaccaagtaaatctatctctatataaaaaatatatgtaatatatacatattcaaagtatatacagagcctgttttaaaaaatacagtattatttagtaaaattatctgttctatggaccaaatgtaaaatatttataaatgaagatgcattttaaatgtctataaatggtgtcataactagagcacgggcgttatgtaagtttctaagaatttagaggataaataataaaggttctatgatatacaacatcagaccttcaat

SEQ ID NO: 309935 - DNA, 339 bp, Homo sapiens
ccctccaaccttaccagaaattggcattttcctctaccacctggacatttccttcccaatgcccggactgtcaatgtccacatcctctcgtggtcacaaagccctcagtgcttcatctaatctaccctgaagcctaatcccagccccatcagcctccagagtccatgtggtctgtgaactggatgcagtgggcgccggggacaatgcacctgttctcacctcttttcatcttgcaggggggtatttatgtcttcaaactctttgactactactctgccagtggcatgagcctgctgttcctcgtgttctttgaatgtgtctctatttcctggttttacg

SEQ ID NO: 309936 - DNA, 368 bp, Homo sapiens
ttgaccaaacagcactttctactgattagtataatgggcctcacagtccccagctacctcttgaatcacggtgatgacggtgtcagcacagttctagggcggggatatcatctgtggccatgccctgggcacccctgggtcactccggctcccaccagctctgtgtaactttctcctccctccactgtttgaccaggcgcaacatgcatcagatgacggacgggctggataagccaggtcagatccgctggccactggccatcacgctggccatcgcctggatccttgtgtatttctgtatctggaagggtgttggctggactggaaaggtaagggatatatgtgcacagtggggacaggagggcact

SEQ ID NO: 309937 - DNA, 972 bp, Homo sapiens
ttcttttaactacagtttttgaaaactgtggacctgagatgaaaaagcaaaagccatgacagctgggaaggcactggtccgagaacaccggattcactgcgtgctgtcctcacttgttctacaatgagtgccaaatctgctatcagcaaggaaatttttgcacctcttgatgaaaggatgctgggagctgtccaagtcaagaggaggacaaagaaaaagattcctttcttggcaactggaggtcaaggcgaatatttaacttatatctgcctgtcagtgacaaacaagaaacccacacaggcgtccatcacaaaggtcaaacagtttgaaggctccacatcatttgttcggagatcacagtggatgctcgagcagcttcgccaggttaatggtatcgatcctaatggggattcggcagagtttgatttgttgtttgaaaatgcttttgaccagtgggtagccagcacagcgtcagaaaaatgcaccttcttccagatcctccaccatacctgccagaggtacctcacggacaggaagccagagtttattaactgccaatccaaaattatgggaggaaacagcatcctccattcagctgctgacagcgtgaccagcgcagtgcagaaggcaagccaggccttgaatgagcgtggagagcgattaggccgagcagaggagaagacagaagacctgaagaacagcgcccagcagtttgcagaaactgcgcacaagcttgccatgaagcacaaatgttgagaaactgcctatcctggtgactcttcttaagagaaactgaagagtttgttcagcagtttttacaagaattcgggacctccgcttgcttctttttttccaatatttggacacttagagtggtttttgttttttcttttcagatgttaatgtgaaagaaagggtgttgcatttttacatttccctaatgatcttgctaataaatgctacaatagcatc

SEQ ID NO: 309938 - DNA, 681 bp, Homo sapiens
acagatagaatactggcagaatggaaatgactggcatgtcagtgatgagtttatagagaagcatttaggattttcctaggtcccgcagtcagtgggtgttcttgctgcaagtgcgtcagtcaaacccaatcaaaagaaatgtcggcttgtttcctagacactagacgagcggcctttctgcagtgtgacctgccttcctcttacaggatactcaccctgccggagtctggtcactgtgggtcagctgagccagtttctgatgctcctgctctcctcctttcaggaaacagcatcctccattcagctgctgacagcgtgaccagcgcagtgcagaaggcaagccaggccttgaatgagcgtggagagcgattaggccgagcagaggagaagacagaagacctgaagaacagcgcccagcagtttgcagaaactgcgcacaagcttgccatgaagcacaaatgttgagaaactgcctatcctggtgactcttcttaagagaaactgaagagtttgttcagcagtttttacaagaattcgggacctccgcttgcttctttttttccaatatttggacacttagagtggtttttgttttttcttttcagatgttaatgtgaaagaaagggtgttgcatttttacatttccctaatgatcttgctaataaatgctacaatagcatc

SEQ ID NO: 309939 - DNA, 1185 bp, Homo sapiens
tgcttcgcaggcgctcgcactcggcggcgggcgggcgcgcggctgcagctggagctccagcgcccggagttggagttgccgggagtttccccccaacccctcccttttcgcgcgcggcagcaggagccggcgcgggagccgcgagcggcggcgagccagcacccgggccggctaagccttgtccggagcccggagcccggagccccgcgcggggcagccccccggggaggagcctcgtgctctgggacgcgtgccgcgcactggcacggctggggcgcgagccaggctgcacgtgacaaacaagaaacccacacaggcgtccatcacaaaggtcaaacagtttgaaggctccacatcatttgttcggagatcacagtggatgctcgagcagcttcgccaggttaatggtatcgatcctaatggggattcggcagagtttgatttgttgtttgaaaatgcttttgaccagtgggtagccagcacagcgtcagaaaaatgcaccttcttccagatcctccaccatacctgccagaggtacctcacggacaggaagccagagtttattaactgccaatccaaaattatgggaggaaacagcatcctccattcagctgctgacagcgtgaccagcgcagtgcagaaggcaagccaggccttgaatgagcgtggagagcgattaggccgagcagaggagaagacagaagacctgaagaacagcgcccagcagtttgcagaaactgcgcacaagcttgccatgaagcacaaatgttgagaaactgcctatcctggtgactcttcttaagagaaactgaagagtttgttcagcagtttttacaagaattcgggacctccgcttgcttctttttttccaatatttggacacttagagtggtttttgttttttcttttcagatgttaatgtgaaagaaagggtgttgcatttttacatttccctaatgatcttgctaataaatgctacaatagcatcaaaaaaaaaaaatcgggcatattcggggggaaaaggttgagggcgtgcaatgttcgaccctttgtcaggggaatgggtccatgggggaaagaagtatttttttttttttggaagaaaaaagaggaaggaaaaaaagaaaaagaagaggagagaggaaaagaaggataggaaaaagaagagagaagggaagaaaagat

SEQ ID NO: 309940 - DNA, 279 bp, Homo sapiens
  misc_feature (4)..(4): n is a, c, g, or t
gagnccgagacggcgccagcaggcagaaatgcgcacaagcttgccatgaagcacaaatgttgagaaactgcctatcctggtgactcttcttaagagaaactgaagagtttgttcagcagtttttacaagaattcgggacctccgcttgcttctttttttccaatatttggacacttagagtggtttttgttttttcttttcagatgttaatgtgaaagaaagggtgttgcatttttacatttccctaatgatcttgctaataaatgctacaatagcatc

SEQ ID NO: 309941 - DNA, 2286 bp, Homo sapiens
tgcttcgcaggcgctcgcactcggcggcgggcgggcgcgcggctgcagctggagctccagcgcccggagttggagttgccgggagtttccccccaacccctcccttttcgcgcgcggcagcaggagccggcgcgggagccgcgagcggcggcgagccagcacccgggccggctaagccttgtccggagcccggagcccggagccccgcgcggggcagccccccggggaggagcctcgtgctctgggacgcgtgccgcgcactggcacggctggggcgcgagccaggctgcacgtttcctgtttagaaagttctgctccttcataaggaccttgaagtactaggaggaaaggtgctttgtgtgtggagttttccatgaagtgcagtcccaactaaaaggctgcgttaaagattcactgcgtgctgtcctcacttgttctacaatgagtgccaaatctgctatcagcaaggaaatttttgcacctcttgatgaaaggatgctgggagctgtccaagtcaagaggaggacaaagaaaaagattcctttcttggcaactggaggtcaaggcgaatatttaacttatatctgcctgtcagtgacaaacaagaaacccacacaggcgtccatcacaaaggtcaaacagtttgaaggctccacatcatttgttcggagatcacagtggatgctcgagcagcttcgccaggttaatggtatcgatcctaatggggattcggcagagtttgatttgttgtttgaaaatgcttttgaccagtgggtagccagcacagcgtcagaaaaatgcaccttcttccagatcctccaccatacctgccagaggtacctcacggacaggaagccagagtttattaactgccaatccaaaattatgggaggaaacagcatcctccattcagctgctgacagcgtgaccagcgcagtgcagaaggcaagccaggccttgaatgagcgtggagagcgattaggccgagcagaggagaagacagaagacctgaagaacagcgcccagcagtttgcagaaactgcgcacaagcttgccatgaagcacaaatgttgagaaactgcctatcctggtgactcttcttaagagaaactgaagagtttgttcagcagtttttacaagaattcgggacctccgcttgcttctttttttccaatatttggacacttagagtggtttttgttttttcttttcagatgttaatgtgaaagaaagggtgttgcatttttacatttccctaatgatcttgctaataaatgctacaatagcatcagcttcattttgggtttttgcctcctcccactgtgtgtatgtgtgtatatgtatgttttgaatatgttttctttattaaaaaatattttttgtagtttgaatatgaaatttggaccaaatgataaactgcgctgagtctaaactggcaacatgtatttttttctctgatattaagcaggaaggcattttaatgtggtgacatcagatgttatttttcctagatgaaaataaaagtcaagcagtgattagtttcactcactgtcctagctacacttaatttgaagattaaaattctacattgtggaaaacaattgaatttattgggaaaaacagcagtcttagattttgctccttgcatagtaatcttttgcatgaaccatcaccagcgttcaaaaaaaaaaaatcagaatcgcagatagaaatctctttcctgagttacagtttaaatactcttgctacttgtatccagggtgtttacttggaattatcatatgaagggtaaaaatttgagagtaaagccctaaagaaaagcctacctaaaaccctctgtgtactcacagatgtttctcttgtcactgtcatagtgatggtcgctggtatggaaaagtgcttatatttttatcaaaaaattgatttgtccaggtaaaggtctgtgtcaatgataatgtgaacaagtagtacatttaaaatgtttgtcttgtctttttacagtcatgcctattttagagacaccttcataatgtccttgggagagggcctttagtttcttggtatctggattttggaggttttgatgttgtttttgctatctatttatttaatgtaatttaatatgtgagtttcttgacaaattgcatttcatggcaattgcaccttgcctggtctgatataaaacaccacaatcacaaacctttacattgcagtcagtttcagggagtaagtacttcaaagacagaagacactggcacacattatggaggagatcctctagagcac

SEQ ID NO: 309942 - DNA, 2166 bp, Homo sapiens
tgcttcgcaggcgctcgcactcggcggcgggcgggcgcgcggctgcagctggagctccagcgcccggagttggagttgccgggagtttccccccaacccctcccttttcgcgcgcggcagcaggagccggcgcgggagccgcgagcggcggcgagccagcacccgggccggctaagccttgtccggagcccggagcccggagccccgcgcggggcagccccccggggaggagcctcgtgctctgggacgcgtgccgcgcactggcacggctggggcgcgagccaggctgcacgtttcctgtttagaaagttctgctccttcataaggaccttgaagtactaggaggaaaggtgctttgtgtgtggagttttccatgaagtgcagtcccaactaaaaggctgcgttaaagattcactgcgtgctgtcctcacttgttctacaatgagtgccaaatctgctatcagcaaggaaatttttgcacctcttgatgaaaggatgctgggagctgtccaagtcaagaggaggacaaagaaaaagattcctttcttggcaactggaggtcaaggcgaatatttaacttatatctgcctgtcagtgacaaacaagaaacccacacaggcgtccatcacaaaggtcaaacagtttgaaggctccacatcatttgttcggagatcacagtggatgctcgagcagcttcgccaggttaatggtatcgatcctaatggggattcggcagagtttgatttgttgtttgaaaatgcttttgaccagtgggtagccagcacagcgtcagaaaaatgcaccttcttccagatcctccaccatacctgccagaggtacctcacggacaggaagccagagtttattaactgccaatccaaaattatgggaggaaacagcatcctccattcagctgctgacagcgtgaccagcgcagtgcagaaggcaagccaggccttgaatgagcgtggagagcgattaggccgagcagaggagaagacagaagacctgaagaacagcgcccagcagtttgcagaaactgcgcacaagcttgccatgaagcacaaatgttgagaaactgcctatcctggtgactcttcttaagagaaactgaagagtttgttcagcagtttttacaagaattcgggacctccgcttgcttctttttttccaatatttggacacttagagtggtttttgttttttcttttcagatgttaatgtgaaagaaagggtgttgcatttttacatttccctaatgatcttgctaataaatgctacaatagcatcagcttcattttgggtttttgcctcctcccactgtgtgtatgtgtgtatatgtatgttttgaatatgttttctttattaaaaaatattttttgtagtttgaatatgaaatttggaccaaatgataaactgcgctgagtctaaactggcaacatgtatttttttctctgatattaagcaggaaggcattttaatgtggtgacatcagatgttatttttcctagatgaaaataaaagtcaagcagtgattagtttcactcactgtcctagctacacttaatttgaagattaaaattctacattgtggaaaacaattgaatttattgggaaaaacagcagtcttagattttgctccttgcatagtaatcttttgcatgaaccatcaccagcgttcaaaaaaaaaaaatcagaatcgcagatagaaatctctttcctgagttacagtttaaatactcttgctacttgtatccagggtgtttacttggaattatcatatgaagggtaaaaatttgagagtaaagccctaaagaaaagcctacctaaaaccctctgtgtactcacagatgtttctcttgtcactgtcatagtgatggtcgctggtatggaaaagtgcttatatttttatcaaaaaattgatttgtccaggtaaaggtctgtgtcaatgataatgtgaacaagtagtacatttaaaatgtttgtcttgtctttttacagtcatgcctattttagagacaccttcataatgtccttgggagagggcctttagtttcttggtatctggggatttttggagtttcgagccgttcctccctccatctacttcatttcccctcaactagtctggctttcttcaccctattcctatttcttcgctccccg

SEQ ID NO: 309943 - DNA, 2170 bp, Homo sapiens
tgcttcgcaggcgctcgcactcggcggcgggcgggcgcgcggctgcagctggagctccagcgcccggagttggagttgccgggagtttccccccaacccctcccttttcgcgcgcggcagcaggagccggcgcgggagccgcgagcggcggcgagccagcacccgggccggctaagccttgtccggagcccggagcccggagccccgcgcggggcagccccccggggaggagcctcgtgctctgggacgcgtgccgcgcactggcacggctggggcgcgagccaggctgcacgattcactgcgtgctgtcctcacttgttctacaatgagtgccaaatctgctatcagcaaggaaatttttgcacctcttgatgaaaggatgctgggagctgtccaagtcaagaggaggacaaagaaaaagattcctttcttggcaactggaggtcaaggcgaatatttaacttatatctgcctgtcagtgacaaacaagaaacccacacaggcgtccatcacaaaggtcaaacagtttgaaggctccacatcatttgttcggagatcacagtggatgctcgagcagcttcgccaggttaatggtatcgatcctaatggggattcggcagagtttgatttgttgtttgaaaatgcttttgaccagtgggtagccagcacagcgtcagaaaaatgcaccttcttccagatcctccaccatacctgccagaggtacctcacggacaggaagccagagtttattaactgccaatccaaaattatgggaggaaacagcatcctccattcagctgctgacagcgtgaccagcgcagtgcagaaggcaagccaggccttgaatgagcgtggagagcgattaggccgagcagaggagaagacagaagacctgaagaacagcgcccagcagtttgcagaaactgcgcacaagcttgccatgaagcacaaatgttgagaaactgcctatcctggtgactcttcttaagagaaactgaagagtttgttcagcagtttttacaagaattcgggacctccgcttgcttctttttttccaatatttggacacttagagtggtttttgttttttcttttcagatgttaatgtgaaagaaagggtgttgcatttttacatttccctaatgatcttgctaataaatgctacaatagcatcagcttcattttgggtttttgcctcctcccactgtgtgtatgtgtgtatatgtatgttttgaatatgttttctttattaaaaaatattttttgtagtttgaatatgaaatttggaccaaatgataaactgcgctgagtctaaactggcaacatgtatttttttctctgatattaagcaggaaggcattttaatgtggtgacatcagatgttatttttcctagatgaaaataaaagtcaagcagtgattagtttcactcactgtcctagctacacttaatttgaagattaaaattctacattgtggaaaacaattgaatttattgggaaaaacagcagtcttagattttgctccttgcatagtaatcttttgcatgaaccatcaccagcgttcaaaaaaaaaaaatcagaatcgcagatagaaatctctttcctgagttacagtttaaatactcttgctacttgtatccagggtgtttacttggaattatcatatgaagggtaaaaatttgagagtaaagccctaaagaaaagcctacctaaaaccctctgtgtactcacagatgtttctcttgtcactgtcatagtgatggtcgctggtatggaaaagtgcttatatttttatcaaaaaattgatttgtccaggtaaaggtctgtgtcaatgataatgtgaacaagtagtacatttaaaatgtttgtcttgtctttttacagtcatgcctattttagagacaccttcataatgtccttgggagagggcctttagtttcttggtatctggattttggaggttttgatgttgtttttgctatctatttatttaatgtaatttaatatgtgagtttcttgacaaattgcatttcatggcaattgcaccttgcctggtctgatataaaacaccacaatcacaaacctttacattgcagtcagtttcagggagtaagtacttcaaagacagaagacactggcacacattatggaggagatcctctagagcac

SEQ ID NO: 309944 - DNA, 1916 bp, Homo sapiens
  misc_feature (16)..(16): n is a, c, g, or t
  misc_feature (25)..(26): n is a, c, g, or t
aaggcaggtacgagcngggtggtgnnggactgaacaaatattcactgcgtgctgtcctcacttgttctacaatgagtgccaaatctgctatcagcaaggaaatttttgcacctcttgatgaaaggatgctgggagctgtccaagtcaagaggaggacaaagaaaaagattcctttcttggcaactggaggtcaaggcgaatatttaacttatatctgcctgtcagtgacaaacaagaaacccacacaggcgtccatcacaaaggtcaaacagtttgaaggctccacatcatttgttcggagatcacagtggatgctcgagcagcttcgccaggttaatggtatcgatcctaatggggattcggcagagtttgatttgttgtttgaaaatgcttttgaccagtgggtagccagcacagcgtcagaaaaatgcaccttcttccagatcctccaccatacctgccagaggtacctcacggacaggaagccagagtttattaactgccaatccaaaattatgggaggaaacagcatcctccattcagctgctgacagcgtgaccagcgcagtgcagaaggcaagccaggccttgaatgagcgtggagagcgattaggccgagcagaggagaagacagaagacctgaagaacagcgcccagcagtttgcagaaactgcgcacaagcttgccatgaagcacaaatgttgagaaactgcctatcctggtgactcttcttaagagaaactgaagagtttgttcagcagtttttacaagaattcgggacctccgcttgcttctttttttccaatatttggacacttagagtggtttttgttttttcttttcagatgttaatgtgaaagaaagggtgttgcatttttacatttccctaatgatcttgctaataaatgctacaatagcatcagcttcattttgggtttttgcctcctcccactgtgtgtatgtgtgtatatgtatgttttgaatatgttttctttattaaaaaatattttttgtagtttgaatatgaaatttggaccaaatgataaactgcgctgagtctaaactggcaacatgtatttttttctctgatattaagcaggaaggcattttaatgtggtgacatcagatgttatttttcctagatgaaaataaaagtcaagcagtgattagtttcactcactgtcctagctacacttaatttgaagattaaaattctacattgtggaaaacaattgaatttattgggaaaaacagcagtcttagattttgctccttgcatagtaatcttttgcatgaaccatcaccagcgttcaaaaaaaaaaaatcagaatcgcagatagaaatctctttcctgagttacagtttaaatactcttgctacttgtatccagggtgtttacttggaattatcatatgaagggtaaaaatttgagagtaaagccctaaagaaaagcctacctaaaaccctctgtgtactcacagatgtttctcttgtcactgtcatagtgatggtcgctggtatggaaaagtgcttatatttttatcaaaaaattgatttgtccaggtaaaggtctgtgtcaatgataatgtgaacaagtagtacatttaaaatgtttgtcttgtctttttacagtcatgcctattttagagacaccttcataatgtccttgggagagggcctttagtttcttggtatctggattttggaggttttgatgttgtttttgctatctatttatttaatgtaatttaatatgtgagtttcttgacaaattgcatttcatggcaattgcaccttgcctggtctgatataaaacaccacaatcacaaacctttacattgcagtcagtttcagggagtaagtacttcaaagacagaagacactggcacacattatggaggagatcctctagagcac

SEQ ID NO: 309945 - DNA, 2020 bp, Homo sapiens
acagttggctcttggtaggtgaggcttccccggacgggttgagtgctcctgcttagaatgtaagctccatgagggaaagtactttgttgctcttcttctcctcagtatcctcagcgttaggacaatgcagtgatattgaatgaattcactgcgtgctgtcctcacttgttctacaatgagtgccaaatctgctatcagcaaggaaatttttgcacctcttgatgaaaggatgctgggagctgtccaagtcaagaggaggacaaagaaaaagattcctttcttggcaactggaggtcaaggcgaatatttaacttatatctgcctgtcagtgacaaacaagaaacccacacaggcgtccatcacaaaggtcaaacagtttgaaggctccacatcatttgttcggagatcacagtggatgctcgagcagcttcgccaggttaatggtatcgatcctaatggggattcggcagagtttgatttgttgtttgaaaatgcttttgaccagtgggtagccagcacagcgtcagaaaaatgcaccttcttccagatcctccaccatacctgccagaggtacctcacggacaggaagccagagtttattaactgccaatccaaaattatgggaggaaacagcatcctccattcagctgctgacagcgtgaccagcgcagtgcagaaggcaagccaggccttgaatgagcgtggagagcgattaggccgagcagaggagaagacagaagacctgaagaacagcgcccagcagtttgcagaaactgcgcacaagcttgccatgaagcacaaatgttgagaaactgcctatcctggtgactcttcttaagagaaactgaagagtttgttcagcagtttttacaagaattcgggacctccgcttgcttctttttttccaatatttggacacttagagtggtttttgttttttcttttcagatgttaatgtgaaagaaagggtgttgcatttttacatttccctaatgatcttgctaataaatgctacaatagcatcagcttcattttgggtttttgcctcctcccactgtgtgtatgtgtgtatatgtatgttttgaatatgttttctttattaaaaaatattttttgtagtttgaatatgaaatttggaccaaatgataaactgcgctgagtctaaactggcaacatgtatttttttctctgatattaagcaggaaggcattttaatgtggtgacatcagatgttatttttcctagatgaaaataaaagtcaagcagtgattagtttcactcactgtcctagctacacttaatttgaagattaaaattctacattgtggaaaacaattgaatttattgggaaaaacagcagtcttagattttgctccttgcatagtaatcttttgcatgaaccatcaccagcgttcaaaaaaaaaaaatcagaatcgcagatagaaatctctttcctgagttacagtttaaatactcttgctacttgtatccagggtgtttacttggaattatcatatgaagggtaaaaatttgagagtaaagccctaaagaaaagcctacctaaaaccctctgtgtactcacagatgtttctcttgtcactgtcatagtgatggtcgctggtatggaaaagtgcttatatttttatcaaaaaattgatttgtccaggtaaaggtctgtgtcaatgataatgtgaacaagtagtacatttaaaatgtttgtcttgtctttttacagtcatgcctattttagagacaccttcataatgtccttgggagagggcctttagtttcttggtatctggattttggaggttttgatgttgtttttgctatctatttatttaatgtaatttaatatgtgagtttcttgacaaattgcatttcatggcaattgcaccttgcctggtctgatataaaacaccacaatcacaaacctttacattgcagtcagtttcagggagtaagtacttcaaagacagaagacactggcacacattatggaggagatcctctagagcac

SEQ ID NO: 309946 - DNA, 2013 bp, Homo sapiens
ctgaaagcttttctaactcacttggtggtaagatcggacttgaacaaataatgtaagctccatgagggaaagtactttgttgctcttcttctcctcagtatcctcagcgttaggacaatgcagtgatattgaatgaattcactgcgtgctgtcctcacttgttctacaatgagtgccaaatctgctatcagcaaggaaatttttgcacctcttgatgaaaggatgctgggagctgtccaagtcaagaggaggacaaagaaaaagattcctttcttggcaactggaggtcaaggcgaatatttaacttatatctgcctgtcagtgacaaacaagaaacccacacaggcgtccatcacaaaggtcaaacagtttgaaggctccacatcatttgttcggagatcacagtggatgctcgagcagcttcgccaggttaatggtatcgatcctaatggggattcggcagagtttgatttgttgtttgaaaatgcttttgaccagtgggtagccagcacagcgtcagaaaaatgcaccttcttccagatcctccaccatacctgccagaggtacctcacggacaggaagccagagtttattaactgccaatccaaaattatgggaggaaacagcatcctccattcagctgctgacagcgtgaccagcgcagtgcagaaggcaagccaggccttgaatgagcgtggagagcgattaggccgagcagaggagaagacagaagacctgaagaacagcgcccagcagtttgcagaaactgcgcacaagcttgccatgaagcacaaatgttgagaaactgcctatcctggtgactcttcttaagagaaactgaagagtttgttcagcagtttttacaagaattcgggacctccgcttgcttctttttttccaatatttggacacttagagtggtttttgttttttcttttcagatgttaatgtgaaagaaagggtgttgcatttttacatttccctaatgatcttgctaataaatgctacaatagcatcagcttcattttgggtttttgcctcctcccactgtgtgtatgtgtgtatatgtatgttttgaatatgttttctttattaaaaaatattttttgtagtttgaatatgaaatttggaccaaatgataaactgcgctgagtctaaactggcaacatgtatttttttctctgatattaagcaggaaggcattttaatgtggtgacatcagatgttatttttcctagatgaaaataaaagtcaagcagtgattagtttcactcactgtcctagctacacttaatttgaagattaaaattctacattgtggaaaacaattgaatttattgggaaaaacagcagtcttagattttgctccttgcatagtaatcttttgcatgaaccatcaccagcgttcaaaaaaaaaaaatcagaatcgcagatagaaatctctttcctgagttacagtttaaatactcttgctacttgtatccagggtgtttacttggaattatcatatgaagggtaaaaatttgagagtaaagccctaaagaaaagcctacctaaaaccctctgtgtactcacagatgtttctcttgtcactgtcatagtgatggtcgctggtatggaaaagtgcttatatttttatcaaaaaattgatttgtccaggtaaaggtctgtgtcaatgataatgtgaacaagtagtacatttaaaatgtttgtcttgtctttttacagtcatgcctattttagagacaccttcataatgtccttgggagagggcctttagtttcttggtatctggattttggaggttttgatgttgtttttgctatctatttatttaatgtaatttaatatgtgagtttcttgacaaattgcatttcatggcaattgcaccttgcctggtctgatataaaacaccacaatcacaaacctttacattgcagtcagtttcagggagtaagtacttcaaagacagaagacactggcacacattatggaggagatcctctagagcac

SEQ ID NO: 309947 - DNA, 2373 bp, Homo sapiens
tgcttcgcaggcgctcgcactcggcggcgggcgggcgcgcggctgcagctggagctccagcgcccggagttggagttgccgggagtttccccccaacccctcccttttcgcgcgcggcagcaggagccggcgcgggagccgcgagcggcggcgagccagcacccgggccggctaagccttgtccggagcccggagcccggagccccgcgcggggcagccccccggggaggagcctcgtgctctgggacgcgtgccgcgcactggcacggctggggcgcgagccaggctgcacgtttcctgtttagaaagttctgctccttcataaggaccttgaagtactaggaggaaaggtgctttgtgtgtggagttttccatgaagtgcagtcccaactaaaaggctgcgttaaagaatgtaagctccatgagggaaagtactttgttgctcttcttctcctcagtatcctcagcgttaggacaatgcagtgatattgaatgaattcactgcgtgctgtcctcacttgttctacaatgagtgccaaatctgctatcagcaaggaaatttttgcacctcttgatgaaaggatgctgggagctgtccaagtcaagaggaggacaaagaaaaagattcctttcttggcaactggaggtcaaggcgaatatttaacttatatctgcctgtcagtgacaaacaagaaacccacacaggcgtccatcacaaaggtcaaacagtttgaaggctccacatcatttgttcggagatcacagtggatgctcgagcagcttcgccaggttaatggtatcgatcctaatggggattcggcagagtttgatttgttgtttgaaaatgcttttgaccagtgggtagccagcacagcgtcagaaaaatgcaccttcttccagatcctccaccatacctgccagaggtacctcacggacaggaagccagagtttattaactgccaatccaaaattatgggaggaaacagcatcctccattcagctgctgacagcgtgaccagcgcagtgcagaaggcaagccaggccttgaatgagcgtggagagcgattaggccgagcagaggagaagacagaagacctgaagaacagcgcccagcagtttgcagaaactgcgcacaagcttgccatgaagcacaaatgttgagaaactgcctatcctggtgactcttcttaagagaaactgaagagtttgttcagcagtttttacaagaattcgggacctccgcttgcttctttttttccaatatttggacacttagagtggtttttgttttttcttttcagatgttaatgtgaaagaaagggtgttgcatttttacatttccctaatgatcttgctaataaatgctacaatagcatcagcttcattttgggtttttgcctcctcccactgtgtgtatgtgtgtatatgtatgttttgaatatgttttctttattaaaaaatattttttgtagtttgaatatgaaatttggaccaaatgataaactgcgctgagtctaaactggcaacatgtatttttttctctgatattaagcaggaaggcattttaatgtggtgacatcagatgttatttttcctagatgaaaataaaagtcaagcagtgattagtttcactcactgtcctagctacacttaatttgaagattaaaattctacattgtggaaaacaattgaatttattgggaaaaacagcagtcttagattttgctccttgcatagtaatcttttgcatgaaccatcaccagcgttcaaaaaaaaaaaatcagaatcgcagatagaaatctctttcctgagttacagtttaaatactcttgctacttgtatccagggtgtttacttggaattatcatatgaagggtaaaaatttgagagtaaagccctaaagaaaagcctacctaaaaccctctgtgtactcacagatgtttctcttgtcactgtcatagtgatggtcgctggtatggaaaagtgcttatatttttatcaaaaaattgatttgtccaggtaaaggtctgtgtcaatgataatgtgaacaagtagtacatttaaaatgtttgtcttgtctttttacagtcatgcctattttagagacaccttcataatgtccttgggagagggcctttagtttcttggtatctggattttggaggttttgatgttgtttttgctatctatttatttaatgtaatttaatatgtgagtttcttgacaaattgcatttcatggcaattgcaccttgcctggtctgatataaaacaccacaatcacaaacctttacattgcagtcagtttcagggagtaagtacttcaaagacagaagacactggcacacattatggaggagatcctctagagcac

SEQ ID NO: 309948 - DNA, 1385 bp, Homo sapiens
tgcttcgcaggcgctcgcactcggcggcgggcgggcgcgcggctgcagctggagctccagcgcccggagttggagttgccgggagtttccccccaacccctcccttttcgcgcgcggcagcaggagccggcgcgggagccgcgagcggcggcgagccagcacccgggccggctaagccttgtccggagcccggagcccggagccccgcgcggggcagccccccggggaggagcctcgtgctctgggacgcgtgccgcgcactggcacggctggggcgcgagccaggctgcacgattcactgcgtgctgtcctcacttgttctacaatgagtgccaaatctgctatcagcaaggaaatttttgcacctcttgatgaaaggatgctgggagctgtccaagtcaagaggaggacaaagaaaaagattcctttcttggcaactggaggtcaaggcgaatatttaacttatatctgcctgtcagtgacaaacaagaaacccacacaggcgtccatcacaaaggtcaaacagtttgaaggctccacatcatttgttcggagatcacagtggatgctcgagcagcttcgccaggttaatggtatcgatcctaatggggattcggcagagtttgatttgttgtttgaaaatgcttttgaccagtgggtagccagcacagcgtcagaaaaatgcaccttcttccagatcctccaccatacctgccagaggtacctcacggacaggaagccagagtttattaactgccaatccaaaattatgggaggaaacagcatcctccattcagctgctgacagcgtgaccagcgcagtgcagaaggcaagccaggccttgaatgagcgtggagagcgattaggccgagcagaggagaagacagaagacctgaagaacagcgcccagcagtttgcagaaactgcgcacaagcttgccatgaagcacaaatgttgagaaactgcctatcctggtgactcttcttaagagaaactgaagagtttgttcagcagtttttacaagaattcgggacctccgcttgcttctttttttccaatatttggacacttagagtggtttttgttttttcttttcagatgttaatgtgaaagaaagggtgttgcatttttacatttccctaatgatcttgctaataaatgctacaatagcatcagcttcattttgggtttttgcctcctcccactgtgtgtacggtgtcgctattagcgacaccgtacagggaggaatttgaagtagatagaaaccgacctggattactcccgtctgaactcagatcacgtaggacttaaatcgttgaacaaacgaacctttaatagcggctgcccatcgggatgtctgatcaacttcaggtcgtaccctatgt

SEQ ID NO: 309949 - DNA, 1174 bp, Homo sapiens
tgcttcgcaggcgctcgcactcggcggcgggcgggcgcgcggctgcagctggagctccagcgcccggagttggagttgccgggagtttccccccaacccctcccttttcgcgcgcggcagcaggagccggcgcgggagccgcgagcggcggcgagccagcacccgggccggctaagccttgtccggagcccggagcccggagccccgcgcggggcagccccccggggaggagcctcgtgctctgggacgcgtgccgcgcactggcacggctggggcgcgagccaggctgcacgattcactgcgtgctgtcctcacttgttctacaatgagtgccaaatctgctatcagcaaggaaatttttgcacctcttgatgaaaggatgctgggagctgtccaagtcaagaggaggacaaagaaaaagattcctttcttggcaactggaggtcaaggcgaatatttaacttatatctgcctgtcagtgacaaacaagaaacccacacaggcgtccatcacaaaggtcaaacagtttgaaggctccacatcatttgttcggagatcacagtggatgctcgagcagcttcgccaggttaatggtatcgatcctaatggggattcggcagagtttgatttgttgtttgaaaatgcttttgaccagtgggtagccagcacagcgtcagaaaaatgcaccttcttccagatcctccaccatacctgccagaggtacctcacggacaggaagccagagtttattaactgccaatccaaaattatgggaggaaacagcatcctccattcagctgctgacagcgtgaccagcgcagtgcagaaggcaagccaggccttgaatgagcgtggagagcgattaggccgagcagaggagaagacagaagacctgaagaacagcgcccagcagtttgcagaaactgcgcacaagcttgccatgaagcacaaatgttgagaaactgcctatcctggtgactcttcttaagagaaactgaagagtttgttcagcagtttttacaagaattcgggacctccgcttgcttctttttttccaatatttggacacttagagtggtttttgttttttcttttcagatgttaatgtgaaagaaagggtgttgcatttttacatttccctaatgatcttgctaataaatgctacaatagcatc

SEQ ID NO: 309950 - DNA, 1600 bp, Homo sapiens
tggcacggtgaagagacatgagaggtgatcttgaagatcacctcatcattatacttcttatgttaccatgaagtctatgtaactaattatgttaaaaaatttgaacaggatcaagcacgtagtatctatatagtaactattgcttctgccattcttcaaggtttactttttaatcagagtattttgtgaatccaaaattatgggaggaaacagcatcctccattcagctgctgacagcgtgaccagcgcagtgcagaaggcaagccaggccttgaatgagcgtggagagcgattaggccgagcagaggagaagacagaagacctgaagaacagcgcccagcagtttgcagaaactgcgcacaagcttgccatgaagcacaaatgttgagaaactgcctatcctggtgactcttcttaagagaaactgaagagtttgttcagcagtttttacaagaattcgggacctccgcttgcttctttttttccaatatttggacacttagagtggtttttgttttttcttttcagatgttaatgtgaaagaaagggtgttgcatttttacatttccctaatgatcttgctaataaatgctacaatagcatcagcttcattttgggtttttgcctcctcccactgtgtgtatgtgtgtatatgtatgttttgaatatgttttctttattaaaaaatattttttgtagtttgaatatgaaatttggaccaaatgataaactgcgctgagtctaaactggcaacatgtatttttttctctgatattaagcaggaaggcattttaatgtggtgacatcagatgttatttttcctagatgaaaataaaagtcaagcagtgattagtttcactcactgtcctagctacacttaatttgaagattaaaattctacattgtggaaaacaattgaatttattgggaaaaacagcagtcttagattttgctccttgcatagtaatcttttgcatgaaccatcaccagcgttcaaaaaaaaaaaatcagaatcgcagatagaaatctctttcctgagttacagtttaaatactcttgctacttgtatccagggtgtttacttggaattatcatatgaagggtaaaaatttgagagtaaagccctaaagaaaagcctacctaaaaccctctgtgtactcacagatgtttctcttgtcactgtcatagtgatggtcgctggtatggaaaagtgcttatatttttatcaaaaaattgatttgtccaggtaaaggtctgtgtcaatgataatgtgaacaagtagtacatttaaaatgtttgtcttgtctttttacagtcatgcctattttagagacaccttcataatgtccttgggagagggcctttagtttcttggtatctggattttggaggttttgatgttgtttttgctatctatttatttaatgtaatttaatatgtgagtttcttgacaaattgcatttcatggcaattgcaccttgcctggtctgatataaaacaccacaatcacaaacctttacattgcagtcagtttcagggagtaagtacttcaaagacagaagacactggcacacattatggaggagatcctctagagcac

SEQ ID NO: 309951 - DNA, 985 bp, Homo sapiens
  misc_feature (654)..(654): n is a, c, g, or t
  misc_feature (714)..(714): n is a, c, g, or t
  misc_feature (721)..(721): n is a, c, g, or t
  misc_feature (788)..(788): n is a, c, g, or t
ctgaaagcttttctaactcacttggtggtaagatcggacttgaacaaataatgtaagctccatgagggaaagtactttgttgctcttcttctcctcagtatcctcagcgttaggacaatgcagtgatattgaatgaattcactgcgtgctgtcctcacttgttctacaatgagtgccaaatctgctatcagcaaggaaatttttgcacctcttgatgaaaggatgctgggagctgtccaagtcaagaggaggacaaagaaaaagattcctttcttggcaactggaggtcaaggcgaatatttaacttatatctgcctgtcagtgacaaacaagaaacccacacaggcgtccatcacaaaggtcaaacagtttgaaggctccacatcatttgttcggagatcacagtggatgctcgagcagcttcgccaggttaatggtatcgatcctaatggggattcggcagagtttgatttgttgtttgaaaatgcttttgaccagtgggtagccagcacagcgtcagaaaaatgcaccttcttccagatcctccaccatacctgccagaggtacctcacggacaggaagccagagtttattaactgccaatccaaaattatgggaggaaccagcatctcattagttgtgacacgtgacagngcacgacgaggaaccaagccttgatgacgtgggagcgatatgccagcaaaggaagcagangactganaacacggcagcatttgagaactgccacagcttgcatgagcccaatgtgagaactgctatctcgtatnctcttagagaactgagagtggtaacagttttcagaatcggcctccgctggtctttttcaaaattgcaccttagggtttggtttcttacagcgtatggaaaacgggtcgctttacattctatgactgctatagcgtcatactaacttctttgggttgcgcccactgggattgggaatgaagttgagacgtcttattaa

SEQ ID NO: 309952 - DNA, 2136 bp, Homo sapiens
gtggcgcgcacgcgcagctccgcttccgggagccgctcctcgctacccactatgctctgcgacatcgacctgtcgcaaaggccgcgtttgcggggccaatgagcgactcgctttccgtgcggtgcggcgagtgaggccccggtcttcctcctcgtcctgccgcagggccagaacccctgacggtattcagctgcgcgtaagtctggccggtgccatctgtctccgcaatgccccccaagaaacaggctcaggccgggggcagcaaaaaggcggagcaaaaaaagaaggagaagattatcgaagacaaaactttcggtttgaagaataagaaaggagcaaagcaacagaagtttatcaaggctgtcacacatcaagttaaatttggtcaacaaaatccacgtcaggtagcacagagtgaagctgaaaagaaattgaagaaggatgacaagaagaaagaattgcaggagctaaatgagctgttcaaacctgtagttgctgctcaaaaaataagtaaaggtgcagatcccaagtctgtagtatgtgcattcttcaagcaaggacagtgtactaaaggagataagtgtaagttctcccatgacttgactctggagagaaaatgtgaaaagcgaagtgtttacattgatgcaagagatgaagaacttgaaaaagatactatggataattgggatgagaaaaagctggaagaagtagtgaacaagaagcacggtgaggcggaaaagaaaaaaccaaaaactcaaatagtgtgcaagcatttcctggaagctattgaaaacaacaagtatggctggttttgggtatgccctggagggggtgatatttgcatgtatcgtcatgcacttcctcctggatttgtgttgaaaaaagataaaaagaaagaagagaaagaagatgaaatttcattagaagatctaattgagagagagcgttctgccctaggtccaaatgttaccaaaatcactctagaatcttttcttgcctggaagaaaaggaaaagacaagaaaagattgataaacttgaacaagatatggaaagaaggaaagctgacttcaaagcagggaaagcactagtgatcagtggtcgtgaagtgtttgaatttcgtcctgaactggtcaatgatgatgatgaggaagcagatgatacccgctacacccagggaacaggtggtgatgaggttgatgattcagtgagtgtaaatgacatagatttaagcctgtacatcccaagagatgtagatgaaacaggtattactgtagccagtcttgaaagattcagcacatatacttcagataaagatgaaaacaaattaagtgaagcttctggaggtagggctgaaaatggtgaaagaagtgacttggaagaggacaacgagagggagggaacggaaaatggagccattgatgctgttcctgttgatgaaaatcttttcactggagaggatttggatgaactagaagaagaattaaatacacttgatttagaagaatgacaccaaacacatcgctgaaaaaattaagtcagctcagcacgagttgaaattgactacattaatttctttccacctagaatcaacaggatgtttatttcctatgctgattctggaggagttaacctcctgcaaaaaaggcatcttgtccctacatcttctcttctgactttggctacatctcatagtaagttcagagtagttcatgataaattgaaaatataatggtcattgcagaaaatgattgatgttgtaactgtccacccaagtaagaagtgtatctgcctttccatcttttggttttcatttgggcatgtgctattaccagaaacaacaaacttatatttaaaatacccttcatttgacacagtttttaatgagtgatttaatttcctctgtatttgtatgtttagaagactgcctaaaacatgagcactgtacttcataaaggaaactgcgtatgcagattcagtattgtgtatctttggacaattagatggacatttaaaatggaacttcttttatctgacaggatcagctacaatgccctgtgttaaattgtttaaaagtttcccttttcttttttgccaataaagttgtaaataaagaccatcatacattaaaatccaaa

SEQ ID NO: 309953 - DNA, 1451 bp, Homo sapiens
gagatgtttgaaataactaaaatctaaattaggctgttaaaaaatgtctgtgtaattgtcaatggcattgaacaagaaaaggcagcattttttttctctcagttatttataacctataagaaaaagtagctgtatagcactatgtttttttttaacaatttgattacatgatgaagattttctgctgtcacaatcacagcattacaacagcatgatttaaatactatttgcaaaaccaaaagccaagtagctgcttatattacaaacatttttttggtttccataaccatttagtcaaataaaatattatatggaaattgactatttaaaatctaattgctaggtcatgtagggaacacagaggtgtagaagattgatcctgccctcaaatgtataaaccattaagtagtcaaatggctacagtgaaaaacagtattttatagtaggtatagataattggcacagataagctcagaaaagaatgatcagttcttgctggagtaattctagggaaatggctttcatggagaaaaggaaaagaggaagtgtagtatcagtctatgttgtctattgctaatgtggaatggtgttttctgcttctacgccttactgattccagtttttatatttagaaaacaaattaagtgaagcttctggaggtagggctgaaaatggtgaaagaagtgacttggaagaggacaacgagagggagggaacggaaaatggagccattgatgctgttcctgttgatgaaaatcttttcactggagaggatttggatgaactagaagaagaattaaatacacttgatttagaagaatgacaccaaacacatcgctgaaaaaattaagtcagctcagcacgagttgaaattgactacattaatttctttccacctagaatcaacaggatgtttatttcctatgctgattctggaggagttaacctcctgcaaaaaaggcatcttgtccctacatcttctcttctgactttggctacatctcatagtaagttcagagtagttcatgataaattgaaaatataatggtcattgcagaaaatgattgatgttgtaactgtccacccaagtaagaagtgtatctgcctttccatcttttggttttcatttgggcatgtgctattaccagaaacaacaaacttatatttaaaatacccttcatttgacacagtttttaatgagtgatttaatttcctctgtatttgtatgtttagaagactgcctaaaacatgagcactgtacttcataaaggaaactgcgtatgcagattcagtattgtgtatctttggacaattagatggacatttaaaatggaacttcttttatctgacaggatcagctacaatgccctgtgttaaattgtttaaaagtttcccttttcttttttgccaataaagttgtaaataaagaccatcatacattaaaatccaaa

SEQ ID NO: 309954 - DNA, 1530 bp, Homo sapiens
acagcaggagggattgatcgagctcagtcaatcaaggctgattgagggaggttagggcttcagtaggccgtgatcatgctatcacactccatcctgagcaacagtgagaccccgtctcaacaaaaagaaaaagaaaaatgtgttaagccatgagtcttataacacagcattagtgtctaaggagatatgtgttgtgggagtagtagataagattacagtatttaatcttcatttctttatttagatactatggataattgggatgagaaaaagctggaagaagtagtgaacaagaagcacggtgaggcggaaaagaaaaaaccaaaaactcaaatagtatgtccttttcttgaattgagttgctgtgatatttatcattagggagaattatgtggcaaggtatttgctgctattttctattagattattctgtaagttactggaaaatttgatttcatcaagataaggtacacgaagctttatttttggaatttacaagttagattttatagattcttgttcagaaatagctgaacaagaataaaactatgttaccgaagtcctttaaatgccattttctgaggtgaacgttctcaaatatggataaacaaaattacatatccagacaaaaatccctatttttttgcacagagtggaaggaggcctgttaaactaacccacttaataatgtatttagttttaatagggatagatttttaaattttaaggtttaaaatatttctacatatgaattccaaaatgaatttttggtaggtagtggctctaattccaggaaatgtacctttaaaaattggttcttgatgtctcaaactttgcatttatgtctatatttatagtgaagttacagtaaaaagtcttgctgtgctagaataattctaaatactacattcatacacatctgttatgtttgtttttgggggcggatactgtttgttaattttctcttacttgcaaagcttaatacttgaggcttaaatacaattgtatcttctatccatgttgtgaagggtcactctctttgtgttccttttgtaccttgctcctgtatactgcttgtgattcatttttatttcggaaagatcaaaccaaagaaaatcatttattctatttattttatttttgaggcggagttttgctcttgttgcccaagctggagtgcagtggcgcaatcttagctcactgcaacctctgcttcccgggttcaagagattctcctgcgtcagcctcccaagtagctggggttacaggcatgtgccaccacggccagctaattttttgtatttttagtagaagtggaggttcaccatgttagccaggctggtcttgaactcctgacctcagcaggtgatccgcccgcctcggcctcccaaagtgctgggattataggtgtaagccacaacgcctggcctgattttattttttatagctaattgtatattctgattcgggggcgtacatttacaaagggtaactgaaacagaatatacaattagctataaaaaaaaaaaa

SEQ ID NO: 309955 - DNA, 801 bp, Homo sapiens
tataccaccttgctattctttttaaacgaagtttagaaaaaataattttgaaaatagatcttttgtttttgttttttatagagacaaggtctggctttgttgctcaggctggtctcaaactcctaagcccaggtgatcctccacctcgacctcccaaagtgttgggattacaggtgtgagcctccacacctggccagtaattggtcttttgttttcacttggatcagtgataattttggctcattaagataaatgtcaggagtaaaagaaaactgttcttatttgtaacaactttcttttctatatgttgttaaaggttgatgattcagtgagtgtaaatgacatagatttaagcctgtacatcccaagagatgtagatgaaacaggtattactgtagccagtcttgaaagattcagcacatatacttcagataaagatgggtaagtatgctaacttttgcctaattttaagaactaggaagttatctaaagggggttataccaggcttggcaaacttagatgtgtgcaggtaccagattggtaacataaatgtgtggtttgaccataaataaaagcagtaataaatagtgaaaggctgtagacatgagcagctgggtgtatattaaaatcattaatggaaactagaaggagacaaaaatgagtttggagttaaagtcaatgagttcacttcgggacctcatgagtttgagattttttgattatcaaaagtgcactgtctaggatattgtgtagacatgaacaccctacagaacatcagtgttatggggtaagtaaaagaa

SEQ ID NO: 309956 - DNA, 370 bp, Homo sapiens
taagttactggttgtaattggttataggaatagggtgccagtttcattgagactgcaatgataacggtgagaagaaaaatgaatacagtcctctctctcttaatgtttagagggaagacatggtcatgggaagggctttttaggatatggaaaacctaaatgtatctgtagctcagaggaagaggatctggtaaggaggagaagttgatgataaaagattagttatagaagcaatacatgaaagtataaataatgagttaggtatgagaatggagggaaggctgtctagggttgttggtataatttatgtctaattgtgccttgagttaggtacttgaagaaaggggtaaaagtttggcatgcttgctct

SEQ ID NO: 309957 - DNA, 2216 bp, Homo sapiens
gtggcgcgcacgcgcagctccgcttccgggagccgctcctcgctacccactatgctctgcgacatcgacctgtcgcaaaggccgcgtttgcggggccaatgagcgactcgctttccgtgcggtgcggcgagtgaggccccggtcttcctcctcgtcctgccgcagggccagaacccctgacggtattcagctgcgcgtaagtctggccggtgccatctgtctccgcaatgccccccaagaaacaggctcaggccgggggcagcaaaaaggcggagcaaaaaaagaaggagaagattatcgaagacaaaactttcggtttgaagaataagaaaggagcaaagcaacagaagtttatcaaggctgtcacacatcaagttaaatttggtcaacaaaatccacgtcaggtagcacagagtgaagctgaaaagaaattgaagaaggatgacaagaagaaagaattgcaggagctaaatgagctgttcaaacctgtagttgctgctcaaaaaataagtaaaggtgcagatcccaagtctgtagtatgtgcattcttcaagcaaggacagtgtactaaaggagataagtgtaagttctcccatgacttgactctggagagaaaatgtgaaaagcgaagtgtttacattgatgcaagagatgaagaacttgaaaaagatactatggataattgggatgagaaaaagctggaagaagtagtgaacaagaagcacggtgaggcggaaaagaaaaaaccaaaaactcaaatagtgtgcaagcatttcctggaagctattgaaaacaacaagtatggctggttttgggtatgccctggagggggtgatatttgcatgtatcgtcatgcacttcctcctggatttgtgttgaaaaaagataaaaagaaagaagagaaagaagatgaaatttcattagaagatctaattgagagagagcgttctgccctaggtccaaatgttaccaaaatcactctagaatcttttcttgcctggaagaaaaggaaaagacaagaaaagattgataaacttgaacaagatatggaaagaaggaaagctgacttcaaagcagggaaagcactagtgatcagtggtcgtgaagtgtttgaatttcgtcctgaactggtcaatgatgatgatgaggaagcagatgatacccgctacacccagggaacaggtggtgatgaggttgatgattcagtgagtgtaaatgacatagatttaagcctgtacatcccaagagatgtagatgaaacaggtattactgtagccagtcttgaaagattcagcacatatacttcagataaagatgagggaagacatggtcatgggaagggctttttaggatatggaaaacctaaatgtatctgtagctcagaggaagaggatctgaaaacaaattaagtgaagcttctggaggtagggctgaaaatggtgaaagaagtgacttggaagaggacaacgagagggagggaacggaaaatggagccattgatgctgttcctgttgatgaaaatcttttcactggagaggatttggatgaactagaagaagaattaaatacacttgatttagaagaatgacaccaaacacatcgctgaaaaaattaagtcagctcagcacgagttgaaattgactacattaatttctttccacctagaatcaacaggatgtttatttcctatgctgattctggaggagttaacctcctgcaaaaaaggcatcttgtccctacatcttctcttctgactttggctacatctcatagtaagttcagagtagttcatgataaattgaaaatataatggtcattgcagaaaatgattgatgttgtaactgtccacccaagtaagaagtgtatctgcctttccatcttttggttttcatttgggcatgtgctattaccagaaacaacaaacttatatttaaaatacccttcatttgacacagtttttaatgagtgatttaatttcctctgtatttgtatgtttagaagactgcctaaaacatgagcactgtacttcataaaggaaactgcgtatgcagattcagtattgtgtatctttggacaattagatggacatttaaaatggaacttcttttatctgacaggatcagctacaatgccctgtgttaaattgtttaaaagtttcccttttcttttttgccaataaagttgtaaataaagaccatcatacattaaaatccaaa

SEQ ID NO: 309958 - DNA, 2074 bp, Homo sapiens
gtggcgcgcacgcgcagctccgcttccgggagccgctcctcgctacccactatgctctgcgacatcgacctgtcgcaaaggccgcgtttgcggggccaatgagcgactcgctttccgtgcggtgcggcgagtgaggccccggtcttcctcctcgtcctgccgcagggccagaacccctgacggtattcagctgcgcgtaagtctggccggtgccatctgtctccgcaatgccccccaagaaacaggctcaggccgggggcagcaaaaaggcggagcaaaaaaagaaggagaagattatcgaagacaaaactttcggtttgaagaataagaaaggagcaaagcaacagaagtttatcaaggctgtcacacatcaagttaaatttggtcaacaaaatccacgtcaggtagcacagagtgaagctgaaaagaaattgaagaaggatgacaagaagaaagaattgcaggagctaaatgagctgttcaaacctgtagttgctgctcaaaaaataagtaaaggtgcagatcccaagtctgtagtatgtgcattcttcaagcaaggacagtgtactaaaggagataagtgtaagttctcccatgacttgactctggagagaaaatgtgaaaagcgaagtgtttacattgatgcaagagatgaagaacttgaaaaagatactatggataattgggatgagaaaaagctggaagaagtagtgaacaagaagcacggtgaggcggaaaagaaaaaaccaaaaactcaaatagtgtgcaagcatttcctggaagctattgaaaacaacaagtatggctggttttgggtatgccctggagggggtgatatttgcatgtatcgtcatgcacttcctcctggatttgtgttgaaaaaagataaaaagaaagaagagaaagaagatgaaatttcattagaagatctaattgagagagagcgttctgccctaggtccaaatgttaccaaaatcactctagaatcttttcttgcctggaagaaaaggaaaagacaagaaaagattgatcagtggtcgtgaagtgtttgaatttcgtcctgaactggtcaatgatgatgatgaggaagcagatgatacccgctacacccagggaacaggtggtgatgaggttgatgattcagtgagtgtaaatgacatagatttaagcctgtacatcccaagagatgtagatgaaacaggtattactgtagccagtcttgaaagattcagcacatatacttcagataaagatgaaaacaaattaagtgaagcttctggaggtagggctgaaaatggtgaaagaagtgacttggaagaggacaacgagagggagggaacggaaaatggagccattgatgctgttcctgttgatgaaaatcttttcactggagaggatttggatgaactagaagaagaattaaatacacttgatttagaagaatgacaccaaacacatcgctgaaaaaattaagtcagctcagcacgagttgaaattgactacattaatttctttccacctagaatcaacaggatgtttatttcctatgctgattctggaggagttaacctcctgcaaaaaaggcatcttgtccctacatcttctcttctgactttggctacatctcatagtaagttcagagtagttcatgataaattgaaaatataatggtcattgcagaaaatgattgatgttgtaactgtccacccaagtaagaagtgtatctgcctttccatcttttggttttcatttgggcatgtgctattaccagaaacaacaaacttatatttaaaatacccttcatttgacacagtttttaatgagtgatttaatttcctctgtatttgtatgtttagaagactgcctaaaacatgagcactgtacttcataaaggaaactgcgtatgcagattcagtattgtgtatctttggacaattagatggacatttaaaatggaacttcttttatctgacaggatcagctacaatgccctgtgttaaattgtttaaaagtttcccttttcttttttgccaataaagttgtaaataaagaccatcatacattaaaatccaaa

SEQ ID NO: 309959 - DNA, 2205 bp, Homo sapiens
gtggcgcgcacgcgcagctccgcttccgggagccgctcctcgctacccactatgctctgcgacatcgacctgtcgcaaaggccgcgtttgcggggccaatgagcgactcgctttccgtgcggtgcggcgagtgaggccccggtcttcctcctcgtcctgccgcagggccagaacccctgacggtattcagctgcgcgtaagtctggccggtgccatctgtctccgcaatgccccccaagaaacaggctcaggccgggggcagcaaaaaggcggagcaaaaaaagaaggagaagattatcgaagacaaaactttcggtttgaagaataagaaaggagcaaagcaacagaagtttatcaaggctgtcacacatcaagttaaatttggtcaacaaaatccacgtcaggtagcacagagtgaagctgaaaagaaattgaagaaggatgacaagaagaaagaattgcaggagctaaatgagctgttcaaacctgtagttgctgctcaaaaaataagtaaaggtgcagatcccaagtctgtagtatgtgcattcttcaagcaaggacagtgtactaaaggagataagtgtaagttctcccatgacttgactctggagagaaaatgtgaaaagcgaagtgtttacattgatgcaagagatgaagaacttgaaaaagatactatggataattgggatgagaaaaagctggaagaagtagtgaacaagaagcacggtgaggcggaaaagaaaaaaccaaaaactcaaatagtgtgcaagcatttcctggaagctattgaaaacaacaagtatggctggttttgggtatgccctggagggggtgatatttgcatgtatcgtcatgcacttcctcctggatttgtgttgaaaaaagataaaaagaaagaagagaaagaagatgaaatttcattagaagatctaattgagagagagcgttctgccctaggtccaaatgttaccaaaatcactctagaatcttttcttgcctggaagaaaaggaaaagacaagaaaagattgataaacttgaacaagatatggaaagaaggaaagctgacttcaaagcagggaaagcactagtgatcagtggtcgtgaagtgtttgaatttcgtcctgaactggtcaatgatgatgatgaggaagcagatgatacccgctacacccagggaacaggtggtgatgaggttgatgattcagtgagtgtaaatgacatagatttaagcctgtacatcccaagagatgtagatgaaacaggtattactgtagccagtcttgaaagattcagcacatatacttcagataaagatgaaaacaaattaagtgaagcttctggaggtagggctgaaaatggtgaaagaagtgacttggaagaggacaacgagagggagggaacggaaaatggagccattgatgctgttcctgttgatgaaaatcttttcactggagaggatttggatgaactagaagaagaattaaatacacttgatttagaagaatgacaccaaacacatcgctgaaaaaattaagtcagctcagcacgagttgaaattgactacattaatttctttccacctagaatcaacaggatgtttatttcctatgctgattctggaggagttaacctcctgcaaaaaaggcatcttgtccctacatcttctcttctgactttggctacatctcatagtaagttcagagtagttcatgataaattgaaaatataatggtcattgcagaaaatgattgatgttgtaactgtccacccaagtaagaagtgtatctgcctttccatcttttggttttcatttgggcatgtgctattaccagaaacaacaaacttatatttaaaatacccttcatttgacacagtttttaatgagtgatttaatttcctctgtatttgtatgtttagaagactgcctaaaacatgagcactgtacttcataaaggaaactgcgtatgcagattcagtattgtgtatctttggacaattagatggacatttaaaatggaacttcttttatctgacaggatcagctacaatgccctgtgttaaattgtttaaaagtttcccttttcttttttgccaataaagttgtaaataaagaccatcatacattaaaatccaaaaacacaccagcccacaccacaaaaccaatgggggccgccagggcccaaaaagtttcaacccacgggggc

SEQ ID NO: 309960 - DNA, 2652 bp, Homo sapiens
gtggcgcgcacgcgcagctccgcttccgggagccgctcctcgctacccactatgctctgcgacatcgacctgtcgcaaaggccgcgtttgcggggccaatgagcgactcgctttccgtgcggtgcggcgagtgaggccccggtcttcctcctcgtcctgccgcagggccagaacccctgacggtattcagctgcgcgtaagtctggccggtgccatctgtctccgcaatgccccccaagaaacaggctcaggccgggggcagcaaaaaggcggagcaaaaaaagaaggagaagattatcgaagacaaaactttcggtttgaagaataagaaaggagcaaagcaacagaagtttatcaaggctgtcacacatcaagttaaatttggtcaacaaaatccacgtcaggtagcacagagtgaagctgaaaagaaattgaagaaggatgacaagaagaaagaattgcaggagctaaatgagctgttcaaacctgtagttgctgctcaaaaaataagtaaaggtgcagatcccaagtctgtagtatgtgcattcttcaagcaaggacagtgtactaaaggagataagtgtaagttctcccatgacttgactctggagagaaaatgtgaaaagcgaagtgtttacattgatgcaagagatgaagaacttgaaaaagatactatggataattgggatgagaaaaagctggaagaagtagtgaacaagaagcacggtgaggcggaaaagaaaaaaccaaaaactcaaatagtgtgcaagcatttcctggaagctattgaaaacaacaagtatggctggttttgggtatgccctggagggggtgatatttgcatgtatcgtcatgcacttcctcctggatttgtgttgaaaaaagataaaaagaaagaagagaaagaagatgaaatttcattagaagatctaattgagagagagcgttctgccctaggtccaaatgttaccaaaatcactctagaatcttttcttgcctggaagaaaaggaaaagacaagaaaagattgataaacttgaacaagatatggaaagaaggaaagctgacttcaaagcagggaaagcactagtgatcagtggtcgtgaagtgtttgaatttcgtcctgaactggtcaatgatgatgatgaggaagcagatgatacccgctacacccagggaacaggtggtgatgaggttgatgattcagtgagtgtaaatgacatagatttaagcctgtacatcccaagagatgtagatgaaacaggtattactgtagccagtcttgaaagattcagcacatatacttcagataaagatgaaaacaaattaagtgaagcttctggaggtagggctgaaaatggtgaaagaagtgacttggaagaggacaacgagagggagggaacggaaaatggagccattgatgctgttcctgttgatgaaaatcttttcactggagaggatttggatgaactagaagaagaattaaatacacttgatttagaagaatgacaccaaacacatcgctgaaaaaattaagtcagctcagcacgagttgaaattgactacattaatttctttccacctagaatcaacaggatgtttatttcctatgctgattctggaggagttaacctcctgcaaaaaaggcatcttgtccctacatcttctcttctgactttggctacatctcatagtaagttcagagtagttcatgataaattgaaaatataatggtcattgcagaaaatgattgatgttgtaactgtccacccaagtaagaagtgtatctgcctttccatcttttggttttcatttgggcatgtgctattaccagaaacaacaaacttatatttaaaatacccttcatttgacacagtttttaatgagtgatttaatttcctctgtatttgtatgtttagaagactgcctaaaacatgagcactgtacttcataaaggaaactgcgtatgcagattcagtattgtgtatctttggacaattagatggacatttaaaatggaacttcttttatctgacaggatcagctacaatgccctgtgttaaattgtttaaaagtttcccttttcttttttgccaataaagttgtaaataaagaccatcatacattaaaatccaaaaaaaaaaatgaaaaaaaaaattaaaataatgaaaagtgagactgaatgataaaggagtctctatatctctttatgtaaacattgcggtataaagtctcattccacatatgttacatgacaaacattctccataacactgttccatgcaccacttcataaccttaagctttaatatcgacgactgtgacagtacgaagtgcacataacgttacaatcttggatgccagatcaatcctcccaagacgacgcgtccacctggagttaatcggacgtccaccttagactgctaaacgttttaccggtttgtcggtaatcggggtcattgttcttatcatctaccttcacctttgcgaagattataacacaatagagtataaaagcacataatacgtctcgaaaatatttaaccccctatttactcgattctacaatcacgcaccccctccctccccacacgctctcaccctcacatccctatcctctaaacgtttgatctatctcttgcatagtaataca

SEQ ID NO: 309961 - DNA, 2309 bp, Homo sapiens
gtggcgcgcacgcgcagctccgcttccgggagccgctcctcgctacccactatgctctgcgacatcgacctgtcgcaaaggccgcgtttgcggggccaatgagcgactcgctttccgtgcggtgcggcgagtgaggccccggtcttcctcctcgtcctgccgcagggccagaacccctgacggtattcagctgcgcgtaagtctggccggtgccatctgtctccgcaatgccccccaagaaacaggctcaggccgggggcagcaaaaaggcggagcaaaaaaagaaggagaagattatcgaagacaaaactttcggtttgaagaataagaaaggagcaaagcaacagaagtttatcaaggctgtcacacatcaagttaaatttggtcaacaaaatccacgtcaggtagcacagagtgaagctgaaaagaaattgaagaaggatgacaagaagaaagaattgcaggagctaaatgagctgttcaaacctgtagttgctgctcaaaaaataagtaaaggtgcagatcccaagtctgtagtatgtgcattcttcaagcaaggacagtgtactaaaggagataagtgtaagttctcccatgacttgactctggagagaaaatgtgaaaagcgaagtgtttacattgatgcaagagatgaagaacttgaaaaagatactatggataattgggatgagaaaaagctggaagaagtagtgaacaagaagcacggtgaggcggaaaagaaaaaaccaaaaactcaaatagtgtgcaagcatttcctggaagctattgaaaacaacaagtatggctggttttgggtatgccctggagggggtgatatttgcatgtatcgtcatgcacttcctcctggatttgtgttgaaaaaagataaaaagaaagaagagaaagaagatgaaatttcattagaagatctaattgagagagagcgttctgccctaggtccaaatgttaccaaaatcactctagaatcttttcttgcctggaagaaaaggaaaagacaagaaaagattgataaacttgaacaagatatggaaagaaggaaagctgacttcaaagcagggaaagcactagtgatcagtggtcgtgaagtgtttgaatttcgtcctgaactggtcaatgatgatgatgaggaagcagatgatacccgctacacccagggaacaggtggtgatgaggttgatgattcagtgagtgtaaatgacatagatttaagcctgtacatcccaagagatgtagatgaaacaggtattactgtagccagtcttgaaagattcagcacatatacttcagataaagatgaaaacaaattaagtgaagcttctggaggtagggctgaaaatggtgaaagaagtgacttggaagaggacaacgagagggagggaacggaaaatggagccattgatgctgttcctgttgatgaaaatcttttcactggagaggatttggatgaactagaagaagaattaaatacacttgatttagaagaatgacaccaaacacatcgctgaaaaaattaagtcagctcagcacgagttgaaattgactacattaatttctttccacctagaatcaacaggatgtttatttcctatgctgattctggaggagttaacctcctgcaaaaaaggcatcttgtccctacatcttctcttctgactttggctacatctcatagtaagttcagagtagttcatgataaattgaaaatataatggtcattgcagaaaatgattgatgttgtaactgtccacccaagtaagaagtgtatctgcctttccatcttttggttttcatttgggcatgtgctattaccagaaacaacaaacttatatttaaaatacccttcatttgacacagtttttaatgagtgatttaatttcctctgtatttgtatgtttagaagactgcctaaaacatgagcactgtacttcataaaggaaactgcgtatgcagattcagtattgtgtatctttggacaattagatggacatttaaaatggaacttcttttatctgacaggatcagctacaatgccctgtgttaaattgtttaaaagtttcccttttcttttttgccaataaagttgtaaataaagaccatcatacattaaaatccaaaaaaaaaaaaatttgtggggctgggctgaaaaatttctaaacatttttggggggggccgtggtatggaaatgggcaacgggtcaaggaaacgggccagcatgggggtttttcacaaaaaaaaggcgggggacaggggttgacaaccaggggttggggtgggtcacaagggccgg

SEQ ID NO: 309962 - DNA, 2380 bp, Homo sapiens
gtggcgcgcacgcgcagctccgcttccgggagccgctcctcgctacccactatgctctgcgacatcgacctgtcgcaaaggccgcgtttgcggggccaatgagcgactcgctttccgtgcggtgcggcgagtgaggccccggtcttcctcctcgtcctgccgcagggccagaacccctgacggtattcagctgcgcgtaagtctggccggtgccatctgtctccgcaatgccccccaagaaacaggctcaggccgggggcagcaaaaaggcggagcaaaaaaagaaggagaagattatcgaagacaaaactttcggtttgaagaataagaaaggagcaaagcaacagaagtttatcaaggctgtcacacatcaagttaaatttggtcaacaaaatccacgtcaggtagcacagagtgaagctgaaaagaaattgaagaaggatgacaagaagaaagaattgcaggagctaaatgagctgttcaaacctgtagttgctgctcaaaaaataagtaaaggtgcagatcccaagtctgtagtatgtgcattcttcaagcaaggacagtgtactaaaggagataagtgtaagttctcccatgacttgactctggagagaaaatgtgaaaagcgaagtgtttacattgatgcaagagatgaagaacttgaaaaagatactatggataattgggatgagaaaaagctggaagaagtagtgaacaagaagcacggtgaggcggaaaagaaaaaaccaaaaactcaaatagtgtgcaagcatttcctggaagctattgaaaacaacaagtatggctggttttgggtatgccctggagggggtgatatttgcatgtatcgtcatgcacttcctcctggatttgtgttgaaaaaagataaaaagaaagaagagaaagaagatgaaatttcattagaagatctaattgagagagagcgttctgccctaggtccaaatgttaccaaaatcactctagaatcttttcttgcctggaagaaaaggaaaagacaagaaaagattgataaacttgaacaagatatggaaagaaggaaagctgacttcaaagcagggaaagcactagtgatcagtggtcgtgaagtgtttgaatttcgtcctgaactggtcaatgatgatgatgaggaagcagatgatacccgctacacccagggaacaggtggtgatgaggttgatgattcagtgagtgtaaatgacatagatttaagcctgtacatcccaagagatgtagatgaaacaggtattactgtagccagtcttgaaagattcagcacatatacttcagataaagatgaaaacaaattaagtgaagcttctggaggtagggctgaaaatggtgaaagaagtgacttggaagaggacaacgagagggagggaacggaaaatggagccattgatgctgttcctgttgatgaaaatcttttcactggagaggatttggatgaactagaagaagaattaaatacacttgatttagaagaatgacaccaaacacatcgctgaaaaaattaagtcagctcagcacgagttgaaattgactacattaatttctttccacctagaatcaacaggatgtttatttcctatgctgattctggaggagttaacctcctgcaaaaaaggcatcttgtccctacatcttctcttctgactttggctacatctcatagtaagttcagagtagttcatgataaattgaaaatataatggtcattgcagaaaatgattgatgttgtaactgtccacccaagtaagaagtgtatctgcctttccatcttttggttttcatttgggcatgtgctattaccagaaacaacaaacttatatttaaaatacccttcatttgacacagtttttaatgagtgatttaatttcctctgtatttgtatgtttagaagactgcctaaaacatgagcactgtacttcataaaggaaactgcgtatgcagattcagtattgtgtatctttggacaattagatggacatttaaaatggaacttcttttatctgacaggatcagctacaatgccctgtgttaaattgtttaaaagtttcccttttcttttttgccaataaagttgtaaataaagaccatcatacattaaaatccaaagaaaaaaaaaaaacaaaaaagacacaaaaaaaaattgttgtgggcgggcctgggccctgaaaaagttttttgagcccttccgttggcggcgcggcccgatgggtagtgtgaacctgggccataggcgtgttccaagaaacaccccggccaagactatgggcgtggtcctccccaaaaaaacccggggacacgcggtttggacaaccgaggggccgggcctccggccatcacgggcaaggcgcga

SEQ ID NO: 309963 - DNA, 2204 bp, Homo sapiens
gtggcgcgcacgcgcagctccgcttccgggagccgctcctcgctacccactatgctctgcgacatcgacctgtcgcaaaggccgcgtttgcggggccaatgagcgactcgctttccgtgcggtgcggcgagtgaggccccggtcttcctcctcgtcctgccgcagggccagaacccctgacggtattcagctgcgcgtaagtctggccggtgccatctgtctccgcaatgccccccaagaacccctgacggtattcagctgcgcgtaagtctggccggtgccatctgtctccgcaatgccccccaagaaacaggctcaggccgggggcagcaaaaaggcggagcaaaaaaagaaggagaagattatcgaagacaaaactttcggtttgaagaataagaaaggagcaaagcaacagaagtttatcaaggctgtcacacatcaagttaaatttggtcaacaaaatccacgtcaggtagcacagagtgaagctgaaaagaaattgaagaaggatgacaagaagaaagaattgcaggagctaaatgagctgttcaaacctgtagttgctgctcaaaaaataagtaaaggtgcagatcccaagtctgtagtatgtgcattcttcaagcaaggacagtgtactaaaggagataagtgtaagttctcccatgacttgactctggagagaaaatgtgaaaagcgaagtgtttacattgatgcaagagatgaagaacttgaaaaagatactatggataattgggatgagaaaaagctggaagaagtagtgaacaagaagcacggtgaggcggaaaagaaaaaaccaaaaactcaaatagtgtgcaagcatttcctggaagctattgaaaacaacaagtatggctggttttgggtatgccctggagggggtgatatttgcatgtatcgtcatgcacttcctcctggatttgtgttgaaaaaagataaaaagaaagaagagaaagaagatgaaatttcattagaagatctaattgagagagagcgttctgccctaggtccaaatgttaccaaaatcactctagaatcttttcttgcctggaagaaaaggaaaagacaagaaaagattgataaacttgaacaagatatggaaagaaggaaagctgacttcaaagcagggaaagcactagtgatcagtggtcgtgaagtgtttgaatttcgtcctgaactggtcaatgatgatgatgaggaagcagatgatacccgctacacccagggaacaggtggtgatgaggttgatgattcagtgagtgtaaatgacatagatttaagcctgtacatcccaagagatgtagatgaaacaggtattactgtagccagtcttgaaagattcagcacatatacttcagataaagatgaaaacaaattaagtgaagcttctggaggtagggctgaaaatggtgaaagaagtgacttggaagaggacaacgagagggagggaacggaaaatggagccattgatgctgttcctgttgatgaaaatcttttcactggagaggatttggatgaactagaagaagaattaaatacacttgatttagaagaatgacaccaaacacatcgctgaaaaaattaagtcagctcagcacgagttgaaattgactacattaatttctttccacctagaatcaacaggatgtttatttcctatgctgattctggaggagttaacctcctgcaaaaaaggcatcttgtccctacatcttctcttctgactttggctacatctcatagtaagttcagagtagttcatgataaattgaaaatataatggtcattgcagaaaatgattgatgttgtaactgtccacccaagtaagaagtgtatctgcctttccatcttttggttttcatttgggcatgtgctattaccagaaacaacaaacttatatttaaaatacccttcatttgacacagtttttaatgagtgatttaatttcctctgtatttgtatgtttagaagactgcctaaaacatgagcactgtacttcataaaggaaactgcgtatgcagattcagtattgtgtatctttggacaattagatggacatttaaaatggaacttcttttatctgacaggatcagctacaatgccctgtgttaaattgtttaaaagtttcccttttcttttttgccaataaagttgtaaataaagaccatcatacattaaaatccaaa

SEQ ID NO: 309964 - DNA, 1868 bp, Homo sapiens
gtggcgcgcacgcgcagctccgcttccgggagccgctcctcgctacccactatgctctgcgacatcgacctgtcgcaaaggccgcgtttgcggggccaatgagcgactcgctttccgtgcggtgcggcgagtgaggccccggtcttcctcctcgtcctgccgcagggccagaacccctgacggtattcagctgcgcgtaagtctggccggtgccatctgtctccgcaatgccccccaagaaacaggctcaggccgggggcagcaaaaaggcggagcaaaaaaagaaggagaagattatcgaagacaaaactttcggtttgaagaataagaaaggagcaaagcaacagaagtttatcaaggctgtcacacatcaagttaaatttggtcaacaaaatccacgtcaggtagcacagagtgaagctgaaaagaaattgaagaaggatgacaagaagaaagaattgcaggagctaaatgagctgttcaaacctgtagttgctgctcaaaaaataagtaaaggtgcagatcccaagtctgtagtatgtgcattcttcaagcaaggacagtgtactaaaggagataagtgtaagttctcccatgacttgactctggagagaaaatgtgaaaagcgaagtgtttacattgatgcaagagatgaagaacttgaaaaagatactatggataattgggatgagaaaaagctggaagaagtagtgaacaagaagcacggtgaggcggaaaagaaaaaaccaaaaactcaaatagtgtgcaagcatttcctggaagctattgaaaacaacaagtatggctggttttgggtatgccctggagggggtgatatttgcatgtatcgtcatgcacttcctcctggatttgtgttgaaaaaagataaaaagaaagaagagaaagaagatgaaatttcattagaagatctaattgagagagagcgttctgccctaggtccaaatgttaccaaaatcactctagaatcttttcttgcctggaagaaaaggaaaagacaagaaaagattgataaacttgaacaagatatggaaagaaggaaagctgacttcaaagcagggaaagcactagtgatcagtggtcgtgaagtgtttgaatttcgtcctgaactggtcaatgatgatgatgaggaagcagatgatacccgctacacccagggaacaggtggtgatgaggttgatgattcagtgagtgtaaatgacatagatttaagcctgtacatcccaagagatgtagatgaaacaggtattactgtagccagtcttgaaagattcagcacatatacttcagataaagatgaatcaacaggatgtttatttcctatgctgattctggaggagttaacctcctgcaaaaaaggcatcttgtccctacatcttctcttctgactttggctacatctcatagtaagttcagagtagttcatgataaattgaaaatataatggtcattgcagaaaatgattgatgttgtaactgtccacccaagtaagaagtgtatctgcctttccatcttttggttttcatttgggcatgtgctattaccagaaacaacaaacttatatttaaaatacccttcatttgacacagtttttaatgagtgatttaatttcctctgtatttgtatgtttagaagactgcctaaaacatgagcactgtacttcataaaggaaactgcgtatgcagattcagtattgtgtatctttggacaattagatggacatttaaaatggaacttcttttatctgacaggatcagctacaatgccctgtgttaaattgtttaaaagtttcccttttcttttttgccaataaagttgtaaataaagaccatcatacattaaaatccaaa

SEQ ID NO: 309965 - DNA, 2100 bp, Homo sapiens
gtggcgcgcacgcgcagctccgcttccgggagccgctcctcgctacccactatgctctgcgacatcgacctgtcgcaaaggccgcgtttgcggggccaatgagcgactcgctttccgtgcggtgcggcgagtgaggccccggtcttcctcctcgtcctgccgcagggccagaacccctgacggtattcagctgcgcgtaagtctggccggtgccatctgtctccgcaatgccccccaagaaacaggctcaggccgggggcagcaaaaaggcggagcaaaaaaagaaggagaagattatcgaagacaaaactttcggtttgaagaataagaaaggagcaaagcaacagaagtttatcaaggctgtcacacatcaagttaaatttggtcaacaaaatccacgtcaggtagcacagagtgaagctgaaaagaaattgaagaaggatgacaagaagaaagaattgcaggagctaaatgagctgttcaaacctgtagttgctgctcaaaaaataagtaaaggtgcagatcccaagtctgtagtatgtgcattcttcaagcaaggacagtgtactaaaggagataagtgtaagttctcccatgacttgactctggagagaaaatgtgaaaagcgaagtgtttacattgatgcaagagatgaagaacttgaaaaagatactatggataattgggatgagaaaaagctggaagaagtagtgaacaagaagcacggtgaggcggaaaagaaaaaaccaaaaactcaaataaagtatggctggttttgggtatgccctggagggggtgatatttgcatgtatcgtcatgcacttcctcctggatttgtgttgaaaaaagataaaaagaaagaagagaaagaagatgaaatttcattagaagatctaattgagagagagcgttctgccctaggtccaaatgttaccaaaatcactctagaatcttttcttgcctggaagaaaaggaaaagacaagaaaagattgataaacttgaacaagatatggaaagaaggaaagctgacttcaaagcagggaaagcactagtgatcagtggtcgtgaagtgtttgaatttcgtcctgaactggtcaatgatgatgatgaggaagcagatgatacccgctacacccagggaacaggtggtgatgaggttgatgattcagtgagtgtaaatgacatagatttaagcctgtacatcccaagagatgtagatgaaacaggtattactgtagccagtcttgaaagattcagcacatatacttcagataaagatgaaaacaaattaagtgaagcttctggaggtagggctgaaaatggtgaaagaagtgacttggaagaggacaacgagagggagggaacggaaaatggagccattgatgctgttcctgttgatgaaaatcttttcactggagaggatttggatgaactagaagaagaattaaatacacttgatttagaagaatgacaccaaacacatcgctgaaaaaattaagtcagctcagcacgagttgaaattgactacattaatttctttccacctagaatcaacaggatgtttatttcctatgctgattctggaggagttaacctcctgcaaaaaaggcatcttgtccctacatcttctcttctgactttggctacatctcatagtaagttcagagtagttcatgataaattgaaaatataatggtcattgcagaaaatgattgatgttgtaactgtccacccaagtaagaagtgtatctgcctttccatcttttggttttcatttgggcatgtgctattaccagaaacaacaaacttatatttaaaatacccttcatttgacacagtttttaatgagtgatttaatttcctctgtatttgtatgtttagaagactgcctaaaacatgagcactgtacttcataaaggaaactgcgtatgcagattcagtattgtgtatctttggacaattagatggacatttaaaatggaacttcttttatctgacaggatcagctacaatgccctgtgttaaattgtttaaaagtttcccttttcttttttgccaataaagttgtaaataaagaccatcatacattaaaatccaaa

SEQ ID NO: 309966 - DNA, 3580 bp, Homo sapiens
gtggcgcgcacgcgcagctccgcttccgggagccgctcctcgctacccactatgctctgcgacatcgacctgtcgcaaaggccgcgtttgcggggccaatgagcgactcgctttccgtgcggtgcggcgagtgaggccccggtcttcctcctcgtcctgccgcagggccagaacccctgacggtattcagctgcgcgtaagtctggccggtgccatctgtctccgcaatgccccccaagaaacaggctcaggccgggggcagcaaaaaggcggagcaaaaaaagaaggagaagattatcgaagacaaaactttcggtttgaagaataagaaaggagcaaagcaacagaagtttatcaaggctgtcacacatcaagttaaatttggtcaacaaaatccacgtcaggtagcacagagtgaagctgaaaagaaattgaagaaggatgacaagaagaaagaattgcaggagctaaatgagctgttcaaacctgtagttgctgctcaaaaaataagtaaaggtgcagatcccaagtctgtagtatgtgcattcttcaagcaaggacagtgtactaaaggagataagtgtaagttctcccatgacttgactctggagagaaaatgtgaaaagcgaagtgtttacattgatgcaagagatgaagaacttgaaaaagatactatggataattgggatgagaaaaagctggaagaagtagtgaacaagaagcacggtgaggcggaaaagaaaaaaccaaaaactcaaatagtatgtccttttcttgaattgagttgctgtgatatttatcattagggagaattatgtggcaaggtatttgctgctattttctattagattattctgtaagttactggaaaatttgatttcatcaagataaggtacacgaagctttatttttggaatttacaagttagattttatagattcttgttcagaaatagctgaacaagaataaaactatgttaccgaagtcctttaaatgccattttctgaggtgaacgttctcaaatatggataaacaaaattacatatccagacaaaaatccctatttttttgcacagagtggaaggaggcctgttaaactaacccacttaataatgtatttagttttaatagggatagatttttaaattttaaggtttaaaatatttctacatatgaattccaaaatgaatttttggtaggtagtggctctaattccaggaaatgtacctttaaaaattggttcttgatgtctcaaactttgcatttatgtctatatttatagtgaagttacagtaaaaagtcttgctgtgctagaataattctaaatactacattcatacacatctgttatgtttgtttttgggggcggatactgtttgttaattttctcttacttgcaaagcttaatacttgaggcttaaatacaattgtatcttctatccatgttgtgaagggtcactctctttgtgttccttttgtaccttgctcctgtatactgcttgtgattcatttttatttcggaaagatcaaaccaaagaaaatcatttattctatttattttatttttgaggcggagttttgctcttgttgcccaagctggagtgcagtggcgcaatcttagctcactgcaacctctgcttcccgggttcaagagattctcctgcgtcagcctcccaagtagctggggttacaggcatgtgccaccacggccagctaattttttgtatttttagtagaagtggaggttcaccatgttagccaggctggtcttgaactcctgacctcagcaggtgatccgcccgcctcggcctcccaaagtgctgggattataggtgtaagccacaacgcctggcctgattttattttttatagctaattgtatattctgattcgggggcgtacatttacaaagggtaactgaaacaagtaagtcattttcgtatgatttagaatttagaacaaatgaaaactgtatagattcccctttaagggaatttgccattgttctacatattttaagataaacttctgttgcatttctgcacagaatagaggctagacagagcacccttatgtgcagaaatgaatagaatgtacttgtgtaatataacgtacttgtgtgtatacttgttccatatactcaggcatttaccttggaaatggcctacactgagccaccgcttgtgaataatattgtctctataggtgtgcaagcatttcctggaagctattgaaaacaacaagtatggctggttttgggtatgccctggagggggtgatatttgcatgtatcgtcatgcacttcctcctggatttgtgttgaaaaaagataaaaagaaagaagagaaagaagatgaaatttcattagaagatctaattgagagagagcgttctgccctaggtccaaatgttaccaaaatcactctagaatcttttcttgcctggaagaaaaggaaaagacaagaaaagattgataaacttgaacaagatatggaaagaaggaaagctgacttcaaagcagggaaagcactagtgatcagtggtcgtgaagtgtttgaatttcgtcctgaactggtcaatgatgatgatgaggaagcagatgatacccgctacacccagggaacaggtggtgatgaggttgatgattcagtgagtgtaaatgacatagatttaagcctgtacatcccaagagatgtagatgaaacaggtattactgtagccagtcttgaaagattcagcacatatacttcagataaagatgaaaacaaattaagtgaagcttctggaggtagggctgaaaatggtgaaagaagtgacttggaagaggacaacgagagggagggaacggaaaatggagccattgatgctgttcctgttgatgaaaatcttttcactggagaggatttggatgaactagaagaagaattaaatacacttgatttagaagaatgacaccaaacacatcgctgaaaaaattaagtcagctcagcacgagttgaaattgactacattaatttctttccacctagaatcaacaggatgtttatttcctatgctgattctggaggagttaacctcctgcaaaaaaggcatcttgtccctacatcttctcttctgactttggctacatctcatagtaagttcagagtagttcatgataaattgaaaatataatggtcattgcagaaaatgattgatgttgtaactgtccacccaagtaagaagtgtatctgcctttccatcttttggttttcatttgggcatgtgctattaccagaaacaacaaacttatatttaaaatacccttcatttgacacagtttttaatgagtgatttaatttcctctgtatttgtatgtttagaagactgcctaaaacatgagcactgtacttcataaaggaaactgcgtatgcagattcagtattgtgtatctttggacaattagatggacatttaaaatggaacttcttttatctgacaggatcagctacaatgccctgtgttaaattgtttaaaagtttcccttttcttttttgccaataaagttgtaaataaagaccatcatacattaaaatccaaa

SEQ ID NO: 309967 - DNA, 1521 bp, Homo sapiens
  misc_feature (1459)..(1459): n is a, c, g, or t
gtggcgcgcacgcgcagctccgcttccgggagccgctcctcgctacccactatgctctgcgacatcgacctgtcgcaaaggccgcgtttgcggggccaatgagcgactcgctttccgtgcggtgcggcgagtgaggccccggtcttcctcctcgtcctgccgcagggccagaacccctgacggtattcagctgcgcgtaagtctggccggtgccatctgtctccgcaatgccccccaagaaacaggctcaggccgggggcagcaaaaaggcggagcaaaaaaagaaggagaagattatcgaagacaaaactttcggtttgaagaataagaaaggagcaaagcaacagaagtttatcaaggctgtcacacatcaagttaaatttggtcaacaaaatccacgtcaggtagcacagagtgaagctgaaaagaaattgaagaaggatgacaagaagaaagaattgcaggagctaaatgagctgttcaaacctgtagttgctgctcaaaaaataagtaaaggtgcagatcccaagtctgtagtatgtgcattcttcaagcaaggacagtgtactaaaggagataagtgtaagttctcccatgacttgactctggagagaaaatgtgaaaagcgaagtgtttacattgatgcaagagatgaagaacttgaaaaagatactatggataattgggatgagaaaaagctggaagaagtagtgaacaagaagcacggtgaggcggaaaagaaaaaaccaaaaactcaaatagtgtgcaagcatttcctggaagctattgaaaacaacaagtatggctggttttgggtatgccctggagggggtgatatttgcatgtatcgtcatgcacttcctcctggatttgtgttgaaaaaagataaaaagaaagaagagaaagaagatgaaatttcattagaagatctaattgagagagagcgttctgccctaggtccaaatgttaccaaaatcactctagaatcttttcttgcctggaagaaaaggaaaagacaagaaaagattgataaacttgaacaagatatggaaagaaggaaagctgacttcaaagcagggaaagcactagtgatcagtggtcgtgaagtgtttgaatttcgtcctgaactggtcaatgatgatgatgaggaagcagatgatacccgctacacccagggaacaggtggtgatgaggttgatgattcagtgagtgtaaatgacatagatttaagcctgtacatcccaagagatgtagatgaaacaggtattactgtagccagtcttgaaagattcagcacatatacttcagataaagatgaaaacaaattaagtgaagcttctggaggtagggctgaaaatggtgaaagaagtgacttggaagaggacaacgagagggagggaacggaaaatggagccattgatgctgttcctgttgatgaaattttctggggggattgggngataaaaattaatcttgtttaaatgaccaattgtgaaaatattcgagtgaggatatttccaa

SEQ ID NO: 309968 - DNA, 1642 bp, Homo sapiens
gtggcgcgcacgcgcagctccgcttccgggagccgctcctcgctacccactatgctctgcgacatcgacctgtcgcaaaggccgcgtttgcggggccaatgagcgactcgctttccgtgcggtgcggcgagtgaggccccggtcttcctcctcgtcctgccgcagggccagaacccctgacggtattcagctgcgcgtaagtctggccggtgccatctgtctccgcaatgccccccaagaaacaggctcaggccgggggcagcaaaaaggcggagcaaaaaaagaaggagaagattatcgaagacaaaactttcggtttgaagaataagaaaggagcaaagcaacagaagtttatcaaggctgtcacacatcaagttaaatttggtcaacaaaatccacgtcaggtagcacagagtgaagctgaaaagaaattgaagaaggatgacaagaagaaagaattgcaggagctaaatgagctgttcaaacctgtagttgctgctcaaaaaataagtaaaggtgcagatcccaagtctgtagtatgtgcattcttcaagcaaggacagtgtactaaaggagataagtgtaagttctcccatgacttgactctggagagaaaatgtgaaaagcgaagtgtttacattgatgcaagagatgaagaacttgaaaaagatactatggataattgggatgagaaaaagctggaagaagtagtgaacaagaagcacggtgaggcggaaaagaaaaaaccaaaaactcaaatagtgtgcaagcatttcctggaagctattgaaaacaacaagtatggctggttttgggtatgccctggagggggtgatatttgcatgtatcgtcatgcacttcctcctggatttgtgttgaaaaaagataaaaagaaagaagagaaagaagatgaaatttcattagaagatctaattgagagagagcgttctgccctaggtccaaatgttaccaaaatcactctagaatcttttcttgcctggaagaaaaggaaaagacaagaaaagattgataaacttgaacaagatatggaaagaaggaaagctgacttcaaagcagggaaagcactagtgatcagtggtcgtgaagtgtttgaatttcgtcctgaactggtcaatgatgatgatgaggaagcagatgatacccgctacacccagggaacaggtggtgatgaggttgatgattcagtgagtgtaaatgacatagatttaagcctgtacatcccaagagatgtagatgaaacaggtattactgtagccagtcttgaaagattcagcacatatacttcagataaagatgaatcaacaggatgtttatttcctatgctgattctggaggagttaacctcctgcaaaaaaggcatcttgtccctacatcttctcttctgactttggctacatctcataaagactgcctaaaacatgagcactgtacttcataaaggaaactgcgtatgcagattcagtattgtgtatctttggacaattagatggacatttaaaatggaacttcttttatctgacaggatcagctacaatgccctgtgttaaattgtttaaaagtttcccttttcttttttgccaataaagttgtaaataaagaccatcatacattaaaatccaaa

SEQ ID NO: 309969 - DNA, 1678 bp, Homo sapiens
gtggcgcgcacgcgcagctccgcttccgggagccgctcctcgctacccactatgctctgcgacatcgacctgtcgcaaaggccgcgtttgcggggccaatgagcgactcgctttccgtgcggtgcggcgagtgaggccccggtcttcctcctcgtcctgccgcagggccagaacccctgacggtattcagctgcgcgtaagtctggccggtgccatctgtctccgcaatgccccccaagaaacaggctcaggccgggggcagcaaaaaggcggagcaaaaaaagaaggagaagattatcgaagacaaaactttcggtttgaagaataagaaaggagcaaagcaacagaagtttatcaaggctgtcacacatcaagttaaatttggtcaacaaaatccacgtcaggtagcacagagtgaagctgaaaagaaattgaagaaggatgacaagaagaaagaattgcaggagctaaatgagctgttcaaacctgtagttgctgctcaaaaaataagtaaaggtgcagatcccaagtctgtagtatgtgcattcttcaagcaaggacagtgtactaaaggagataagtgtaagttctcccatgacttgactctggagagaaaatgtgaaaagcgaagtgtttacattgatgcaagagatgaagaacttgaaaaagatactatggataattgggatgagaaaaagctggaagaagtagtgaacaagaagcacggtgaggcggaaaagaaaaaaccaaaaactcaaatagtgtgcaagcatttcctggaagctattgaaaacaacaagtatggctggttttgggtatgccctggagggggtgatatttgcatgtatcgtcatgcacttcctcctggatttgtgttgaaaaaagataaaaagaaagaagagaaagaagatgaaatttcattagaagatctaattgagagagagcgttctgccctaggtccaaatgttaccaaaatcactctagaatcttttcttgcctggaagaaaaggaaaagacaagaaaagattgataaacttgaacaagatatggaaagaaggaaagctgacttcaaagcagggaaagcactagtgatcagtggtcgtgaagtgtttgaatttcgtcctgaactggtcaatgatgatgatgaggaagcagatgatacccgctacacccagggaacaggtggtgatgaggttgatgattcagtgagtgtaaatgacatagatttaagcctgtacatcccaagagatgtagatgaaacaggtattactgtagccagtcttgaaagattcagcacatatacttcagataaagatgggtaagtatgctaacttttgcctaattttaagaactaggaagttatctaaagggggttataccaggcttggcaaacttagatgtgtgcaggtaccagattggtaacataaatgtgtggtttgaccataaataaaagcagtaataaatagtgaaaggctgtagacatgagcagctgggtgtatattaaaatcattaatggaaactagaaggagacaaaaatgagtttggagttaaagtcaatgagttcacttcgggacctcatgagtttgagattttttgattatcaaaagtgcactgtctaggatattgtgtagacatgaacaccctacagaacatcagtgttatggggtaagtaaaagaa

SEQ ID NO: 309970 - DNA, 1444 bp, Homo sapiens
accttatgaggatcccgtgattgagataagcacggtgaggcggaaaagaaaaaaccaaaaactcaaatagtgtgcaagcatttcctggaagctattgaaaacaacaagtatggctggttttgggtatgccctggagggggtgatatttgcatgtatcgtcatgcacttcctcctggatttgtgttgaaaaaagataaaaagaaagaagagaaagaagatgaaatttcattagaagatctaattgagagagagcgttctgccctaggtccaaatgttaccaaaatcactctagaatcttttcttgcctggaagaaaaggaaaagacaagaaaagattgataaacttgaacaagatatggaaagaaggaaagctgacttcaaagcagggaaagcactagtgatcagtggtcgtgaagtgtttgaatttcgtcctgaactggtcaatgatgatgatgaggaagcagatgatacccgctacacccagggaacaggtggtgatgaggttgatgattcagtgagtgtaaatgacatagatttaagcctgtacatcccaagagatgtagatgaaacaggtattactgtagccagtcttgaaagattcagcacatatacttcagataaagatgaaaacaaattaagtgaagcttctggaggtagggctgaaaatggtgaaagaagtgacttggaagaggacaacgagagggagggaacggaaaatggagccattgatgctgttcctgttgatgaaaatcttttcactggagaggatttggatgaactagaagaagaattaaatacacttgatttagaagaatgacaccaaacacatcgctgaaaaaattaagtcagctcagcacgagttgaaattgactacattaatttctttccacctagaatcaacaggatgtttatttcctatgctgattctggaggagttaacctcctgcaaaaaaggcatcttgtccctacatcttctcttctgactttggctacatctcatagtaagttcagagtagttcatgataaattgaaaatataatggtcattgcagaaaatgattgatgttgtaactgtccacccaagtaagaagtgtatctgcctttccatcttttggttttcatttgggcatgtgctattaccagaaacaacaaacttatatttaaaatacccttcatttgacacagtttttaatgagtgatttaatttcctctgtatttgtatgtttagaagactgcctaaaacatgagcactgtacttcataaaggaaactgcgtatgcagattcagtattgtgtatctttggacaattagatggacatttaaaatggaacttcttttatctgacaggatcagctacaatgccctgtgttaaattgtttaaaagtttcccttttcttttttgccaataaagttgtaaataaagaccatcatacattaaaatccaaa

SEQ ID NO: 309971 - DNA, 3155 bp, Homo sapiens
acagcaggagggattgatcgagctcagtcaatcaaggctgattgagggaggttagggcttcagtaggccgtgatcatgctatcacactccatcctgagcaacagtgagaccccgtctcaacaaaaagaaaaagaaaaatgtgttaagccatgagtcttataacacagcattagtgtctaaggagatatgtgttgtgggagtagtagataagattacagtatttaatcttcatttctttatttagatactatggataattgggatgagaaaaagctggaagaagtagtgaacaagaagcacggtgaggcggaaaagaaaaaaccaaaaactcaaatagtatgtccttttcttgaattgagttgctgtgatatttatcattagggagaattatgtggcaaggtatttgctgctattttctattagattattctgtaagttactggaaaatttgatttcatcaagataaggtacacgaagctttatttttggaatttacaagttagattttatagattcttgttcagaaatagctgaacaagaataaaactatgttaccgaagtcctttaaatgccattttctgaggtgaacgttctcaaatatggataaacaaaattacatatccagacaaaaatccctatttttttgcacagagtggaaggaggcctgttaaactaacccacttaataatgtatttagttttaatagggatagatttttaaattttaaggtttaaaatatttctacatatgaattccaaaatgaatttttggtaggtagtggctctaattccaggaaatgtacctttaaaaattggttcttgatgtctcaaactttgcatttatgtctatatttatagtgaagttacagtaaaaagtcttgctgtgctagaataattctaaatactacattcatacacatctgttatgtttgtttttgggggcggatactgtttgttaattttctcttacttgcaaagcttaatacttgaggcttaaatacaattgtatcttctatccatgttgtgaagggtcactctctttgtgttccttttgtaccttgctcctgtatactgcttgtgattcatttttatttcggaaagatcaaaccaaagaaaatcatttattctatttattttatttttgaggcggagttttgctcttgttgcccaagctggagtgcagtggcgcaatcttagctcactgcaacctctgcttcccgggttcaagagattctcctgcgtcagcctcccaagtagctggggttacaggcatgtgccaccacggccagctaattttttgtatttttagtagaagtggaggttcaccatgttagccaggctggtcttgaactcctgacctcagcaggtgatccgcccgcctcggcctcccaaagtgctgggattataggtgtaagccacaacgcctggcctgattttattttttatagctaattgtatattctgattcgggggcgtacatttacaaagggtaactgaaacaagtaagtcattttcgtatgatttagaatttagaacaaatgaaaactgtatagattcccctttaagggaatttgccattgttctacatattttaagataaacttctgttgcatttctgcacagaatagaggctagacagagcacccttatgtgcagaaatgaatagaatgtacttgtgtaatataacgtacttgtgtgtatacttgttccatatactcaggcatttaccttggaaatggcctacactgagccaccgcttgtgaataatattgtctctataggtgtgcaagcatttcctggaagctattgaaaacaacaagtatggctggttttgggtatgccctggagggggtgatatttgcatgtatcgtcatgcacttcctcctggatttgtgttgaaaaaagataaaaagaaagaagagaaagaagatgaaatttcattagaagatctaattgagagagagcgttctgccctaggtccaaatgttaccaaaatcactctagaatcttttcttgcctggaagaaaaggaaaagacaagaaaagattgataaacttgaacaagatatggaaagaaggaaagctgacttcaaagcagggaaagcactagtgatcagtggtcgtgaagtgtttgaatttcgtcctgaactggtcaatgatgatgatgaggaagcagatgatacccgctacacccagggaacaggtggtgatgaggttgatgattcagtgagtgtaaatgacatagatttaagcctgtacatcccaagagatgtagatgaaacaggtattactgtagccagtcttgaaagattcagcacatatacttcagataaagatgaaaacaaattaagtgaagcttctggaggtagggctgaaaatggtgaaagaagtgacttggaagaggacaacgagagggagggaacggaaaatggagccattgatgctgttcctgttgatgaaaatcttttcactggagaggatttggatgaactagaagaagaattaaatacacttgatttagaagaatgacaccaaacacatcgctgaaaaaattaagtcagctcagcacgagttgaaattgactacattaatttctttccacctagaatcaacaggatgtttatttcctatgctgattctggaggagttaacctcctgcaaaaaaggcatcttgtccctacatcttctcttctgactttggctacatctcatagtaagttcagagtagttcatgataaattgaaaatataatggtcattgcagaaaatgattgatgttgtaactgtccacccaagtaagaagtgtatctgcctttccatcttttggttttcatttgggcatgtgctattaccagaaacaacaaacttatatttaaaatacccttcatttgacacagtttttaatgagtgatttaatttcctctgtatttgtatgtttagaagactgcctaaaacatgagcactgtacttcataaaggaaactgcgtatgcagattcagtattgtgtatctttggacaattagatggacatttaaaatggaacttcttttatctgacaggatcagctacaatgccctgtgttaaattgtttaaaagtttcccttttcttttttgccaataaagttgtaaataaagaccatcatacattaaaatccaaa

SEQ ID NO: 309972 - DNA, 1379 bp, Homo sapiens
gtggcgcgcacgcgcagctccgcttccgggagccgctcctcgctacccactatgctctgcgacatcgacctgtcgcaaaggccgcgtttgcggggccaatgagcgactcgctttccgtgcggtgcggcgagtgaggccccggtcttcctcctcgtcctgccgcagggccagaacccctgacggtattcagctgcgcgtaagtctggccggtgccatctgtctccgcaatgccccccaagaaacaggctcaggccgggggcagcaaaaaggcggagcaaaaaaagaaggagaagattatcgaagacaaaactttcggtttgaagaataagaaaggagcaaagcaacagaagtttatcaaggctgtcacacatcaagttaaatttggtcaacaaaatccacgtcaggtagcacagagtgaagctgaaaagaaattgaagaaggatgacaagaagaaagaattgcaggagctaaatgagctgttcaaacctgtagttgctgctcaaaaaataagtaaaggtgcagatcccaagtctgtagtatgtgcattcttcaagcaaggacagtgtactaaaggagataagtgtaagttctcccatgacttgactctggagagaaaatgtgaaaagcgaagtgtttacattgatgcaagagatgaagaacttgaaaaagatactatggataattgggatgagaaaaagctggaagaagtagtgaacaagaagcacggtgaggcggaaaagaaaaaaccaaaaactcaaatagtgtgcaagcatttcctggaagctattgaaaacaacaagtatggctggttttgggtatgccctggagggggtgatatttgcatgtatcgtcatgcacttcctcctggatttgtgttgaaaaaagataaaaagaaagaagagaaagaagatgaaatttcattagaagatctaattgagagagagcgttctgccctaggtccaaatgttaccaaaatcactctagaatcttttcttgcctggaagaaaaggaaaagacaagaaaagattgataaacttgaacaagatatggaaagaaggaaagctgacttcaaagcagggaaagcactagtgatcagtggtcgtgaagtgtttgaatttcgtcctgaactggtcaatgatgatgatgaggaagcagatgatacccgctacacccagggaacaggtggtgatgaggtaagaggaagctttgtgcctcatctccttatgttaattgaaagaaacaataataccacaacatggttaagagccaccaacatcagagccacagtgcctgggttcaaatccttactccaaccatgggttaatctaggcctccaccctcatctaatatggacataatgattatctctacatcatagt

SEQ ID NO: 309973 - DNA, 1379 bp, Homo sapiens
  misc_feature (1364)..(1364): n is a, c, g, or t
gtggcgcgcacgcgcagctccgcttccgggagccgctcctcgctacccactatgctctgcgacatcgacctgtcgcaaaggccgcgtttgcggggccaatgagcgactcgctttccgtgcggtgcggcgagtgaggccccggtcttcctcctcgtcctgccgcagggccagaacccctgacggtattcagctgcgcgtaagtctggccggtgccatctgtctccgcaatgccccccaagaaacaggctcaggccgggggcagcaaaaaggcggagcaaaaaaagaaggagaagattatcgaagacaaaactttcggtttgaagaataagaaaggagcaaagcaacagaagtttatcaaggctgtcacacatcaagttaaatttggtcaacaaaatccacgtcaggtagcacagagtgaagctgaaaagaaattgaagaaggatgacaagaagaaagaattgcaggagctaaatgagctgttcaaacctgtagttgctgctcaaaaaataagtaaaggtgcagatcccaagtctgtagtatgtgcattcttcaagcaaggacagtgtactaaaggagataagtgtaagttctcccatgacttgactctggagagaaaatgtgaaaagcgaagtgtttacattgatgcaagagatgaagaacttgaaaaagatactatggataattgggatgagaaaaagctggaagaagtagtgaacaagaagcacggtgaggcggaaaagaaaaaaccaaaaactcaaatagtgtgcaagcatttcctggaagctattgaaaacaacaagtatggctggttttgggtatgccctggagggggtgatatttgcatgtatcgtcatgcacttcctcctggatttgtgttgaaaaaagataaaaagaaagaagagaaagaagatgaaatttcattagaagatctaattgagagagagcgttctgccctaggtccaaatgttaccaaaatcactctagaatcttttcttgcctggaagaaaaggaaaagacaagaaaagattgatcagtggtcgtgaagtgtttgaatttcgtcctgaactggtcaatgatgatgatgaggaagcagatgatacccgctacacccagggaacaggtggtgatgaggttgatgattcagtgagtgtaaatgacatagatttaagcctgtacatcccaagagatgtagatgaaacaggtattactgtagccagtcttgaaagattcagcacatatacttcagataaagatggtgaaacaaatagtgagctctgaggaggctgaaatgtgaagagtgacttgagagacacagaggaggcgaatgagcatgatctgtctgtgatgaatcttcactgaagatngtgactaagagtatc

SEQ ID NO: 309974 - DNA, 2346 bp, Homo sapiens
ccttttatgaaaggaaaaaaaaaatattgtgatctattcccaaagttgccctactttaattattcttgtatgtgtaaaatgttaacctagccataaacattagccaatcatgacattaattttaggattgtgaaacagtcttttaagtactagctaatggcttatcaaattatttctgtaagattgagttactaaaaatgcttagttctcagattggttgaatttttatagttttagatttttcgccctgatatcttttttcactagtatattagttattagcatatgtacggaagaagacaacactctagtttttaaattatatgttttatcagctctggactcaaaacactcactctgcttatagaagggaatgagtctgaagaggatattcagctacttgtctttggctccgtacaaaacacagttttattctatgaaaattttgagattattagaaacattagatttagggttgcatattaaaaactatatccattttgccttattatttagtgtctcactcaggatataacacactataatagaaaatgtagacttcagaatcaggtatatttgagatggtttgtatactggttctgacacttgttagctattcatctttggtaaattccccattaccctttgttcacctatttgtggggatcagtgcatagtgtgtgtaaagcatttaatacctggcaagtgttcagcaaattttttgttctatatatttattatttgattattggccctgaggagtaggtgtttgtttgtttgtttgtttgtttagttttatttctcatcttctcaggaacacaaatgaaacttggatattgttatggtgctttttataatatatttattattttcagcaattgattcatgttaaaacaatttcttatgacaagttactcatcttcaatggtgagaagaaatctagctcagaataatatatttttagtgtttgtatctctggatactcattttgctcattgccacgtaaagtaaaaaaatacataaattagcttattccaatgtaatatcttcaggatagtcatgggcaaggaattaatcacattaagagataactgcaactaagcactatttgaggtgacttctgtggaaaaaaaattaattctttaccattgcagcgttctgccctaggtccaaatgttaccaaaatcactctagaatcttttcttgcctggaagaaaaggaaaagacaagaaaagattgataaacttgaacaagatatggaaagaaggaaagctgacttcaaagcagggaaagcactagtgatcagtggtcgtgaagtgtttgaatttcgtcctgaactggtcaatgatgatgatgaggaagcagatgatacccgctacacccagggaacaggtggtgatgaggttgatgattcagtgagtgtaaatgacatagatttaagcctgtacatcccaagagatgtagatgaaacaggtattactgtagccagtcttgaaagattcagcacatatacttcagataaagatgaaaacaaattaagtgaagcttctggaggtagggctgaaaatggtgaaagaagtgacttggaagaggacaacgagagggagggaacggaaaatggagccattgatgctgttcctgttgatgaaaatcttttcactggagaggatttggatgaactagaagaagaattaaatacacttgatttagaagaatgacaccaaacacatcgctgaaaaaattaagtcagctcagcacgagttgaaattgactacattaatttctttccacctagaatcaacaggatgtttatttcctatgctgattctggaggagttaacctcctgcaaaaaaggcatcttgtccctacatcttctcttctgactttggctacatctcatagtaagttcagagtagttcatgataaattgaaaatataatggtcattgcagaaaatgattgatgttgtaactgtccacccaagtaagaagtgtatctgcctttccatcttttggttttcatttgggcatgtgctattaccagaaacaacaaacttatatttaaaatacccttcatttgacacagtttttaatgagtgatttaatttcctctgtatttgtatgtttagaagactgcctaaaacatgagcactgtacttcataaaggaaactgcgtatgcagattcagtattgtgtatctttggacaattagatggacatttaaaatggaacttcttttatctgacaggatcagctacaatgccctgtgttaaattgtttaaaagtttcccttttcttttttgccaataaagttgtaaataaagaccatcatacattaaaatccaaa

SEQ ID NO: 309975 - DNA, 970 bp, Homo sapiens
gtggcgcgcacgcgcagctccgcttccgggagccgctcctcgctacccactatgctctgcgacatcgacctgtcgcaaaggccgcgtttgcggggccaatgagcgactcgctttccgtgcggtgcggcgagtgaggccccggtcttcctcctcgtcctgccgcagggccagaacccctgacggtattcagctgcgcgtaagtctggccggtgccatctgtctccgcaatgccccccaagaaacaggctcaggccgggggcagcaaaaaggcggagcaaaaaaagaaggagaagattatcgaagacaaaactttcggtttgaagaataagaaaggagcaaagcaacagaagtttatcaaggctgtcacacatcaagttaaatttggtcaacaaaatccacgtcaggtagcacagagtgaagctgaaaagaaattgaagaaggatgacaagaagaaagaattgcaggagctaaatgagctgttcaaacctgtagttgctgctcaaaaaataagtaaaggtgcagatcccaagtctgtagtatgtgcattcttcaagcaaggacagtgtactaaaggagataagtgtaagttctcccatgacttgactctggagagaaaatgtgaaaagcgaagtgtttacattgatgcaagagatgaagaacttgaaaaagatactatggataattgggatgagaaaaagctggaagaagtagtgaacaagaagcacggtgaggcggaaaagaaaaaaccaaaaactcaaatagtgtgcaagcatttcctggaagctattgaaaacaacaagtatggctggttttgggtatgccctggagggggtgatatttgcatgtatcgtcatgcacttcctcctggatttgtgttgaaaaaagataaaaagaaagaagagaaagaagatgaaatttcattagaagatctaattgagagagaggtaactggtatccttttcctaccata

SEQ ID NO: 309976 - DNA, 976 bp, Homo sapiens
gtggcgcgcacgcgcagctccgcttccgggagccgctcctcgctacccactatgctctgcgacatcgacctgtcgcaaaggccgcgtttgcggggccaatgagcgactcgctttccgtgcggtgcggcgagtgaggccccggtcttcctcctcgtcctgccgcagggccagaacccctgacggtattcagctgcgcgtaagtctggccggtgccatctgtctccgcaatgccccccaagaaacaggctcaggccgggggcagcaaaaaggcggagcaaaaaaagaaggagaagattatcgaagacaaaactttcggtttgaagaataagaaaggagcaaagcaacagaagtttatcaaggctgtcacacatcaagttaaatttggtcaacaaaatccacgtcaggtagcacagagtgaagctgaaaagaaattgaagaaggatgacaagaagaaagaattgcaggagctaaatgagctgttcaaacctgtagttgctgctcaaaaaataagtaaaggtgcagatcccaagtctgtagtatgtgcattcttcaagcaaggacagtgtactaaaggagataagtgtaagttctcccatgacttgactctggagagaaaatgtgaaaagcgaagtgtttacattgatgcaagagatgaagaacttgaaaaagatactatggataattgggatgagaaaaagctggaagaagtagtgaacaagaagcacggtgaggcggaaaagaaaaaaccaaaaactcaaatagtgtgcaagcatttcctggaagctattgaaaacaacaagtatggctggttttgggtatgccctggagggggtgatatttgcatgtatcgtcatgcacttcctcctggatttgtgttgaaaaaagataaaaagaaagaagattatcgaagacaaaactttcggtttgaagaataagaaaggagcaaagcaacagaacggtaatatctatgctgctg

SEQ ID NO: 309977 - DNA, 354 bp, Homo sapiens
cactctctgccacctttcatagtcagaataaaagaaacaaaagtagacataaatgctacaaaaagaactttaaagaaatgtcttgctaatcacccataagtgccgttttcctctcacatcagtgaatggaaaataagttaaccaaaattcatcatatttcaggtagaatctatactttacagcctggcagattataatacaaataccatatgccatttgacataggtgcagatcccaagtctgtagtatgtgcattcttcaagcaaggacagtgtactaaaggagataagtgtaagttctcccatgacttgactctggagagaaaatgtgaaaagcgaagtgtttacattgatg

SEQ ID NO: 309978 - DNA, 368 bp, Homo sapiens
cgtatgatttagaatttagaacaaatgaaaactgtatagattcccctttaagggaatttgccattgttctacatattttaagataaacttctgttgcatttctgcacagaatagaggctagacagagcacccttatgtgcagaaatgaatagaatgtacttgtgtaatataacgtacttgtgtgtatacttgttccatatactcaggcatttaccttggaaatggcctacactgagccaccgcttgtgaataatattgtctctataggtgtgcaagcatttcctggaagctattgaaaacaacaagtatggctggttttgggtatgccctggagggggtgatatttgcatgtatcgtcatgcacttcc

SEQ ID NO: 309979 - DNA, 807 bp, Homo sapiens
cgagagggagggaacggaaaatggagccattgatgctgttcctgttgatgaaaatcttttcactggagaggatttggatgaactagaagaagaattaaatacacttgatttagaagaatgacaccaaacacatcgctgaaaaaattaagtcagctcagcacgagttgaaattgactacattaatttctttccacctagaatcaacaggatgtttatttcctatgctgattctggaggagttaacctcctgcaaaaaaggcatcttgtccctacatcttctcttctgactttggctacatctcatagtaagttcagagtagttcatgataaattgaaaatataatggtcattgcagaaaatgattgatgttgtaactgtccacccaagtaagaagtgtatctgcctttccatcttttggttttcatttgggcatgtgctattaccagaaacaacaaacttatatttaaaatacccttcatttgacacagtttttaatgagtgatttaatttcctctgtatttgtatgtttagaagactgcctaaaacatgagcactgtacttcataaaggaaactgcgtatgcagattcagtattgtgtatctttggacaattagatggacatttaaaatggaacttcttttatctgacaggatcagctacaatgccctgtgttaaattgtttaaaagtttcccttttcttttttgccaataaagttgtaaataaagaccatcatacattaaaatccaaaatatgggcctttttttaagtttttctatgaaaaatttaacatttctagcttgagaatt

SEQ ID NO: 309980 - DNA, 4198 bp, Homo sapiens
cgcgcgcacacagccaggggccgcccgggctctcgacgcgccgacggccgggcggacggacggacggacgccgagcgcagtgccccgcgggtcttacaggagaggggaccgtcctgggctggcctggaccatggtgctgctctgggagcctgcaggagcctggcttgctctgggcctggccctggccctgggccccagcgtggccgcagctgcccctcggcaggactgcacgggcgtggagtgcccgccgctggagaactgcattgaggaggcgctggagccgggtgcctgctgtgccacgtgtgtgcagcagggctgcgcctgcgagggctaccagtactatgactgcctacagggtggcttcgtgcgcggccgcgtgcccgccggtcagtcctattttgtggacttcgggagcactgagtgctcctgcccaccaggcggcggcaagatcagctgccagttcatgctgtgcccggagctgccgcccaactgcatcgaggctgtagtggtggctgacagctgcccacagtgcggccaggtgggctgcgtccacgcgggccacaagtacgccgctggccacactgttcacctgccgccctgccgggcctgccactgccctgacgccggtggagagctcatctgctaccagctccccggttgccacgggaacttctcagatgccgaggagggtgaccccgagcgacactacgaagacccctacagctatgaccaggaggtggccgaggtggaagcagcaacagccctggggggtgaggtccaggcgggtgcagtccaggcaggcgcagggggccccccagctgctctgggaggtgggagtcagccactgtccaccatccaggcacccccctggccagctgtcctccccaggcccacagcggctgctgccctgggtcccccagccccagtgcaggccaaagctaggagagtgaccgaggacagtgaggaggaagaagaggaggaggaggagagagaggaaatggctgtcactgagcagctggcagcaggtggccacagggggctggatgggctgcccactacagccccagctggacccagtcttcctatccaggaggagagggcagaagctggggcaagggcagaagctggggcaaggcctgaagagaacctcatcctggatgcccaagccacgtcccgcagcactgggccggagggcgtgacgcatgcaccgagcctgggcaaggctgctctcgtcccaactcaggccgtgcctggctctcccagggacccagtcaagcccagcccccacaacatcctgtccacatcactgcctgatgcagcctggatcccacccacccgagaagtgcccaggaagccgcaagttctgccccattcccacgtggaggaggacacagaccccaactctgtccattctatccccagaagtagccctgaaggctccaccaaggacctgatcgagacttgctgcgcagccggacagcagtgggccattgacaatgacgagtgcctggagatccctgagagtggcactgaggacaacgtctgcaggacagcccagaggcactgctgtgtctcctacttgcaggagaagagctgcatggccggcgtcctgggagccaaggagggtgagacctgtggggctgaggacaacgacagctgcggcatctccctgtacaagcaatgctgtgactgctgtggcctgggcctccgcgtgcgggccgagggccagtcgtgtgagtccaatcctaacctgggctatccctgcaatcatgtcatgctctcctgctgtgagggtgaagagcctctcatagtacctgaggttcgccgacctccagagcccgcagctgcaccacggagagtttcagaggcagagatggcgggccgagaggccctgtcactgggcacagaggccgagctgccgaacagcctgccgggcgatgaccaggatgagtgccttctcctcccgggagagctgtgccagcacctttgcatcaatactgtgggttcttaccactgtgcctgctttcctggcttctcactgcaggacgatggccgcacttgccgcccagagggtcaccctccacagccggaagccccacaggagcctgcactgaagtcagaattttcccaggtggcctctaacaccatcccgctgccactgccgcagcccaatacctgcaaagacaatggaccctgcaagcaggtgtgcagcactgttgggggctcagccatatgctcctgttttcccggctatgccatcatggcggatggcgtgtcctgtgaagacatcaacgagtgtgtgacggacctgcacacgtgcagccggggcgagcactgtgtgaacacactgggctccttccactgctacaaggcactcacctgtgagccaggctatgccctcaaggatggcgagtgcgaagacgtggatgagtgtgcgatgggcacgcacacctgccagccgggcttcttgtgccagaacaccaagggctccttctactgccaggccaggcagcgctgcatggatggcttcctgcaggatcctgaaggcaactgtgtggacatcaacgagtgcacgtcactgtccgagccatgtcggccaggcttcagctgcatcaacacggtgggctcctacacatgccagaggaacccgctgatctgcgcgcgcggctaccacgccagcgatgatgggaccaagtgtgtggacgtgaatgagtgtgagacaggtgtgcaccgctgcggtgagggccaagtgtgccacaacctccctggctcctaccgctgtgactgcaaagccggctttcagcgggatgcctttggccggggctgcatcgacgtgaatgagtgctgggcctcgccaggccgcctgtgccagcacacgtgtgagaacacactcggctcctaccgctgttcctgcgcctccgggttcctgctagcagcggacggcaagcgctgtgaagacgtgaatgagtgtgaggcccagcgctgcagccaggagtgtgccaacatctatggctcctaccagtgctactgccgccagggctaccagctggctgaggatgggcacacctgcacagacatcgacgagtgtgctcaaggcgccggcatcctctgcaccttccgctgtctcaacgtgccagggagctaccagtgtgcatgccctgagcagggctacaccatgacggccaacgggaggtcctgcaaggacgtggatgagtgtgcactgggtacccacaactgttccgaggctgagacctgccacaacatccagggtagcttccgctgcctgcgcttcgagtgtcctcccaactatgtccaagtctccaaaacgaagtgcgagcgcaccacgtgccatgacttcctggagtgccagaactcgccagcgcgcatcacgcactaccagctcaacttccagacgggcctcctggtgcctgcgcatatcttccgcattggccccgcgccagccttcacaggggacaccatcgccctgaacatcatcaagggcaatgaggagggctactttggcacgcgcaggctcaatgcctacacgggtgtggtctacctgcagcgggccgtgctggagccccgggactttgccctggatgtggagatgaagctctggaggcagggctccgtcaccaccttcctggccaagatgcacatcttcttcaccacctttgccctgtgaggtgccagcacgggccacctgcgggtgtggcgcagcccagggctcacactgcgtgggagggactgggtcactattgtggtttttactataactttgtaaattaacttaattttgctgacttgactcctgtggcttctggacccctcctctgccccgcaggaggaagttccacggcaggtggtgcgttcccacgcaggcaccaagtggaagcttgcacggtgggccacggccgtggcgggtgccctgtgggtgaggctgggtgatgacctgaggaccagagacacgcgaccatgttggggctcttggactcctctggatgacccgtccccaaagttgacattccatttcatgttccactgtgattaattcttttcttttttaaaaaatcattttaaagttttttgtttaattataaagtagtacatgtacattatataaaaaaaagttcaactagtatgaaagggttataaagtaacagaggaaaacgcctcttggtccctttaaaaaaaaaaa

SEQ ID NO: 309981 - DNA, 4339 bp, Homo sapiens
cgcgcgcacacagccaggggccgcccgggctctcgacgcgccgacggccgggcggacggacggacggacgccgagcgcagtgccccgcgggtcttacaggagaggggaccgtcctgggctggcctggaccatggtgctgctctgggagcctgcaggagcctggcttgctctgggcctggccctggccctgggccccagcgtggccgcagctgcccctcggcaggactgcacgggcgtggagtgcccgccgctggagaactgcattgaggaggcgctggagccgggtgcctgctgtgccacgtgtgtgcagcagggctgcgcctgcgagggctaccagtactatgactgcctacagggtggcttcgtgcgcggccgcgtgcccgccggtcagtcctattttgtggacttcgggagcactgagtgctcctgcccaccaggcggcggcaagatcagctgccagttcatgctgtgcccggagctgccgcccaactgcatcgaggctgtagtggtggctgacagctgcccacagtgcggccaggtgggctgcgtccacgcgggccacaagtacgccgctggccacactgttcacctgccgccctgccgggcctgccactgccctgacgccggtggagagctcatctgctaccagctccccggttgccacgggaacttctcagatgccgaggagggtgaccccgagcgacactacgaagacccctacagctatgaccaggaggtggccgaggtggaagcagcaacagccctggggggtgaggtccaggcgggtgcagtccaggcaggcgcagggggccccccagctgctctgggaggtgggagtcagccactgtccaccatccaggcacccccctggccagctgtcctccccaggcccacagcggctgctgccctgggtcccccagccccagtgcaggccaaagctaggagagtgaccgaggacagtgaggaggaagaagaggaggaggaggagagagaggaaatggctgtcactgagcagctggcagcaggtggccacagggggctggatgggctgcccactacagccccagctggacccagtcttcctatccaggaggagagggcagaagctggggcaagggcagaagctggggcaaggcctgaagagaacctcatcctggatgcccaagccacgtcccgcagcactgggccggagggcgtgacgcatgcaccgagcctgggcaaggctgctctcgtcccaactcaggccgtgcctggctctcccagggacccagtcaagcccagcccccacaacatcctgtccacatcactgcctgatgcagcctggatcccacccacccgagaagtgcccaggaagccgcaagttctgccccattcccacgtggaggaggacacagaccccaactctgtccattctatccccagaagtagccctgaaggctccaccaaggacctgatcgagacttgctgcgcagccggacagcagtgggccattgacaatgacgagtgcctggagatccctgagagtggcactgaggacaacgtctgcaggacagcccagaggcactgctgtgtctcctacttgcaggagaagagctgcatggccggcgtcctgggagccaaggagggtgagacctgtggggctgaggacaacgacagctgcggcatctccctgtacaagcaatgctgtgactgctgtggcctgggcctccgcgtgcgggccgagggccagtcgtgtgagtccaatcctaacctgggctatccctgcaatcatgtcatgctctcctgctgtgagggtgaagagcctctcatagtacctgaggttcgccgacctccagagcccgcagctgcaccacggagagtttcagaggcagagatggcgggccgagaggccctgtcactgggcacagaggccgagctgccgaacagcctgccgggcgatgaccaggatgagtgccttctcctcccgggagagctgtgccagcacctttgcatcaatactgtgggttcttaccactgtgcctgctttcctggcttctcactgcaggacgatggccgcacttgccgcccagagggtcaccctccacagccggaagccccacaggagcctgcactgaagtcagaattttcccaggtggcctctaacaccatcccgctgccactgccgcagcccaatacctgcaaagacaatggaccctgcaagcaggtgtgcagcactgttgggggctcagccatatgctcctgttttcccggctatgccatcatggcggatggcgtgtcctgtgaagaccaagacgagtgcctgatgggtgctcacgattgtagccggcgacagttctgtgtgaacaccctgggatccttctactgtgtcaaccacacagtgctctgtgccgatggctatatcctcaatgcgcacaggaagtgcgtggacatcaacgagtgtgtgacggacctgcacacgtgcagccggggcgagcactgtgtgaacacactgggctccttccactgctacaaggcactcacctgtgagccaggctatgccctcaaggatggcgagtgcgaagacgtggatgagtgtgcgatgggcacgcacacctgccagccgggcttcttgtgccagaacaccaagggctccttctactgccaggccaggcagcgctgcatggatggcttcctgcaggatcctgaaggcaactgtgtggacatcaacgagtgcacgtcactgtccgagccatgtcggccaggcttcagctgcatcaacacggtgggctcctacacatgccagaggaacccgctgatctgcgcgcgcggctaccacgccagcgatgatgggaccaagtgtgtggacgtgaatgagtgtgagacaggtgtgcaccgctgcggtgagggccaagtgtgccacaacctccctggctcctaccgctgtgactgcaaagccggctttcagcgggatgcctttggccggggctgcatcgacgtgaatgagtgctgggcctcgccaggccgcctgtgccagcacacgtgtgagaacacactcggctcctaccgctgttcctgcgcctccgggttcctgctagcagcggacggcaagcgctgtgaagacgtgaatgagtgtgaggcccagcgctgcagccaggagtgtgccaacatctatggctcctaccagtgctactgccgccagggctaccagctggctgaggatgggcacacctgcacagacatcgacgagtgtgctcaaggcgccggcatcctctgcaccttccgctgtctcaacgtgccagggagctaccagtgtgcatgccctgagcagggctacaccatgacggccaacgggaggtcctgcaaggacgtggatgagtgtgcactgggtacccacaactgttccgaggctgagacctgccacaacatccagggtagcttccgctgcctgcgcttcgagtgtcctcccaactatgtccaagtctccaaaacgaagtgcgagcgcaccacgtgccatgacttcctggagtgccagaactcgccagcgcgcatcacgcactaccagctcaacttccagacgggcctcctggtgcctgcgcatatcttccgcattggccccgcgccagccttcacaggggacaccatcgccctgaacatcatcaagggcaatgaggagggctactttggcacgcgcaggctcaatgcctacacgggtgtggtctacctgcagcgggccgtgctggagccccgggactttgccctggatgtggagatgaagctctggaggcagggctccgtcaccaccttcctggccaagatgcacatcttcttcaccacctttgccctgtgaggtgccagcacgggccacctgcgggtgtggcgcagcccagggctcacactgcgtgggagggactgggtcactattgtggtttttactataactttgtaaattaacttaattttgctgacttgactcctgtggcttctggacccctcctctgccccgcaggaggaagttccacggcaggtggtgcgttcccacgcaggcaccaagtggaagcttgcacggtgggccacggccgtggcgggtgccctgtgggtgaggctgggtgatgacctgaggaccagagacacgcgaccatgttggggctcttggactcctctggatgacccgtccccaaagttgacattccatttcatgttccactgtgattaattcttttcttttttaaaaaatcattttaaagttttttgtttaattataaagtagtacatgtacattatataaaaaaaagttcaactagtatgaaagggttataaagtaacagaggaaaacgcctcttggtccctttaaaaaaaaaaa

SEQ ID NO: 309982 - DNA, 1953 bp, Homo sapiens
ggggactctgcagcctctgatggcctcgctctccctgcagacatcaacgagtgtgtgacggacctgcacacgtgcagccggggcgagcactgtgtgaacacactgggctccttccactgctacaaggcactcacctgtgagccaggctatgccctcaaggatggcgagtgcgaagacgtggatgagtgtgcgatgggcacgcacacctgccagccgggcttcttgtgccagaacaccaagggctccttctactgccaggccaggcagcgctgcatggatggcttcctgcaggatcctgaaggcaactgtgtggacatcaacgagtgcacgtcactgtccgagccatgtcggccaggcttcagctgcatcaacacggtgggctcctacacatgccagaggaacccgctgatctgcgcgcgcggctaccacgccagcgatgatgggaccaagtgtgtggacgtgaatgagtgtgagacaggtgtgcaccgctgcggtgagggccaagtgtgccacaacctccctggctcctaccgctgtgactgcaaagccggctttcagcgggatgcctttggccggggctgcatcgacgtgaatgagtgctgggcctcgccaggccgcctgtgccagcacacgtgtgagaacacactcggctcctaccgctgttcctgcgcctccgggttcctgctagcagcggacggcaagcgctgtgaagacgtgaatgagtgtgaggcccagcgctgcagccaggagtgtgccaacatctatggctcctaccagtgctactgccgccagggctaccagctggctgaggatgggcacacctgcacagacatcgacgagtgtgctcaaggcgccggcatcctctgcaccttccgctgtctcaacgtgccagggagctaccagtgtgcatgccctgagcagggctacaccatgacggccaacgggaggtcctgcaaggacgtggatgagtgtgcactgggtacccacaactgttccgaggctgagacctgccacaacatccagggtagcttccgctgcctgcgcttcgagtgtcctcccaactatgtccaagtctccaaaacgaagtgcgagcgcaccacgtgccatgacttcctggagtgccagaactcgccagcgcgcatcacgcactaccagctcaacttccagacgggcctcctggtgcctgcgcatatcttccgcattggccccgcgccagccttcacaggggacaccatcgccctgaacatcatcaagggcaatgaggagggctactttggcacgcgcaggctcaatgcctacacgggtgtggtctacctgcagcgggccgtgctggagccccgggactttgccctggatgtggagatgaagctctggaggcagggctccgtcaccaccttcctggccaagatgcacatcttcttcaccacctttgccctgtgaggtgccagcacgggccacctgcgggtgtggcgcagcccagggctcacactgcgtgggagggactgggtcactattgtggtttttactataactttgtaaattaacttaattttgctgacttgactcctgtggcttctggacccctcctctgccccgcaggaggaagttccacggcaggtggtgcgttcccacgcaggcaccaagtggaagcttgcacggtgggccacggccgtggcgggtgccctgtgggtgaggctgggtgatgacctgaggaccagagacacgcgaccatgttggggctcttggactcctctggatgacccgtccccaaagttgacattccatttcatgttccactgtgattaattcttttcttttttaaaaaatcattttaaagttttttgtttaattataaagtagtacatgtacattatataaaaaaaagttcaactagtatgaaagggttataaagtaacagaggaaaacgcctcttggtccctttaaaaaaaaaaa

SEQ ID NO: 309983 - DNA, 1614 bp, Homo sapiens
ggtgatctagagatccctgggcagtactggatgtgcggcagtacggatgtgcgggccagtacggatgtgcgggccagtacggatgtgctgggcagtacggatgtgcgggccagtacggacgtgaatgagtgtgagacaggtgtgcaccgctgcggtgagggccaagtgtgccacaacctccctggctcctaccgctgtgactgcaaagccggctttcagcgggatgcctttggccggggctgcatcgacgtgaatgagtgctgggcctcgccaggccgcctgtgccagcacacgtgtgagaacacactcggctcctaccgctgttcctgcgcctccgggttcctgctagcagcggacggcaagcgctgtgaagacgtgaatgagtgtgaggcccagcgctgcagccaggagtgtgccaacatctatggctcctaccagtgctactgccgccagggctaccagctggctgaggatgggcacacctgcacagacatcgacgagtgtgctcaaggcgccggcatcctctgcaccttccgctgtctcaacgtgccagggagctaccagtgtgcatgccctgagcagggctacaccatgacggccaacgggaggtcctgcaaggacgtggatgagtgtgcactgggtacccacaactgttccgaggctgagacctgccacaacatccagggtagcttccgctgcctgcgcttcgagtgtcctcccaactatgtccaagtctccaaaacgaagtgcgagcgcaccacgtgccatgacttcctggagtgccagaactcgccagcgcgcatcacgcactaccagctcaacttccagacgggcctcctggtgcctgcgcatatcttccgcattggccccgcgccagccttcacaggggacaccatcgccctgaacatcatcaagggcaatgaggagggctactttggcacgcgcaggctcaatgcctacacgggtgtggtctacctgcagcgggccgtgctggagccccgggactttgccctggatgtggagatgaagctctggaggcagggctccgtcaccaccttcctggccaagatgcacatcttcttcaccacctttgccctgtgaggtgccagcacgggccacctgcgggtgtggcgcagcccagggctcacactgcgtgggagggactgggtcactattgtggtttttactataactttgtaaattaacttaattttgctgacttgactcctgtggcttctggacccctcctctgccccgcaggaggaagttccacggcaggtggtgcgttcccacgcaggcaccaagtggaagcttgcacggtgggccacggccgtggcgggtgccctgtgggtgaggctgggtgatgacctgaggaccagagacacgcgaccatgttggggctcttggactcctctggatgacccgtccccaaagttgacattccatttcatgttccactgtgattaattcttttcttttttaaaaaatcattttaaagttttttgtttaattataaagtagtacatgtacattatataaaaaaaagttcaactagtatgaaagggttataaagtaacagaggaaaacgcctcttggtccctttaaaaaaaaaaa

SEQ ID NO: 309984 - DNA, 4049 bp, Homo sapiens
cgcgcgcacacagccaggggccgcccgggctctcgacgcgccgacggccgggcggacggacggacggacgccgagcgcagtgccccgcgggtcttacaggagaggggaccgtcctgggctggcctggaccatggtgctgctctgggagcctgcaggagcctggcttgctctgggcctggccctggccctgggccccagcgtggccgcagctgcccctcggcaggactgcacgggcgtggagtgcccgccgctggagaactgcattgaggaggcgctggagccgggtgcctgctgtgccacgtgtgtgcagcagggctgcgcctgcgagggctaccagtactatgactgcctacagggtggcttcgtgcgcggccgcgtgcccgccggtcagtcctattttgtggacttcgggagcactgagtgctcctgcccaccaggcggcggcaagatcagctgccagttcatgctgtgcccggagctgccgcccaactgcatcgaggctgtagtggtggctgacagctgcccacagtgcggccaggtgggctgcgtccacgcgggccacaagtacgccgctggccacactgttcacctgccgccctgccgggcctgccactgccctgacgccggtggagagctcatctgctaccagctccccggttgccacgggaacttctcagatgccgaggagggtgaccccgagcgacactacgaagacccctacagctatgaccaggaggtggccgaggtggaagcagcaacagccctggggggtgaggtccaggcgggtgcagtccaggcaggcgcagggggccccccagctgctctgggaggtgggagtcagccactgtccaccatccaggcacccccctggccagctgtcctccccaggcccacagcggctgctgccctgggtcccccagccccagtgcaggccaaagctaggagagtgaccgaggacagtgaggaggaagaagaggaggaggaggagagagaggaaatggctgtcactgagcagctggcagcaggtggccacagggggctggatgggctgcccactacagccccagctggacccagtcttcctatccaggaggagagggcagaagctggggcaagggcagaagctggggcaaggcctgaagagaacctcatcctggatgcccaagccacgtcccgcagcactgggccggagggcgtgacgcatgcaccgagcctgggcaaggctgctctcgtcccaactcaggccgtgcctggctctcccagggacccagtcaagcccagcccccacaacatcctgtccacatcactgcctgatgcagcctggatcccacccacccgagaagtgcccaggaagccgcaagttctgccccattcccacgtggaggaggacacagaccccaactctgtccattctatccccagaagtagccctgaaggctccaccaaggacctgatcgagacttgctgcgcagccggacagcagtgggccattgacaatgacgagtgcctggagatccctgagagtggcactgaggacaacgtctgcaggacagcccagaggcactgctgtgtctcctacttgcaggagaagagctgcatggccggcgtcctgggagccaaggagggtgagacctgtggggctgaggacaacgacagctgcggcatctccctgtacaagcaatgctgtgactgctgtggcctgggcctccgcgtgcgggccgagggccagtcgtgtgagtccaatcctaacctgggctatccctgcaatcatgtcatgctctcctgctgtgagggtgaagagcctctcatagtacctgaggttcgccgacctccagagcccgcagctgcaccacggagagtttcagaggcagagatggcgggccgagaggccctgtcactgggcacagaggccgagctgccgaacagcctgccgggcgatgaccaggatgagtgccttctcctcccgggagagctgtgccagcacctttgcatcaatactgtgggttcttaccactgtgcctgctttcctggcttctcactgcaggacgatggccgcacttgccgcccagagggtcaccctccacagccggaagccccacaggagcctgcactgaagtcagaattttcccaggtggcctctaacaccatcccgctgccactgccgcagcccaatacctgcaaagacaatggaccctgcaagcaggtgtgcagcactgttgggggctcagccatatgctcctgttttcccggctatgccatcatggcggatggcgtgtcctgtgaagacatcaacgagtgtgtgacggacctgcacacgtgcagccggggcgagcactgtgtgaacacactgggctccttccactgctacaaggcactcacctgtgagccaggctatgccctcaaggatggcgagtgcgaagacgtggatgagtgtgcgatgggcacgcacacctgccagccgggcttcttgtgccagaacaccaagggctccttctactgccaggccaggcagcgctgcatggatggcttcctgcaggatcctgaaggcaactgtgtggacatcaacgagtgcacgtcactgtccgagccatgtcggccaggcttcagctgcatcaacacggtgggctcctacacatgccagaggaacccgctgatctgcgcgcgcggctaccacgccagcgatgatgggaccaagtgtgtggacgtgaatgagtgtgagacaggtgtgcaccgctgcggtgagggccaagtgtgccacaacctccctggctcctaccgctgtgactgcaaagccggctttcagcgggatgcctttggccggggctgcatcgacgtgaatgagtgctgggcctcgccaggccgcctgtgccagcacacgtgtgagaacacactcggctcctaccgctgttcctgcgcctccgggttcctgctagcagcggacggcaagcgctgtgaagacgtgaatgagtgtgaggcccagcgctgcagccaggagtgtgccaacatctatggctcctaccagtgctactgccgccagggctaccagctggctgaggatgggcacacctgcacagacatcgacgagtgtgctcaaggcgccggcatcctctgcaccttccgctgtctcaacgtgccagggagctaccagtgtgcatgccctgagcagggctacaccatgacggccaacgggaggtcctgcaaggacgtggatgagtgtgcactgggtacccacaactgttccgaggctgagacctgccacaacatccagggtagcttccgctgcctgcgcttcgagtgtcctcccaactatgtccaagtctccaaaacgaagtgcgagcgcaccacgtgccatgacttcctggagtgccagaactcgccagcgcgcatcacgcactaccagctcaacttccagacgggcctcctggtgcctgcgcatatcttccgcattggccccgcgccagccttcacaggggacaccatcgccctgaacatcatcaagggcaatgaggagggctactttggcacgcgcaggctcaatgcctacacggggccacctgcgggtgtggcgcagcccagggctcacactgcgtgggagggactgggtcactattgtggtttttactataactttgtaaattaacttaattttgctgacttgactcctgtggcttctggacccctcctctgccccgcaggaggaagttccacggcaggtggtgcgttcccacgcaggcaccaagtggaagcttgcacggtgggccacggccgtggcgggtgccctgtgggtgaggctgggtgatgacctgaggaccagagacacgcgaccatgttggggctcttggactcctctggatgacccgtccccaaagttgacattccatttcatgttccactgtgattaattcttttcttttttaaaaaatcattttaaagttttttgtttaattataaagtagtacatgtacattatataaaaaaaagttcaactagtatgaaagggttataaagtaacagaggaaaacgcctcttggtccctttaaaaaaaaaaa

SEQ ID NO: 309985 - DNA, 3663 bp, Homo sapiens
cgcgcgcacacagccaggggccgcccgggctctcgacgcgccgacggccgggcggacggacggacggacgccgagcgcagtgccccgcgggtcttacaggagaggggaccgtcctgggctggcctggaccatggtgctgctctgggagcctgcaggagcctggcttgctctgggcctggccctggccctgggccccagcgtggccgcagctgcccctcggcaggactgcacgggcgtggagtgcccgccgctggagaactgcattgaggaggcgctggagccgggtgcctgctgtgccacgtgtgtgcagcagggctgcgcctgcgagggctaccagtactatgactgcctacagggtggcttcgtgcgcggccgcgtgcccgccggtcagtcctattttgtggacttcgggagcactgagtgctcctgcccaccaggcggcggcaagatcagctgccagttcatgctgtgcccggagctgccgcccaactgcatcgaggctgtagtggtggctgacagctgcccacagtgcggccaggtgggctgcgtccacgcgggccacaagtacgccgctggccacactgttcacctgccgccctgccgggcctgccactgccctgacgccggtggagagctcatctgctaccagctccccggttgccacgggaacttctcagatgccgaggagggtgaccccgagcgacactacgaagacccctacagctatgaccaggaggtggccgaggtggaagcagcaacagccctggggggtgaggtccaggcgggtgcagtccaggcaggcgcagggggccccccagctgctctgggaggtgggagtcagccactgtccaccatccaggcacccccctggccagctgtcctccccaggcccacagcggctgctgccctgggtcccccagccccagtgcaggccaaagctaggagagtgaccgaggacagtgaggaggaagaagaggaggaggaggagagagaggaaatggctgtcactgagcagctggcagcaggtggccacagggggctggatgggctgcccactacagccccagctggacccagtcttcctatccaggaggagagggcagaagctggggcaagggcagaagctggggcaaggcctgaagagaacctcatcctggatgcccaagccacgtcccgcagcactgggccggagggcgtgacgcatgcaccgagcctgggcaaggctgctctcgtcccaactcaggccgtgcctggctctcccagggacccagtcaagcccagcccccacaacatcctgtccacatcactgcctgatgcagcctggatcccacccacccgagaagtgcccaggaagccgcaagttctgccccattcccacgtggaggaggacacagaccccaactctgtccattctatccccagaagtagccctgaaggctccaccaaggacctgatcgagacttgctgcgcagccggacagcagtgggccattgacaatgacgagtgcctggagatccctgagagtggcactgaggacaacgtctgcaggacagcccagaggcactgctgtgtctcctacttgcaggagaagagctgcatggccggcgtcctgggagccaaggagggtgagacctgtggggctgaggacaacgacagctgcggcatctccctgtacaagcaatgctgtgactgctgtggcctgggcctccgcgtgcgggccgagggccagtcgtgtgagtccaatcctaacctgggctatccctgcaatcatgtcatgctctcctgctgtgagggtgaagagcctctcatagtacctgaggttcgccgacctccagagcccgcagctgcaccacggagagtttcagaggcagagatggcgggccgagaggccctgtcactgggcacagaggccgagctgccgaacagcctgccgggcgatgaccaggatgagtgccttctcctcccgggagagctgtgccagcacctttgcatcaatactgtgggttcttaccactgtgcctgctttcctggcttctcactgcaggacgatggccgcacttgccgcccagagggtcaccctccacagccggaagccccacaggagcctgcactgaagtcagaattttcccaggtggcctctaacaccatcccgctgccactgccgcagcccaatacctgcaaagacaatggaccctgcaagcaggtgtgcagcactgttgggggctcagccatatgctcctgttttcccggctatgccatcatggcggatggcgtgtcctgtgaagacatcaacgagtgtgtgacggacctgcacacgtgcagccggggcgagcactgtgtgaacacactgggctccttccactgctacaaggcactcacctgtgagccaggctatgccctcaaggatggcgagtgcgaagacgtggatgagtgtgcgatgggcacgcacacctgccagccgggcttcttgtgccagaacaccaagggctccttctactgccaggccaggcagcgctgcatggatggcttcctgcaggatcctgaaggcaactgtgtggacatcaacgagtgcacgtcactgtccgagccatgtcggccaggcttcagctgcatcaacacggtgggctcctacacatgccagaggaacccgctgatctgcgcgcgcggctaccacgccagcgatgatgggaccaagtgtgtggacgtgaatgagtgtgagacaggtgtgcaccgctgcggtgagggccaagtgtgccacaacctccctggctcctaccgctgtgactgcaaagccggctttcagcgggatgcctttggccggggctgcatcgacgtgaatgagtgctgggcctcgccaggccgcctgtgccagcacacgtgtgagaacacactcggctcctaccgctgttcctgcgcctccgggttcctgctagcagcggacggcaagcgctgtgaagacgtgaatgagtgtgaggcccagcgctgcagccaggagtgtgccaacatctatggctcctaccagtgctactgccgccagggctaccagctggctgaggatgggcacacctgcacagacatcgacgagtgtgctcaaggcgccggcatcctctgcaccttccgctgtctcaacgtgccagggagctaccagtgtgcatgccctgagcagggctacaccatgacggccaacgggaggtcctgcaaggacgtggatgagtgtgcactgggtacccacaactgttccgaggctgagacctgccacaacatccagggtagcttccgctgcctgcgcttcgagtgtcctcccaactatgtccaagtctccaaaacgtggtgcgttcccacgcaggcaccaagtggaagcttgcacggtgggccacggccgtggcgggtgccctgtgggtgaggctgggtgatgacctgaggaccagagacacgcgaccatgttggggctcttggactcctctggatgacccgtccccaaagttgacattccatttcatgttccactgtgattaattcttttcttttttaaaaaatcattttaaagttttttgtttaattataaagtagtacatgtacattatataaaaaaaagttcaactagtatgaaagggttataaagtaacagaggaaaacgcctcttggtccctttaaaaaaaaaaa

SEQ ID NO: 309986 - DNA, 3435 bp, Homo sapiens
cgcggggacgcccgggcggccctgaaggggacggggcggccccagtcggaggtcgcagggagctccgcccccgactcggtataagagctgggcccggcccacggcggcggcggcggcggcggagagagctggctcagggcgtccgctaggctcggacgacctgctgagcctcccaaaccgcttccataaggctttgcctttccaacttcagctacagtgttagctaagtttggaaagaaggaaaaaagaaaatccctgggccccttttcttttgttctttgccaaagtcgtcgttgtagtctttttgcccaaggctgttgtgtttttagaggtgctatctccagttccttgcactcctgttaacaagcacctcagcgagagcagcagcagcgatagcagccgcagaagagccagcggggtcgcctagtgtcatgaccagggcgggagatcacaaccgccagagaggatgctgtggatccttggccgactacctgacctctgcaaaattccttctctaccttggtcattctctctctacttggggagatcggatgtggcactttgcggtgtctgtgtttctggtagagctctatggaaacagcctccttttgacagcagtctacgggctggtggtggcagggtctgttctggtcctgggagccatcatcggtgactgggtggacaagaatgctagacttaaagtggcccagacctcgctggtggtacagaatgtttcagtcatcctgtgtggaatcatcctgatgatggttttcttacataaacatgagcttctgaccatgtaccatggatgggttctcacttcctgctatatcctgatcatcactattgcaaatattgcaaatttggccagtactgctactgcaatcacaatccaaagggattggattgttgttgttgcaggagaagacagaagcaaactagcaaatatgaatgccacaatacgaaggattgaccagttaaccaacatcttagcccccatggctgttggccagattatgacatttggctccccagtcatcggctgtggctttatttcgggatggaacttggtatccatgtgcgtggagtacgtcctgctctggaaggtttaccagaaaaccccagctctagctgtgaaagctggtcttaaagaagaggaaactgaattgaaacagctgaatttacacaaagatactgagccaaaacccctggagggaactcatctaatgggtgtgaaagactctaacatccatgagcttgaacatgagcaagagcctacttgtgcctcccagatggctgagcccttccgtaccttccgagatggatgggtctcctactacaaccagcctgtgtttctggctggcatgggtcttgctttcctttatatgactgtcctgggctttgactgcatcaccacagggtacgcctacactcagggactgagtggttccatcctcagtattttgatgggagcatcagctataactggaataatgggaactgtagcttttacttggctacgtcgaaaatgtggtttggttcggacaggtctgatctcaggattggcacagctttcctgtttgatcttgtgtgtgatctctgtattcatgcctggaagccccctggacttgtccgtttctccttttgaagatatccgatcaaggttcattcaaggagagtcaattacacctaccaagatacctgaaattacaactgaaatatacatgtctaatgggtctaattctgctaatattgtcccggagacaagtcctgaatctgtgcccataatctctgtcagtctgctgtttgcaggcgtcattgctgctagaatcggtctttggtcctttgatttaactgtgacacagttgctgcaagaaaatgtaattgaatctgaaagaggcattataaatggtgtacagaactccatgaactatcttcttgatcttctgcatttcatcatggtcatcctggctccaaatcctgaagcttttggcttgctcgtattgatttcagtctcctttgtggcaatgggccacattatgtatttccgatttgcccaaaatactctgggaaacaagctctttgcttgcggtcctgatgcaaaagaagttaggaaggaaaatcaagcaaatacatctgttgtttgagacagtttaactgttgctatcctgttactagattatatagagcacatgtgcttattttgtactgcagaattccaataaatggctgggtgttttgctctgtttttaccacagctgtgccttgagaactaaaagctgtttaggaaacctaagtcagcagaaattaactgattaatttcccttatgttgaggcatggaaaaaaaattggaaaagaaaaactcagtttaaatacggagactataatgataacactgaattcccctatttctcatgagtagatacaatcttacgtaaaagagtggttagtcacgtgaattcagttatcatttgacagattcttatctgtactagaattcagatatgtcagttttctgcaaaactcactcttgttcaagactagctaatttatttttttgcatcttagttatttttaaaaacaaattcttcaagtatgaagactaaattttgataactaatattatccttattgatcctattgatcttaaggtatttacatgtatgtggaaaaacaaaacacttaactagaattctctaataaggtttatggtttagcttaaagagcacctttgtatttttattatcagatggggcaacatattgtatgaagcatatgtagcacttcacagcatggttatcatgtaagctgcaggtagaagcaaagctgtaaagtagatttatcacacaatgactgcatacagacttcaaatatgtcaatagtttggtcatagaacctagaagccaaaagccacacagaagggcaagaatcccaatttaactcatgttatcatcattagtgatctgtgttgtagaacatgagggtgtaagccttcagcctggcaagttacatgtagaaagcccacacttgtgaaggttttgttttacaaatcacttgatttaacacactcaggtagaatatttttatttttactgttttatacccagaagttatttctacattgttctacagcaagaatattcataaaagtatccctttcaaatgcctttgagaagaatagaagaaaaaaagtttgtatatattttaaaaaattgttttaaaagtcagtttgcaacatgtctgtaccaagatggtactttgccttaaccgtttatatgcactttcatggagactgcaatacgttgctatgagcactttctttatccttggagtttaatcctttgcttcatctttctacagtatgacataatgatttgctatgttgtaaaatctttgtaaaaaatttctatataaaaatattttgaaaatcttaa

SEQ ID NO: 309987 - DNA, 3711 bp, Homo sapiens
cgcggggacgcccgggcggccctgaaggggacggggcggccccagtcggaggtcgcagggagctccgcccccgactcggtataagagctgggcccggcccacggcggcggcggcggcggcggagagagctggctcagggcgtccgctaggctcggacgacctgctgagcctcccaaaccgcttccataaggctttgcctttccaacttcagctacagtgttagctaagtttggaaagaaggaaaaaagaaaatccctgggccccttttcttttgttctttgccaaagtcgtcgttgtagtctttttgcccaaggctgttgtgtttttagaggtgctatctccagttccttgcactcctgttaacaagcacctcagcgagagcagcagcagcgatagcagccgcagaagagccagcggggtcgcctagtgtcatgaccagggcgggagatcacaaccgccagagaggatgctgtggatccttggccgactacctgacctctgcaaaattccttctctaccttggtcattctctctctacttggggagatcggatgtggcactttgcggtgtctgtgtttctggtagagctctatggaaacagcctccttttgacagcagtctacgggctggtggtggcagggtctgttctggtcctgggagccatcatcggtgactgggtggacaagaatgctagacttaaagtggcccagacctcgctggtggtacagaatgtttcagtcatcctgtgtggaatcatcctgatgatggttttcttacataaacatgagcttctgaccatgtaccatggatgggttctcacttcctgctatatcctgatcatcactattgcaaatattgcaaatttggccagtactgctactgcaatcacaatccaaagggattggattgttgttgttgcaggagaagacagaagcaaactagcaaatatgaatgccacaatacgaaggattgaccagttaaccaacatcttagcccccatggctgttggccagattatgacatttggctccccagtcatcggctgtggctttatttcgggatggaacttggtatccatgtgcgtggagtacgtcctgctctggaaggtttaccagaaaaccccagctctagctgtgaaagctggtcttaaagaagaggaaactgaattgaaacagctgaatttacacaaagatactgagccaaaacccctggagggaactcatctaatgggtgtgaaagactctaacatccatgagcttgaacatgagcaagagcctacttgtgcctcccagatggctgagcccttccgtaccttccgagatggatgggtctcctactacaaccagcctgtgtttctggctggcatgggtcttgctttcctttatatgactgtcctgggctttgactgcatcaccacagggtacgcctacactcagggactgagtggttccatcctcagtattttgatgggagcatcagctataactggaataatgggaactgtagcttttacttggctacgtcgaaaatgtggtttggttcggacaggtctgatctcaggattggcacagctttcctgtttgatcttgtgtgtgatctctgtattcatgcctggaagccccctggacttgtccgtttctccttttgaagatatccgatcaaggttcattcaaggagagtcaattacacctaccaagatacctgaaattacaactgaaatatacatgtctaatgggtctaattctgctaatattgtcccggagacaagtcctgaatctgtgcccataatctctgtcagtctgctgtttgcaggcgtcattgctgctagaatcggtctttggtcctttgatttaactgtgacacagttgctgcaagaaaatgtaattgaatctgaaagaggcattataaatggtgtacagaactccatgaactatcttcttgatcttctgcatttcatcatggtcatcctggctccaaatcctgaagcttttggcttgctcgtattgatttcagtctcctttgtggcaatgggccacattatgtatttccgatttgcccaaaatactctgggaaacaagctctttgcttgcggtcctgatgcaaaagaagttaggaaggaaaatcaagcaaatacatctgttgtttgagacagtttaactgttgctatcctgttactagattatatagagcacatgtgcttattttgtactgcagaattccaataaatggctgggtgttttgctctgtttttaccacagctgtgccttgagaactaaaagctgtttaggaaacctaagtcagcagaaattaactgattaatttcccttatgttgaggcatggaaaaaaaattggaaaagaaaaactcagtttaaatacggagactataatgataacactgaattcccctatttctcatgagtagatacaatcttacgtaaaagagtggttagtcacgtgaattcagttatcatttgacagattcttatctgtactagaattcagatatgtcagttttctgcaaaactcactcttgttcaagactagctaatttatttttttgcatcttagttatttttaaaaacaaattcttcaagtatgaagactaaattttgataactaatattatccttattgatcctattgatcttaaggtatttacatgtatgtggaaaaacaaaacacttaactagaattctctaataaggtttatggtttagcttaaagagcacctttgtatttttattatcagatggggcaacatattgtatgaagcatatgtagcacttcacagcatggttatcatgtaagctgcaggtagaagcaaagctgtaaagtagatttatcacacaatgactgcatacagacttcaaatatgtcaatagtttggtcatagaacctagaagccaaaagccacacagaagggcaagaatcccaatttaactcatgttatcatcattagtgatctgtgttgtagaacatgagggtgtaagccttcagcctggcaagttacatgtagaaagcccacacttgtgaaggttttgttttacaaatcacttgatttaacacactcaggtagaatatttttatttttactgttttatacccagaagttatttctacattgttctacagcaagaatattcataaaagtatccctttcaaatgcctttgagaagaatagaagaaaaaaagtttgtatatattttaaaaaattgttttaaaagtcagtttgcaacatgtctgtaccaagatggtactttgccttaaccgtttatatgcactttcatggagactgcaatacgttgctatgagcactttctttatccttggagtttaatcctttgcttcatctttctacagtatgacataatgatttgctatgttgtaaaatctttgtaaaaaatttctatataaaaatattttgaaaatcttaaaaaaaaacaaaagaaaaatttttgggcgagctgggccctggaaaaatttttttgagacctttggtttggggggggggggcccaagtagtgtacggcgaacacgtggtcacaagcggtgtcccaaaggaaaacccgtggcaatgcacaaggggcggggatccccccgcattaaaaaacgcccggggcacaccgacggtttgggacacatccgagagggagctcagaaggcacaaggggacactaacaacagagctcacaagaaggtcgatataagta

SEQ ID NO: 309988 - DNA, 2694 bp, Homo sapiens
  misc_feature (663)..(663): n is a, c, g, or t
  misc_feature (942)..(942): n is a, c, g, or t
  misc_feature (1129)..(1129): n is a, c, g, or t
tagctttggtaaatagacatatctgctacaaaagatggatggatgtttcatataccttctcttcttcacattttaaaatattttgttttctttttttgttaaaatttagttccagcgtgcagcaccatgagaatacaatagaatggtagagtgactgacttaagctaataataacattctaagattaattgaaacataaatgacccccagaacaaatatctgagtgacaaaaattctggtctttaaaaatgttatctatagttagataaagtttggggcagtggaggctatcttaaaattaatcatccaatgaatatcagcaatggatttacagttttccctctgactttctaggttgtcctggaaaagacctagtgtttctgtagatctgggctcctaaaactctctccgaaaaataataaactagaagggtgctagatatatgttcagtgatgattagaatctttaacattaaacaattattgtttaaaagcaataaatctggctatattctgtccatggctcatatgtatttaaaaagaatggaaagaattttgagagtaaattttttgaatgttattttccttttaaattggaaacttatattggatcatccttaagacatggatggaaaccactggaagaggaaatctatacccaatncctttgagaaattgttaagctacattattggttctctaagaaatagcagtttatagatgacattttagaaaagcaagctcctatcttaccagaggcttacacaggggtgactctgcaaatacatgtaaacaaagtggaattggtgtgagtttgttttaattccaacagctgatgatgctaagtagaaacctagtgaaacaacccttaataaataaaaagcaatagtttgttcccccagtttaattcagtaaatattaagtattaataacatgtgatggnaatagtatctgaaattctcagcctgtggtctggccttgctcttagaggaagaagatgcctctcttccaagttctgattatggtttatgtgacctttggttaataggttaggaggtcagatttgccagaaaaccagtggcaccgtggttgttccaggaggatattttgtcatgttcattaaaagtccnacaagaaaggtgacacatgcttatcccaactttacagtaagtcaagcaaaggaagttctcatgagaaagttggattaaacaaacagcagcaactacaatcatataaggtttagtggatttttactcctttccgctgcaaaggagtgcaaaagaggaatgtctctaacactaggtaattatgctttttatgttttttctcttgtgtggcactctgcctgattttattacaacaaaacatttatgtttctgtattatgtgtgtgtgtatatgtattttatatatatgcattttccgtcccaccctgccaagtcatgatttcttatgcactgaacgtaggggcattagagtagaaggttgcctcaggttagttttgtgtggggttgaatgccttttatttctgacttcatttctatctgccaatggatcaatgcattttactctatattatcaaaatacaatatagtgtaagaagtggatcctggctaggtgcagtggctcatgcctgtaatcctagcactttgggaggctgaggcaggaggattccttgagcccaggagtctgagaccagcctgggcaacatagggagactctgtctctgcaaaaaaaaatttaaaaattagccaggtgtcatgagacacacctgtagtcccagctactgagaggctgaggtggaagaattgcttgaacccaggagtttgaagctgcagtgagctgtgatcacaccactacactccagcctggacaacagaataagaccctgtctcaaaaaaaaaaaaaaaaagtggatactattgtcaaggagcttataatacaatttagtatgggctttaaaaaagatatctaataacaaaaagatgacagtgtaagacagtgaaaaagaggggccagttgcttatatctgataacatgatcttacaaactctctccatttaaaccccaatatgtctgcatttctccagccctcgtttcccagaggctcactttgctcatggaggcctttgttgccaccagctccatcctactttatatttcctcatagcagcacgtgccctgtgctagatttgcttttggtctgtgctcactggaatgtgagctgcatgaaaaccttttgtgcgctgctgaagctctagtgcttgcaaatgtcgggtacatagtagccacttagtaagtattaagtggattgaggaccatgatcattcattgacagtttattaggtttgccttcagctctcagtcccgtgggggtacatggacacataaataggtcatccaagtttagtgagaattggtgggaaggcaagaaatggaaataaggaaggatgggcacttggtcaatatttacatagactttacccaaatattgggctttttgtaaacatagaatctgttgcttcttaaagcctaagcccgttggaaattggggtaatgtgagcaatttctttctttccatcaaagaggtggtatggcatgcaagaaaaagcaagattcaaaactttaatagcatttgtcttgatgtcttgctttagaggactctaagacaattaaaaaatacaataagagtaaga

SEQ ID NO: 309989 - DNA, 743 bp, Homo sapiens
cgcggggacgcccgggcggccctgaaggggacggggcggccccagtcggaggtcgcagggagctccgcccccgactcggtataagagctgggcccggcccacggcggcggcggcggcggcggagagagctggctcagggcgtccgctaggctcggacgacctgctgagcctcccaaaccgcttccataaggctttgcctttccaacttcagctacagtgttagctaagtttggaaagaaggaaaaaagaaaatccctgggccccttttcttttgttctttgccaaagtcgtcgttgtagtctttttgcccaaggctgttgtgtttttagaggtgctatctccagttccttgcactcctgttaacaagcacctcagcgagagcagcagcagcgatagcagccgcagaagagccagcggggtcgcctagtgtcatgaccagggcgggagatcacaaccgccagagaggatgctgtggtgagtgtcgttgaccgaaagcatatggtggaaacccaggtggggctttggagacaagcaactctacacgagttctggaggaatgtggctctgctgtgaaccatagctttgtaaaaagatcctttgactcatatttggtggacgttaaggaagaaaggaaattcagggtgtgggaaaaggggtttgcacacaggcacggatggagtagattgggcagtttggattgccttgtgtaaaaaagaaacaaaacaaacaaaccaaccaaccca

SEQ ID NO: 309990 - DNA, 3165 bp, Homo sapiens
ctgcctttgtcctggtgagcacatctgatatggcagaggaaactgaggatgcctggccgaggtgctatctccagttccttgcactcctgttaacaagcacctcagcgagagcagcagcagcgatagcagccgcagaagagccagcggggtcgcctagtgtcatgaccagggcgggagatcacaaccgccagagaggatgctgtggatccttggccgactacctgacctctgcaaaattccttctctaccttggtcattctctctctacttggggagatcggatgtggcactttgcggtgtctgtgtttctggtagagctctatggaaacagcctccttttgacagcagtctacgggctggtggtggcagggtctgttctggtcctgggagccatcatcggtgactgggtggacaagaatgctagacttaaagtggcccagacctcgctggtggtacagaatgtttcagtcatcctgtgtggaatcatcctgatgatggttttcttacataaacatgagcttctgaccatgtaccatggatgggttctcacttcctgctatatcctgatcatcactattgcaaatattgcaaatttggccagtactgctactgcaatcacaatccaaagggattggattgttgttgttgcaggagaagacagaagcaaactagcaaatatgaatgccacaatacgaaggattgaccagttaaccaacatcttagcccccatggctgttggccagattatgacatttggctccccagtcatcggctgtggctttatttcgggatggaacttggtatccatgtgcgtggagtacgtcctgctctggaaggtttaccagaaaaccccagctctagctgtgaaagctggtcttaaagaagaggaaactgaattgaaacagctgaatttacacaaagatactgagccaaaacccctggagggaactcatctaatgggtgtgaaagactctaacatccatgagcttgaacatgagcaagagcctacttgtgcctcccagatggctgagcccttccgtaccttccgagatggatgggtctcctactacaaccagcctgtgtttctggctggcatgggtcttgctttcctttatatgactgtcctgggctttgactgcatcaccacagggtacgcctacactcagggactgagtggttccatcctcagtattttgatgggagcatcagctataactggaataatgggaactgtagcttttacttggctacgtcgaaaatgtggtttggttcggacaggtctgatctcaggattggcacagctttcctgtttgatcttgtgtgtgatctctgtattcatgcctggaagccccctggacttgtccgtttctccttttgaagatatccgatcaaggttcattcaaggagagtcaattacacctaccaagatacctgaaattacaactgaaatatacatgtctaatgggtctaattctgctaatattgtcccggagacaagtcctgaatctgtgcccataatctctgtcagtctgctgtttgcaggcgtcattgctgctagaatcggtctttggtcctttgatttaactgtgacacagttgctgcaagaaaatgtaattgaatctgaaagaggcattataaatggtgtacagaactccatgaactatcttcttgatcttctgcatttcatcatggtcatcctggctccaaatcctgaagcttttggcttgctcgtattgatttcagtctcctttgtggcaatgggccacattatgtatttccgatttgcccaaaatactctgggaaacaagctctttgcttgcggtcctgatgcaaaagaagttaggaaggaaaatcaagcaaatacatctgttgtttgagacagtttaactgttgctatcctgttactagattatatagagcacatgtgcttattttgtactgcagaattccaataaatggctgggtgttttgctctgtttttaccacagctgtgccttgagaactaaaagctgtttaggaaacctaagtcagcagaaattaactgattaatttcccttatgttgaggcatggaaaaaaaattggaaaagaaaaactcagtttaaatacggagactataatgataacactgaattcccctatttctcatgagtagatacaatcttacgtaaaagagtggttagtcacgtgaattcagttatcatttgacagattcttatctgtactagaattcagatatgtcagttttctgcaaaactcactcttgttcaagactagctaatttatttttttgcatcttagttatttttaaaaacaaattcttcaagtatgaagactaaattttgataactaatattatccttattgatcctattgatcttaaggtatttacatgtatgtggaaaaacaaaacacttaactagaattctctaataaggtttatggtttagcttaaagagcacctttgtatttttattatcagatggggcaacatattgtatgaagcatatgtagcacttcacagcatggttatcatgtaagctgcaggtagaagcaaagctgtaaagtagatttatcacacaatgactgcatacagacttcaaatatgtcaatagtttggtcatagaacctagaagccaaaagccacacagaagggcaagaatcccaatttaactcatgttatcatcattagtgatctgtgttgtagaacatgagggtgtaagccttcagcctggcaagttacatgtagaaagcccacacttgtgaaggttttgttttacaaatcacttgatttaacacactcaggtagaatatttttatttttactgttttatacccagaagttatttctacattgttctacagcaagaatattcataaaagtatccctttcaaatgcctttgagaagaatagaagaaaaaaagtttgtatatattttaaaaaattgttttaaaagtcagtttgcaacatgtctgtaccaagatggtactttgccttaaccgtttatatgcactttcatggagactgcaatacgttgctatgagcactttctttatccttggagtttaatcctttgcttcatctttctacagtatgacataatgatttgctatgttgtaaaatctttgtaaaaaatttctatataaaaatattttgaaaatcttaa

SEQ ID NO: 309991 - DNA, 3570 bp, Homo sapiens
cgcggggacgcccgggcggccctgaaggggacggggcggccccagtcggaggtcgcagggagctccgcccccgactcggtataagagctgggcccggcccacggcggcggcggcggcggcggagagagctggctcagggcgtccgctaggctcggacgacctgctgagcctcccaaaccgcttccataaggctttgcctttccaacttcagctacagtgttagctaagtttggaaagaaggaaaaaagaaaatccctgggccccttttcttttgttctttgccaaagtcgtcgttgtagtctttttgcccaaggctgttgtgtttttagaggtgctatctccagttccttgcactcctgttaacaagcacctcagcgagagcagcagcagcgatagcagccgcagaagagccagcggggtcgcctagtgtcatgaccagggcgggagatcacaaccgccagagaggatgctgtggatccttggccgactacctgacctctgcaaaattccttctctaccttggtcattctctctctacttggtaagtcaagcaaaggaagttctcatgagaaagttggattaaacaaacagcagcaactacaatcatataaggtttagtggatttttactcctttccgctgcaaaggagtgcaaaagaggaatgtctctaacactagggagatcggatgtggcactttgcggtgtctgtgtttctggtagagctctatggaaacagcctccttttgacagcagtctacgggctggtggtggcagggtctgttctggtcctgggagccatcatcggtgactgggtggacaagaatgctagacttaaagtggcccagacctcgctggtggtacagaatgtttcagtcatcctgtgtggaatcatcctgatgatggttttcttacataaacatgagcttctgaccatgtaccatggatgggttctcacttcctgctatatcctgatcatcactattgcaaatattgcaaatttggccagtactgctactgcaatcacaatccaaagggattggattgttgttgttgcaggagaagacagaagcaaactagcaaatatgaatgccacaatacgaaggattgaccagttaaccaacatcttagcccccatggctgttggccagattatgacatttggctccccagtcatcggctgtggctttatttcgggatggaacttggtatccatgtgcgtggagtacgtcctgctctggaaggtttaccagaaaaccccagctctagctgtgaaagctggtcttaaagaagaggaaactgaattgaaacagctgaatttacacaaagatactgagccaaaacccctggagggaactcatctaatgggtgtgaaagactctaacatccatgagcttgaacatgagcaagagcctacttgtgcctcccagatggctgagcccttccgtaccttccgagatggatgggtctcctactacaaccagcctgtgtttctggctggcatgggtcttgctttcctttatatgactgtcctgggctttgactgcatcaccacagggtacgcctacactcagggactgagtggttccatcctcagtattttgatgggagcatcagctataactggaataatgggaactgtagcttttacttggctacgtcgaaaatgtggtttggttcggacaggtctgatctcaggattggcacagctttcctgtttgatcttgtgtgtgatctctgtattcatgcctggaagccccctggacttgtccgtttctccttttgaagatatccgatcaaggttcattcaaggagagtcaattacacctaccaagatacctgaaattacaactgaaatatacatgtctaatgggtctaattctgctaatattgtcccggagacaagtcctgaatctgtgcccataatctctgtcagtctgctgtttgcaggcgtcattgctgctagaatcggtctttggtcctttgatttaactgtgacacagttgctgcaagaaaatgtaattgaatctgaaagaggcattataaatggtgtacagaactccatgaactatcttcttgatcttctgcatttcatcatggtcatcctggctccaaatcctgaagcttttggcttgctcgtattgatttcagtctcctttgtggcaatgggccacattatgtatttccgatttgcccaaaatactctgggaaacaagctctttgcttgcggtcctgatgcaaaagaagttaggaaggaaaatcaagcaaatacatctgttgtttgagacagtttaactgttgctatcctgttactagattatatagagcacatgtgcttattttgtactgcagaattccaataaatggctgggtgttttgctctgtttttaccacagctgtgccttgagaactaaaagctgtttaggaaacctaagtcagcagaaattaactgattaatttcccttatgttgaggcatggaaaaaaaattggaaaagaaaaactcagtttaaatacggagactataatgataacactgaattcccctatttctcatgagtagatacaatcttacgtaaaagagtggttagtcacgtgaattcagttatcatttgacagattcttatctgtactagaattcagatatgtcagttttctgcaaaactcactcttgttcaagactagctaatttatttttttgcatcttagttatttttaaaaacaaattcttcaagtatgaagactaaattttgataactaatattatccttattgatcctattgatcttaaggtatttacatgtatgtggaaaaacaaaacacttaactagaattctctaataaggtttatggtttagcttaaagagcacctttgtatttttattatcagatggggcaacatattgtatgaagcatatgtagcacttcacagcatggttatcatgtaagctgcaggtagaagcaaagctgtaaagtagatttatcacacaatgactgcatacagacttcaaatatgtcaatagtttggtcatagaacctagaagccaaaagccacacagaagggcaagaatcccaatttaactcatgttatcatcattagtgatctgtgttgtagaacatgagggtgtaagccttcagcctggcaagttacatgtagaaagcccacacttgtgaaggttttgttttacaaatcacttgatttaacacactcaggtagaatatttttatttttactgttttatacccagaagttatttctacattgttctacagcaagaatattcataaaagtatccctttcaaatgcctttgagaagaatagaagaaaaaaagtttgtatatattttaaaaaattgttttaaaagtcagtttgcaacatgtctgtaccaagatggtactttgccttaaccgtttatatgcactttcatggagactgcaatacgttgctatgagcactttctttatccttggagtttaatcctttgcttcatctttctacagtatgacataatgatttgctatgttgtaaaatctttgtaaaaaatttctatataaaaatattttgaaaatcttaa

SEQ ID NO: 309992 - DNA, 3207 bp, Homo sapiens
cgcggggacgcccgggcggccctgaaggggacggggcggccccagtcggaggtcgcagggagctccgcccccgactcggtataagagctgggcccggcccacggcggcggcggcggcggcggagagagctggctcagggcgtccgctaggctcggacgacctgctgagcctcccaaaccgcttccataaggctttgcctttccaacttcagctacagtgttagctaagtttggaaagaaggaaaaaagaaaatccctgggccccttttcttttgttctttgccaaagtcgtcgttgtagtctttttgcccaaggctgttgtgtttttagaggtgctatctccagttccttgcactcctgttaacaagcacctcagcgagagcaacagcagtctacgggctggtggtggcagggtctgttctggtcctgggagccatcatcggtgactgggtggacaagaatgctagacttaaagtggcccagacctcgctggtggtacagaatgtttcagtcatcctgtgtggaatcatcctgatgatggttttcttacataaacatgagcttctgaccatgtaccatggatgggttctcacttcctgctatatcctgatcatcactattgcaaatattgcaaatttggccagtactgctactgcaatcacaatccaaagggattggattgttgttgttgcaggagaagacagaagcaaactagcaaatatgaatgccacaatacgaaggattgaccagttaaccaacatcttagcccccatggctgttggccagattatgacatttggctccccagtcatcggctgtggctttatttcgggatggaacttggtatccatgtgcgtggagtacgtcctgctctggaaggtttaccagaaaaccccagctctagctgtgaaagctggtcttaaagaagaggaaactgaattgaaacagctgaatttacacaaagatactgagccaaaacccctggagggaactcatctaatgggtgtgaaagactctaacatccatgagcttgaacatgagcaagagcctacttgtgcctcccagatggctgagcccttccgtaccttccgagatggatgggtctcctactacaaccagcctgtgtttctggctggcatgggtcttgctttcctttatatgactgtcctgggctttgactgcatcaccacagggtacgcctacactcagggactgagtggttccatcctcagtattttgatgggagcatcagctataactggaataatgggaactgtagcttttacttggctacgtcgaaaatgtggtttggttcggacaggtctgatctcaggattggcacagctttcctgtttgatcttgtgtgtgatctctgtattcatgcctggaagccccctggacttgtccgtttctccttttgaagatatccgatcaaggttcattcaaggagagtcaattacacctaccaagatacctgaaattacaactgaaatatacatgtctaatgggtctaattctgctaatattgtcccggagacaagtcctgaatctgtgcccataatctctgtcagtctgctgtttgcaggcgtcattgctgctagaatcggtctttggtcctttgatttaactgtgacacagttgctgcaagaaaatgtaattgaatctgaaagaggcattataaatggtgtacagaactccatgaactatcttcttgatcttctgcatttcatcatggtcatcctggctccaaatcctgaagcttttggcttgctcgtattgatttcagtctcctttgtggcaatgggccacattatgtatttccgatttgcccaaaatactctgggaaacaagctctttgcttgcggtcctgatgcaaaagaagttaggaaggaaaatcaagcaaatacatctgttgtttgagacagtttaactgttgctatcctgttactagattatatagagcacatgtgcttattttgtactgcagaattccaataaatggctgggtgttttgctctgtttttaccacagctgtgccttgagaactaaaagctgtttaggaaacctaagtcagcagaaattaactgattaatttcccttatgttgaggcatggaaaaaaaattggaaaagaaaaactcagtttaaatacggagactataatgataacactgaattcccctatttctcatgagtagatacaatcttacgtaaaagagtggttagtcacgtgaattcagttatcatttgacagattcttatctgtactagaattcagatatgtcagttttctgcaaaactcactcttgttcaagactagctaatttatttttttgcatcttagttatttttaaaaacaaattcttcaagtatgaagactaaattttgataactaatattatccttattgatcctattgatcttaaggtatttacatgtatgtggaaaaacaaaacacttaactagaattctctaataaggtttatggtttagcttaaagagcacctttgtatttttattatcagatggggcaacatattgtatgaagcatatgtagcacttcacagcatggttatcatgtaagctgcaggtagaagcaaagctgtaaagtagatttatcacacaatgactgcatacagacttcaaatatgtcaatagtttggtcatagaacctagaagccaaaagccacacagaagggcaagaatcccaatttaactcatgttatcatcattagtgatctgtgttgtagaacatgagggtgtaagccttcagcctggcaagttacatgtagaaagcccacacttgtgaaggttttgttttacaaatcacttgatttaacacactcaggtagaatatttttatttttactgttttatacccagaagttatttctacattgttctacagcaagaatattcataaaagtatccctttcaaatgcctttgagaagaatagaagaaaaaaagtttgtatatattttaaaaaattgttttaaaagtcagtttgcaacatgtctgtaccaagatggtactttgccttaaccgtttatatgcactttcatggagactgcaatacgttgctatgagcactttctttatccttggagtttaatcctttgcttcatctttctacagtatgacataatgatttgctatgttgtaaaatctttgtaaaaaatttctatataaaaatattttgaaaatcttaa

SEQ ID NO: 309993 - DNA, 4194 bp, Homo sapiens
  misc_feature (663)..(663): n is a, c, g, or t
  misc_feature (942)..(942): n is a, c, g, or t
  misc_feature (1129)..(1129): n is a, c, g, or t
tagctttggtaaatagacatatctgctacaaaagatggatggatgtttcatataccttctcttcttcacattttaaaatattttgttttctttttttgttaaaatttagttccagcgtgcagcaccatgagaatacaatagaatggtagagtgactgacttaagctaataataacattctaagattaattgaaacataaatgacccccagaacaaatatctgagtgacaaaaattctggtctttaaaaatgttatctatagttagataaagtttggggcagtggaggctatcttaaaattaatcatccaatgaatatcagcaatggatttacagttttccctctgactttctaggttgtcctggaaaagacctagtgtttctgtagatctgggctcctaaaactctctccgaaaaataataaactagaagggtgctagatatatgttcagtgatgattagaatctttaacattaaacaattattgtttaaaagcaataaatctggctatattctgtccatggctcatatgtatttaaaaagaatggaaagaattttgagagtaaattttttgaatgttattttccttttaaattggaaacttatattggatcatccttaagacatggatggaaaccactggaagaggaaatctatacccaatncctttgagaaattgttaagctacattattggttctctaagaaatagcagtttatagatgacattttagaaaagcaagctcctatcttaccagaggcttacacaggggtgactctgcaaatacatgtaaacaaagtggaattggtgtgagtttgttttaattccaacagctgatgatgctaagtagaaacctagtgaaacaacccttaataaataaaaagcaatagtttgttcccccagtttaattcagtaaatattaagtattaataacatgtgatggnaatagtatctgaaattctcagcctgtggtctggccttgctcttagaggaagaagatgcctctcttccaagttctgattatggtttatgtgacctttggttaataggttaggaggtcagatttgccagaaaaccagtggcaccgtggttgttccaggaggatattttgtcatgttcattaaaagtccnacaagaaaggtgacacatgcttatcccaactttacagtaagtcaagcaaaggaagttctcatgagaaagttggattaaacaaacagcagcaactacaatcatataaggtttagtggatttttactcctttccgctgcaaaggagtgcaaaagaggaatgtctctaacactagggagatcggatgtggcactttgcggtgtctgtgtttctggtagagctctatggaaacagcctccttttgacagcagtctacgggctggtggtggcagggtctgttctggtcctgggagccatcatcggtgactgggtggacaagaatgctagacttaaagtggcccagacctcgctggtggtacagaatgtttcagtcatcctgtgtggaatcatcctgatgatggttttcttacataaacatgagcttctgaccatgtaccatggatgggttctcacttcctgctatatcctgatcatcactattgcaaatattgcaaatttggccagtactgctactgcaatcacaatccaaagggattggattgttgttgttgcaggagaagacagaagcaaactagcaaatatgaatgccacaatacgaaggattgaccagttaaccaacatcttagcccccatggctgttggccagattatgacatttggctccccagtcatcggctgtggctttatttcgggatggaacttggtatccatgtgcgtggagtacgtcctgctctggaaggtttaccagaaaaccccagctctagctgtgaaagctggtcttaaagaagaggaaactgaattgaaacagctgaatttacacaaagatactgagccaaaacccctggagggaactcatctaatgggtgtgaaagactctaacatccatgagcttgaacatgagcaagagcctacttgtgcctcccagatggctgagcccttccgtaccttccgagatggatgggtctcctactacaaccagcctgtgtttctggctggcatgggtcttgctttcctttatatgactgtcctgggctttgactgcatcaccacagggtacgcctacactcagggactgagtggttccatcctcagtattttgatgggagcatcagctataactggaataatgggaactgtagcttttacttggctacgtcgaaaatgtggtttggttcggacaggtctgatctcaggattggcacagctttcctgtttgatcttgtgtgtgatctctgtattcatgcctggaagccccctggacttgtccgtttctccttttgaagatatccgatcaaggttcattcaaggagagtcaattacacctaccaagatacctgaaattacaactgaaatatacatgtctaatgggtctaattctgctaatattgtcccggagacaagtcctgaatctgtgcccataatctctgtcagtctgctgtttgcaggcgtcattgctgctagaatcggtctttggtcctttgatttaactgtgacacagttgctgcaagaaaatgtaattgaatctgaaagaggcattataaatggtgtacagaactccatgaactatcttcttgatcttctgcatttcatcatggtcatcctggctccaaatcctgaagcttttggcttgctcgtattgatttcagtctcctttgtggcaatgggccacattatgtatttccgatttgcccaaaatactctgggaaacaagctctttgcttgcggtcctgatgcaaaagaagttaggaaggaaaatcaagcaaatacatctgttgtttgagacagtttaactgttgctatcctgttactagattatatagagcacatgtgcttattttgtactgcagaattccaataaatggctgggtgttttgctctgtttttaccacagctgtgccttgagaactaaaagctgtttaggaaacctaagtcagcagaaattaactgattaatttcccttatgttgaggcatggaaaaaaaattggaaaagaaaaactcagtttaaatacggagactataatgataacactgaattcccctatttctcatgagtagatacaatcttacgtaaaagagtggttagtcacgtgaattcagttatcatttgacagattcttatctgtactagaattcagatatgtcagttttctgcaaaactcactcttgttcaagactagctaatttatttttttgcatcttagttatttttaaaaacaaattcttcaagtatgaagactaaattttgataactaatattatccttattgatcctattgatcttaaggtatttacatgtatgtggaaaaacaaaacacttaactagaattctctaataaggtttatggtttagcttaaagagcacctttgtatttttattatcagatggggcaacatattgtatgaagcatatgtagcacttcacagcatggttatcatgtaagctgcaggtagaagcaaagctgtaaagtagatttatcacacaatgactgcatacagacttcaaatatgtcaatagtttggtcatagaacctagaagccaaaagccacacagaagggcaagaatcccaatttaactcatgttatcatcattagtgatctgtgttgtagaacatgagggtgtaagccttcagcctggcaagttacatgtagaaagcccacacttgtgaaggttttgttttacaaatcacttgatttaacacactcaggtagaatatttttatttttactgttttatacccagaagttatttctacattgttctacagcaagaatattcataaaagtatccctttcaaatgcctttgagaagaatagaagaaaaaaagtttgtatatattttaaaaaattgttttaaaagtcagtttgcaacatgtctgtaccaagatggtactttgccttaaccgtttatatgcactttcatggagactgcaatacgttgctatgagcactttctttatccttggagtttaatcctttgcttcatctttctacagtatgacataatgatttgctatgttgtaaaatctttgtaaaaaatttctatataaaaatattttgaaaatcttaa

SEQ ID NO: 309994 - DNA, 3535 bp, Homo sapiens
cgcggggacgcccgggcggccctgaaggggacggggcggccccagtcggaggtcgcagggagctccgcccccgactcggtataagagctgggcccggcccacggcggcggcggcggcggcggagagagctggctcagggcgtccgctaggctcggacgacctgctgagcctcccaaaccgcttccataaggctttgcctttccaacttcagctacagtgttagctaagtttggaaagaaggaaaaaagaaaatccctgggccccttttcttttgttctttgccaaagtcgtcgttgtagtctttttgcccaaggctgttgtgtttttagaggtgctatctccagttccttgcactcctgttaacaagcacctcagcgagagcagcagcagcgatagcagccgcagaagagccagcggggtcgcctagtgtcatgaccagggcgggagatcacaaccgccagagaggatgctgtggatccttggccgactacctgacctctgcaaaattccttctctaccttggtcattctctctctacttggggagatcggatgtggcactttgcggtgtctgtgtttctggtagagctctatggaaacagcctccttttgacagcagtctacgggctggtggtggcagggtctgttctggtcctgggagccatcatcggtgactgggtggacaagaatgctagacttaaagtggcccagacctcgctggtggtacagaatgtttcagtcatcctgtgtggaatcatcctgatgatggttttcttacataaacatgagcttctgaccatgtaccatggatgggttctcacttcctgctatatcctgatcatcactattgcaaatattgcaaatttggccagtactgctactgcaatcacaatccaaagggattggattgttgttgttgcaggagaagacagaagcaaactagcaaatatgaatgccacaatacgaaggattgaccagttaaccaacatcttagcccccatggctgttggccagattatgacatttggctccccagtcatcggctgtggctttatttcgggatggaacttggtatccatgtgcgtggagtacgtcctgctctggaaggtttaccagaaaaccccagctctagctgtgaaagctggtcttaaagaagaggaaactgaattgaaacagctgaatttacacaaagatactgagccaaaacccctggagggaactcatctaatgggtgtgaaagactctaacatccatgagcttgaacatgagcaagagcctacttgtgcctcccagatggctgagcccttccgtaccttccgagatggatgggtctcctactacaaccagcctgtgtttctggctggcatgggtcttgctttcctttatatgactgtcctgggctttgactgcatcaccacagggtacgcctacactcagggactgagtggttccatcctcagtattttgatgggagcatcagctataactggaataatgggaactgtagcttttacttggctacgtcgaaaatgtggtttggttcggacaggtctgatctcaggattggcacagctttcctgtttgatcttgtgtgtgatctctgtattcatgcctggaagccccctggacttgtccgtttctccttttgaagatatccgatcaaggttcattcaaggagagtcaattacacctaccaagatacctgaaattacaactgaaatatacatgtctaatgggtctaattctgctaatattgtcccggagacaagtcctgaatctgtgcccataatctctgtcagtctgctgtttgcaggcgtcattgctgctagaatcggtctttggtcctttgatttaactgtgacacagttgctgcaagaaaatgtaattgaatctgaaagaggcattataaatggtgtacagaactccatgaactatcttcttgatcttctgcatttcatcatggtcatcctggctccaaatcctgaagcttttggcttgctcgtattgatttcagtctcctttgtggcaatgggccacattatgtatttccgatttgcccaaaatactctgggaaacaagctctttgcttgcggtcctgatgcaaaagaagttaggaaggaaaatcaagcaaatacatctgttgtttgagacagtttaactgttgctatcctgttactagattatatagagcacatgtgcttattttgtactgcagaattccaataaatggctgggtgttttgctctgtttttaccacagctgtgccttgagaactaaaagctgtttaggaaacctaagtcagcagaaattaactgattaatttcccttatgttgaggcatggaaaaaaaattggaaaagaaaaactcagtttaaatacggagactataatgataacactgaattcccctatttctcatgagtagatacaatcttacgtaaaagagtggttagtcacgtgaattcagttatcatttgacagattcttatctgtactagaattcagatatgtcagttttctgcaaaactcactcttgttcaagactagctaatttatttttttgcatcttagttatttttaaaaacaaattcttcaagtatgaagactaaattttgataactaatattatccttattgatcctattgatcttaaggtatttacatgtatgtggaaaaacaaaacacttaactagaattctctaataaggtttatggtttagcttaaagagcacctttgtatttttattatcagatggggcaacatattgtatgaagcatatgtagcacttcacagcatggttatcatgtaagctgcaggtagaagcaaagctgtaaagtagatttatcacacaatgactgcatacagacttcaaatatgtcaatagtttggtcatagaacctagaagccaaaagccacacagaagggcaagaatcccaatttaactcatgttatcatcattagtgatctgtgttgtagaacatgagggtgtaagccttcagcctggcaagttacatgtagaaagcccacacttgtgaaggttttgttttacaaatcacttgatttaacacactcaggtagaatatttttatttttactgttttatacccagaagttatttctacattgttctacagcaagaatattcataaaagtatccctttcaaatgcctttgagaagaatagaagaaaaaaagtttgtatatattttaaaaaattgttttaaaagtcagtttgcaacatgtctgtaccaagatggtactttgccttaaccgtttatatgcactttcatggagactgcaatacgttgctatgagcactttctttatccttggagtttaatcctttgcttcatctttctacagtatgacataatgatttgctatgttgtaaaatctttgtaaaaaatttctatataaaaatattttgaaaatcttaatttttcctgaattctgttccccaattatttaacaaggcttttgttacagaacatctgttttgggtaacttgtttttctctataaagggctacagtgtcat

SEQ ID NO: 309995 - DNA, 2800 bp, Homo sapiens
cgcggggacgcccgggcggccctgaaggggacggggcggccccagtcggaggtcgcagggagctccgcccccgactcggtataagagctgggcccggcccacggcggcggcggcggcggcggagagagctggctcagggcgtccgctaggctcggacgacctgctgagcctcccaaaccgcttccataaggctttgcctttccaacttcagctacagtgttagctaagtttggaaagaaggaaaaaagaaaatccctgggccccttttcttttgttctttgccaaagtcgtcgttgtagtctttttgcccaaggctgttgtgtttttagaggtgctatctccagttccttgcactcctgttaacaagcacctcagcgagagcagcagcagcgatagcagccgcagaagagccagcggggtcgcctagtgtcatgaccagggcgggagatcacaaccgccagagaggatgctgtggatccttggccgactacctgacctctgcaaaattccttctctaccttggtcattctctctctacttggggagatcggatgtggcactttgcggtgtctgtgtttctggtagagctctatggaaacagcctccttttgacagcagtctacgggctggtggtggcagggtctgttctggtcctgggagccatcatcggtgactgggtggacaagaatgctagacttaaagtggcccagacctcgctggtggtacagaatgtttcagtcatcctgtgtggaatcatcctgatgatggttttcttacataaacatgagcttctgaccatgtaccatggatgggttctcacttcctgctatatcctgatcatcactattgcaaatattgcaaatttggccagtactgctactgcaatcacaatccaaagggattggattgttgttgttgcaggagaagacagaagcaaactagcaaatatgaatgccacaatacgaaggattgaccagttaaccaacatcttagcccccatggctgttggccagattatgacatttggctccccagtcatcggctgtggctttatttcgggatggaacttggtatccatgtgcgtggagtacgtcctgctctggaaggtttaccagaaaaccccagctctagctgtgaaagctggtcttaaagaagaggaaactgaattgaaacagctgaatttacacaaagatactgagccaaaacccctggagggaactcatctaatgggtgtgaaagactctaacatccatgagcttgaacatgagcaagagcctacttgtgcctcccagatggctgagcccttccgtaccttccgagatggatgggtctcctactacaaccagcctgtgtttctggctggcatgggtcttgctttcctttatatgactgtcctgggctttgactgcatcaccacagggtacgcctacactcagggactgagtggttccatcctcagtattttgatgggagcatcagctataactggaataatgggaactgtagcttttacttggctacgtcgaaaatgtggtttggttcggacaggtctgatctcaggattggcacagctttcctgtttgatcttgtgtgtgatctctgtattcatgcctggaagccccctggacttgtccgtttctccttttgaagatatccgatcaaggttcattcaaggagagtcaattacacctaccaagatacctgaaattacaactgaaatatacatgtctaatgggtctaattctgctaatattgtcccggagacaagtcctgaatctgtgcccataatctctgtcagtctgctgtttgcaggcgtcattgctgctagaatcggtctttggtcctttgatttaactgtgacacagttgctgcaagaaaatgtaattgaatctgaaagaggcattataaatggtgtacagaactccatgaactatcttcttgatcttctgcatttcatcatggtcatcctggctccaaatcctgaagcttttggcttgctcgtattgatttcagtctcctttgtggcaatgggccacattatgtatttccgatttgcccaaaatactctgggaaacaagctctttgcttgcggtcctgatgcaaaagaagttaggaaggaaaatcaagcaaatacatctgttgtttgagacagtttaactgttgctatcctgttactagattatatagagcacatgtgcttattttgtatcacacaatgactgcatacagacttcaaatatgtcaatagtttggtcatagaacctagaagccaaaagccacacagaagggcaagaatcccaatttaactcatgttatcatcattagtgatctgtgttgtagaacatgagggtgtaagccttcagcctggcaagttacatgtagaaagcccacacttgtgaaggttttgttttacaaatcacttgatttaacacactcaggtagaatatttttatttttactgttttatacccagaagttatttctacattgttctacagcaagaatattcataaaagtatccctttcaaatgcctttgagaagaatagaagaaaaaaagtttgtatatattttaaaaaattgttttaaaagtcagtttgcaacatgtctgtaccaagatggtactttgccttaaccgtttatatgcactttcatggagactgcaatacgttgctatgagcactttctttatccttggagtttaatcctttgcttcatctttctacagtatgacataatgatttgctatgttgtaaaatctttgtaaaaaatttctatataaaaatattttgaaaatcttaa

SEQ ID NO: 309996 - DNA, 3279 bp, Homo sapiens
cgcggggacgcccgggcggccctgaaggggacggggcggccccagtcggaggtcgcagggagctccgcccccgactcggtataagagctgggcccggcccacggcggcggcggcggcggcggagagagctggctcagggcgtccgctaggctcggacgacctgctgagcctcccaaaccgcttccataaggctttgcctttccaacttcagctacagtgttagctaagtttggaaagaaggaaaaaagaaaatccctgggccccttttcttttgttctttgccaaagtcgtcgttgtagtctttttgcccaaggctgttgtgtttttagaggtgctatctccagttccttgcactcctgttaacaagcacctcagcgagagcagcagcagcgatagcagccgcagaagagccagcggggtcgcctagtgtcatgaccagggcgggagatcacaaccgccagagaggatgctgtggatccttggccgactacctgacctctgcaaaattccttctctaccttggtcattctctctctacttggggagatcggatgtggcactttgcggtgtctgtgtttctggtagagctctatggaaacagcctccttttgacagcagtctacgggctggtggtggcagggtctgttctggtcctgggagccatcatcggtgactgggtggacaagaatgctagacttaaagtggcccagacctcgctggtggtacagaatgtttcagtcatcctgtgtggaatcatcctgatgatggttttcttacataaacatgagcttctgaccatgtaccatggatgggttctcacttcctgctatatcctgatcatcactattgcaaatattgcaaatttggccagtactgctactgcaatcacaatccaaagggattggattgttgttgttgcaggagaagacagaagcaaactagcaaatatgaatgccacaatacgaaggattgaccagttaaccaacatcttagcccccatggctgttggccagattatgacatttggctccccagtcatcggctgtggctttatttcgggatggaacttggtatccatgtgcgtggagtacgtcctgctctggaaggtttaccagaaaaccccagctctagctgtgaaagctggtcttaaagaagaggaaactgaattgaaacagctgaatttacacaaagatactgagccaaaacccctggagggaactcatctaatgggtgtgaaagactctaacatccatgagcttgaacatgagcaagagcctacttgtgcctcccagatggctgagcccttccgtaccttccgagatggatgggtctcctactacaaccagcctgtgtttctggctggcatgggtcttgctttcctttatatgactgtcctgggctttgactgcatcaccacagggtacgcctacactcagggactgagtggttccatcctcagtattttgatgggagcatcagctataactggaataatgggaactgtagcttttacttggctacgtcgaaaatgtggtttggttcggacaggtctgatctcaggattggcacagctttcctgtttgatcttgtgtgtgatctctgtattcatgcctggaagccccctggacttgtccgtttctccttttgaagatatccgatcaaggttcattcaaggagagtcaattacacctaccaagatacctgaaattacaactgaaatatacatgtctaatgggtctaattctgctaatattgtcccggagacaagtcctgaatctgtgcccataatctctgtcagtctgctgtttgcaggcgtcattgctgctagaatcggtctttggtcctttgatttaactgtgacacagttgctgcaagaaaatgtaattgaatctgaaagaggcattataaatggtgtacagaactccatgaactatcttcttgatcttctgcatttcatcatggtcatcctggctccaaatcctgaagcttttggcttgctcgtattgatttcagtctcctttgtggcaatgggccacattatgtatttccgatttgcccaaaatactctgggaaacaagctctttgcttgcggtcctgatgcaaaagaagttaggaaggaaaatcaagcaaatacatctgttgtttgagacagtttaactgttgctatcctgttactagattatatagagcacatgtgcttattttgtactgcagaattccaataaatggctgggtgttttgctctgtttttaccacagctgtgccttgagaactaaaagctgtttaggaaacctaagtcagcagaaattaactgattaatttcccttatgttgaggcatggaaaaaaaattggaaaagaaaaactcagtttaaatacggagactataatgataacactgaattcccctatttctcatgagtagatacaatcttacgtaaaagagtggttagtcacgtgaattcagttatcatttgacagattcttatctgtactagaattcagatatgtcagttttctgcaaaactcactcttgttcaagactagctaatttatttttttgcatcttagttatttttaaaaacaaattcttcaagtatgaagactaaattttgataactaatattatccttattgatcctattgatcttaaggtatttacatgtatgtggaaaaacaaaacacttaactagaattctctaataaggtttatggtttagcttaaagagcacctttgtatttttattatcagatggggcaacatattgtatgaagcatatgtagcacttcacagcatggttatcatgtaagctgcaggtagaagcaaagctgtaaagtagatttatcacacaatgactgcatacagacttcaaatatgtcaatagtttggtcatagaacctagaagccaaaagccacacagaagggcaagaatcccaatttaactcatgttatcatcattagtgatctgtgttgtagaacatgagggtgtaagccttcagcctggcaagttacatgtagaaagcccacacttgtgaaggttttgttttacaaatcacttgatttaacacactcaggtagaatatttttatttttactgttttatacccagaagttatttctacattgttctacagcaagaatattcataaaagtatccctttcaaatgcctttgagaagaatagaagaaaaaaagtttgtatatattttaaaaaattgttttaaaagtcagtttgcaacatgtctgtaccaagatgtacggatacgcgggatcctcgggtc

SEQ ID NO: 309997 - DNA, 3378 bp, Homo sapiens
cgcggggacgcccgggcggccctgaaggggacggggcggccccagtcggaggtcgcagggagctccgcccccgactcggtataagagctgggcccggcccacggcggcggcggcggcggcggagagagctggctcagggcgtccgctaggctcggacgacctgctgagcctcccaaaccgcttccataaggctttgcctttccaacttcagctacagtgttagctaagtttggaaagaaggaaaaaagaaaatccctgggccccttttcttttgttctttgccaaagtcgtcgttgtagtctttttgcccaaggctgttgtgtttttagaggtgctatctccagttccttgcactcctgttaacaagcacctcagcgagagcagcagcagcgatagcagccgcagaagagccagcggggtcgcctagtgtcatgaccagggcgggagatcacaaccgccagagaggatgctgtggatccttggccgactacctgacctctgcaaaattccttctctaccttggtcattctctctctacttggggagatcggatgtggcactttgcggtgtctgtgtttctggtagagctctatggaaacagcctccttttgacagcagtctacgggctggtggtggcagggtctgttctggtcctgggagccatcatcggtgactgggtggacaagaatgctagacttaaagtggcccagacctcgctggtggtacagaatgtttcagtcatcctgtgtggaatcatcctgatgatggttttcttacataaacatgagcttctgaccatgtaccatggatgggttctcacttcctgctatatcctgatcatcactattgcaaatattgcaaatttggccagtactgctactgcaatcacaatccaaagggattggattgttgttgttgcaggagaagacagaagcaaactagcaaatatgaatgccacaatacgaaggattgaccagttaaccaacatcttagcccccatggctgttggccagattatgacatttggctccccagtcatcggctgtggctttatttcgggatggaacttggtatccatgtgcgtggagtacgtcctgctctggaaggtttaccagaaaaccccagctctagctgtgaaagctggtcttaaagaagaggaaactgaattgaaacagctgaatttacacaaagatactgagccaaaacccctggagggaactcatctaatgggtgtgaaagactctaacatccatgagcttgaacatgagcaagagcctacttgtgcctcccagatggctgagcccttccgtaccttccgagatggatgggtctcctactacaaccagcctgtgtttctggctggcatgggtcttgctttcctttatatgactgtcctgggctttgactgcatcaccacagggtacgcctacactcagggactgagtggttccatcctcagtattttgatgggagcatcagctataactggaataatgggaactgtagcttttacttggctacgtcgaaaatgtggtttggttcggacaggtctgatctcaggattggcacagctttcctgtttgatcttgtgtgtgatctctgtattcatgcctggaagccccctggacttgtccgtttctccttttgaagatatccgatcaaggttcattcaaggagagtcaattacacctaccaagatacctgaaattacaactgaaatatacatgtctaatgggtctaattctgctaatattgtcccggagacaagtcctgaatctgtgcccataatctctgtcagtctgctgtttgcaggcgtcattgctgctagaatcggtctttggtcctttgatttaactgtgacacagttgctgcaagaaaatgtaattgaatctgaaagaggcattataaatggtgtacagaactccatgaactatcttcttgatcttctgcatttcatcatggtcatcctggctccaaatcctgaagcttttggcttgctcgtattgatttcagtctcctttgtggcaatgggccacattatgtatttccgatttgcccaaaatactctgggaaacaagctctttgcttgcggtcctgatgcaaaagaagttaggaaggaaaatcaagcaaatacatctgttgtttgagacagtttaactgttgctatcctgttactagattatatagagcacatgtgcttattttgtactgcagaattccaataaatggctgggtgttttgctctgtttttaccacagctgtgccttgagaactaaaagctgtttaggaaacctaagtcagcagaaattaactgattaatttcccttatgttgaggcatggaaaaaaaattggaaaagaaaaactcagtttaaatacggagactataatgataacactgaattcccctatttctcatgagtagatacaatcttacgtaaaagagtggttagtcacgtgaattcagttatcatttgacagattcttatctgtactagaattcagatatgtcagttttctgcaaaactcactcttgttcaagactagctaatttatttttttgcatcttagttatttttaaaaacaaattcttcaagtatgaagactaaattttgataactaatattatccttattgatcctattgatcttaaggtatttacatgtatgtggaaaaacaaaacacttaactagaattctctaataaggtttatggtttagcttaaagagcacctttgtatttttattatcagatggggcaacatattgtatgaagcatatgtagcacttcacagcatggttatcatgtaagctgcaggtagaagcaaagctgtaaagtagatttatcacacaatgactgcatacagacttcaaatatgtcaatagtttggtcatagaacctagaagccaaaagccacacagaagggcaagaatcccaatttaactcatgttatcatcattagtgatctgtgttgtagaacatgagggtgtaagccttcagcctggcaagttacatgtagaaagcccacacttgtgaaggttttgttttacaaatcacttgatttaacacactcaggtagaatatttttatttttactgttttatacccagaagttatttctacattgttctacagcaagaatattcataaaagtatccctttcaaatgcctttgagaagaatagaagaaaaaaagtttgtatatattttaaaaaattttatatgcactttcatggagactgcaatacgttgctatgagcactttctttatccttggagtttaatcctttgcttcatctttctacagtatgacataatgatttgctatgttgtaaaatctttgtaaaaaatttctatataaaaatattttgaaaatcttaa

SEQ ID NO: 309998 - DNA, 1108 bp, Homo sapiens
tgctccatcagcattactgttaacttccaggttcctgcaaataatgcgtgttaccactctctccttaactttttgactctgtcgagagagggctcatgtttccttcaggtctctcctctaggtcaggagcatatctagggacatctgtgcttcactcagtctagaaaacctgcttgtcatagccaagccactgctgtgagctcctggcctccagtttagaaggaaacctgctgtccaaactaagatgcgccagtcttcgtcccatcagtatgaagactaaattttgataactaatattatccttattgatcctattgatcttaaggtatttacatgtatgtggaaaaacaaaacacttaactagaattctctaataaggtttatggtttagcttaaagagcacctttgtatttttattatcagatggggcaacatattgtatgaagcatatgtagcacttcacagcatggttatcatgtaagctgcaggtagaagcaaagctgtaaagtagatttatcacacaatgactgcatacagacttcaaatatgtcaatagtttggtcatagaacctagaagccaaaagccacacagaagggcaagaatcccaatttaactcatgttatcatcattagtgatctgtgttgtagaacatgagggtgtaagccttcagcctggcaagttacatgtagaaagcccacacttgtgaaggttttgttttacaaatcacttgatttaacacactcaggtagaatatttttatttttactgttttatacccagaagttatttctacattgttctacagcaagaatattcataaaagtatccctttcaaatgcctttgagaagaatagaagaaaaaaagtttgtatatattttaaaaaattgttttaaaagtcagtttgcaacatgtctgtaccaagatggtactttgccttaaccgtttatatgcactttcatggagactgcaatacgttgctatgagcactttctttatccttggagtttaatcctttgcttcatctttctacagtatgacataatgatttgctatgttgtaaaatctttgtaaaaaatttctatataaaaatattttgaaaatcttaa

SEQ ID NO: 309999 - DNA, 2950 bp, Homo sapiens
cgcggggacgcccgggcggccctgaaggggacggggcggccccagtcggaggtcgcagggagctccgcccccgactcggtataagagctgggcccggcccacggcggcggcggcggcggcggagagagctggctcagggcgtccgctaggctcggacgacctgctgagcctcccaaaccgcttccataaggctttgcctttccaacttcagctacagtgttagctaagtttggaaagaaggaaaaaagaaaatccctgggccccttttcttttgttctttgccaaagtcgtcgttgtagtctttttgcccaaggctgttgtgtttttagaggtgctatctccagttccttgcactcctgttaacaagcacctcagcgagagcagcagcagcgatagcagccgcagaagagccagcggggtcgcctagtgtcatgaccagggcgggagatcacaaccgccagagaggatgctgtggatccttggccgactacctgacctctgcaaaattccttctctaccttggtcattctctctctacttggggagatcggatgtggcactttgcggtgtctgtgtttctggtagagctctatggaaacagcctccttttgacagcagtctacgggctggtggtggcagggtctgttctggtcctgggagccatcatcggtgactgggtggacaagaatgctagacttaaagtggcccagacctcgctggtggtacagaatgtttcagtcatcctgtgtggaatcatcctgatgatggttttcttacataaacatgagcttctgaccatgtaccatggatgggttctcacttcctgctatatcctgatcatcactattgcaaatattgcaaatttggccagtactgctactgcaatcacaatccaaagggattggattgttgttgttgcaggagaagacagaagcaaactagcaaatatgaatgccacaatacgaaggattgaccagttaaccaacatcttagcccccatggctgttggccagattatgacatttggctccccagtcatcggctgtggctttatttcgggatggaacttggtatccatgtgcgtggagtacgtcctgctctggaaggtttaccagaaaaccccagctctagctgtgaaagctggtcttaaagaagaggaaactgaattgaaacagctgaatttacacaaagatactgagccaaaacccctggagggaactcatctaatgggtgtgaaagactctaacatccatgagcttgaacatgagcaagagcctacttgtgcctcccagatggctgagcccttccgtaccttccgagatggatgggtctcctactacaaccagcctgtgtttctggctggcatgggtcttgctttcctttatatgactgtcctgggctttgactgcatcaccacagggtacgcctacactcagggactgagtggttccatcctcagtattttgatgggagcatcagctataactggaataatgggaactgtagcttttacttggctacgtcgaaaatgtggtttggttcggacaggtctgatctcaggattggcacagctttcctgtttgatcttgtgtgtgatctctgtattcatgcctggaagccccctggacttgtccgtttctccttttgaagatatccgatcaaggttcattcaaggagagtcaattacacctaccaagatacctgaaattacaactgaaatatacatgtctaatgggtctaattctgctaatattgtcccggagacaagtcctgaatctgtgcccataatctctgtcagtctgctgtttgcaggcgtcattgctgctagaatcggtctttggtcctttgatttaactgtgacacagttgctgcaagaaaatgtaattgaatctgaaagaggcattataaatggtgtacagaactccatgaactatcttcttgatcttctgcatttcatcatggtcatcctggctccaaatcctgaagcttttggcttgctcgtattgatttcagtctcctttgtggcaatgggccacattatgtatttccgatttgcccaaaatactctgggaaacaagctctttgcttgcggtcctgatgcaaaagaagttaggaaggaaaatcaagcaaatacatctgttgtttgagacagtttaactgttgctatcctgttactagattatatagagcacatgtgcttattttgtactgcagaattccaataaatggctgggtgttttgctctgtttttaccacagctgtgccttgagaactaaaagctgtttaggaaacctaagtcagcagaaattaactgattaatttcccttatgttgaggcatggaaaaaaaattggaaaagaaaaactcagtttaaatacggagactataatgataacactgaattcccctatttctcatgagtagatacaatcttacgtaaaagagtggttagtcacgtgaattcagttatcatttgacagattcttatctgtactagaattcagatatgtcagttttctgcaaaactcactcttgttcaagactagctaatttatttttttgcatcttagttatttttaaaaacaaattcttcaagtatgaagactaaattttgataactaatattatccttattgatcctattgatcttaaggtatttacatgtatgtggaaaaacaaaacacttaactagaattctctaataaggtttatggtttagcttaaagagcacctttgtatttttattatcagatggggcaacatattgtatgaagcatatgtagcacttcacagcatggttatcatgtaagctgcaggtagaagcaaagctgtaaagtagatttatcacacaatgactgcatacaatatgttgccccatctgataataaaaatacaaaggtgctctttaagctaaaccataaaccttattagagaattctagttaagaggtc

SEQ ID NO: 310000 - DNA, 2964 bp, Homo sapiens
cgcggggacgcccgggcggccctgaaggggacggggcggccccagtcggaggtcgcagggagctccgcccccgactcggtataagagctgggcccggcccacggcggcggcggcggcggcggagagagctggctcagggcgtccgctaggctcggacgacctgctgagcctcccaaaccgcttccataaggctttgcctttccaacttcagctacagtgttagctaagtttggaaagaaggaaaaaagaaaatccctgggccccttttcttttgttctttgccaaagtcgtcgttgtagtctttttgcccaaggctgttgtgtttttagaggtgctatctccagttccttgcactcctgttaacaagcacctcagcgagagcagcagcagcgatagcagccgcagaagagccagcggggtcgcctagtgtcatgaccagggcgggagatcacaaccgccagagaggatgctgtggatccttggccgactacctgacctctgcaaaattccttctctaccttggtcattctctctctacttggggagatcggatgtggcactttgcggtgtctgtgtttctggtagagctctatggaaacagcctccttttgacagcagtctacgggctggtggtggcagggtctgttctggtcctgggagccatcatcggtgactgggtggacaagaatgctagacttaaagtggcccagacctcgctggtggtacagaatgtttcagtcatcctgtgtggaatcatcctgatgatggttttcttacataaacatgagcttctgaccatgtaccatggatgggttctcacttcctgctatatcctgatcatcactattgcaaatattgcaaatttggccagtactgctactgcaatcacaatccaaagggattggattgttgttgttgcaggagaagacagaagcaaactagcaaatatgaatgccacaatacgaaggattgaccagttaaccaacatcttagcccccatggctgttggccagattatgacatttggctccccagtcatcggctgtggctttatttcgggatggaacttggtatccatgtgcgtggagtacgtcctgctctggaaggtttaccagaaaaccccagctctagctgtgaaagctggtcttaaagaagaggaaactgaattgaaacagctgaatttacacaaagatactgagccaaaacccctggagggaactcatctaatgggtgtgaaagactctaacatccatgagcttgaacatgagcaagagcctacttgtgcctcccagatggctgagcccttccgtaccttccgagatggatgggtctcctactacaaccagcctgtgtttctggctggcatgggtcttgctttcctttatatgactgtcctgggctttgactgcatcaccacagggtacgcctacactcagggactgagtggttccatcctcagtattttgatgggagcatcagctataactggaataatgggaactgtagcttttacttggctacgtcgaaaatgtggtttggttcggacaggtctgatctcaggattggcacagctttcctgtttgatcttgtgtgtgatctctgtattcatgcctggaagccccctggacttgtccgtttctccttttgaagatatccgatcaaggttcattcaaggagagtcaattacacctaccaagatacctgaaattacaactgaaatatacatgtctaatgggtctaattctgctaatattgtcccggagacaagtcctgaatctgtgcccataatctctgtcagtctgctgtttgcaggcgtcattgctgctagaatcggtctttggtcctttgatttaactgtgacacagttgctgcaagaaaatgtaattgaatctgaaagaggcattataaatggtgtacagaactccatgaactatcttcttgatcttctgcatttcatcatggtcatcctggctccaaatcctgaagcttttggcttgctcgtattgatttcagtctcctttgtggcaatgggccacattatgtatttccgatttgcccaaaatactctgggaaacaagctctttgcttgcggtcctgatgcaaaagaagttaggaaggaaaatcaagcaaatacatctgttgtttgagacagtttaactgttgctatcctgttactagattatatagagcacatgtgcttattttgtactgcagaattccaataaatggctgggtgttttgctctgtttttaccacagctgtgccttgagaactaaaagctgtttaggaaacctaagtcagcagaaattaactgattaatttcccttatgttgaggcatggaaaaaaaattggaaaagaaaaactcagtttaaatacggagactataatgataacactgaattcccctatttctcatgagtagatacaatcttacgtaaaagagtggttagtcacgtgaattcagttatcatttgacagattcttatctgtactagaattcagatatgtcagttttctgcaaaactcactcttgttcaagactagctaatttatttttttgcatcttagttatttttaaaaacaaattcttcaagtatgaagactaaattttgataactaatattatccttattgatcctattgatcttaaggtatttacatgtatgtggaaaaacaaaacacttaactagaattctctaataaggtttatggtttagcttaaagagcacctttgtatttttattatcagatggggcaacatattgtatgaagcatatgtagcacttcacagcatggttatcatgtaagctgtagctgttgtaactggagctgttgtaactggagctgttgtaactggagctgttgtaactggagctgttgtaactggagctgttgtaactggagctgttgtaactggagctgttgtagctgaagctgttgtaactgcagctgttataaccagc

SEQ ID NO: 310001 - DNA, 2451 bp, Homo sapiens
  misc_feature (2401)..(2401): n is a, c, g, or t
cgcggggacgcccgggcggccctgaaggggacggggcggccccagtcggaggtcgcagggagctccgcccccgactcggtataagagctgggcccggcccacggcggcggcggcggcggcggagagagctggctcagggcgtccgctaggctcggacgacctgctgagcctcccaaaccgcttccataaggctttgcctttccaacttcagctacagtgttagctaagtttggaaagaaggaaaaaagaaaatccctgggccccttttcttttgttctttgccaaagtcgtcgttgtagtctttttgcccaaggctgttgtgtttttagaggtgctatctccagttccttgcactcctgttaacaagcacctcagcgagagcagcagcagcgatagcagccgcagaagagccagcggggtcgcctagtgtcatgaccagggcgggagatcacaaccgccagagaggatgctgtggatccttggccgactacctgacctctgcaaaattccttctctaccttggtcattctctctctacttggggagatcggatgtggcactttgcggtgtctgtgtttctggtagagctctatggaaacagcctccttttgacagcagtctacgggctggtggtggcagggtctgttctggtcctgggagccatcatcggtgactgggtggacaagaatgctagacttaaagtggcccagacctcgctggtggtacagaatgtttcagtcatcctgtgtggaatcatcctgatgatggttttcttacataaacatgagcttctgaccatgtaccatggatgggttctcacttcctgctatatcctgatcatcactattgcaaatattgcaaatttggccagtactgctactgcaatcacaatccaaagggattggattgttgttgttgcaggagaagacagaagcaaactagcaaatatgaatgccacaatacgaaggattgaccagttaaccaacatcttagcccccatggctgttggccagattatgacatttggctccccagtcatcggctgtggctttatttcgggatggaacttggtatccatgtgcgtggagtacgtcctgctctggaaggtttaccagaaaaccccagctctagctgtgaaagctggtcttaaagaagaggaaactgaattgaaacagctgaatttacacaaagatactgagccaaaacccctggagggaactcatctaatgggtgtgaaagactctaacatccatgagcttgaacatgagcaagagcctacttgtgcctcccagatggctgagcccttccgtaccttccgagatggatgggtctcctactacaaccagcctgtgtttctggctggcatgggtcttgctttcctttatatgactgtcctgggctttgactgcatcaccacagggtacgcctacactcagggactgagtggttccatcctcagtattttgatgggagcatcagctataactggaataatgggaactgtagcttttacttggctacgtcgaaaatgtggtttggttcggacaggtctgatctcaggattggcacagctttcctgtttgatcttgtgtgtgatctctgtattcatgcctggaagccccctggacttgtccgtttctccttttgaagatatccgatcaaggttcattcaaggagagtcaattacacctaccaagatacctgaaattacaactgaaatatacatgtctaatgggtctaattctgctaatattgtcccggagacaagtcctgaatctgtgcccataatctctgtcagtctgctgtttgcaggcgtcattgctgctagaatcggtctttggtcctttgatttaactgtgacacagttgctgcaagaaaatgtaattgaatctgaaagaggcattataaatggtgtacagaactccatgaactatcttcttgatcttctgcatttcatcatggtcatcctggctccaaatcctgaagcttttggcttgctcgtattgatttcagtctcctttgtggcaatgggccacattatgtatttccgatttgcccaaaatactctgggaaacaagctctttgcttgcggtcctgatgcaaaagaagttaggaaggaaaatcaagcaaatacatctgttgtttgagacagtttaactgttgctatcctgttactagattatatagagcacatgtgcttattttgtactgcagaattccaataaatggctgggtgttttgctctgtttttaccacagctgtgccttgagaactaaaagctgtttaggaaacctaagtcagcagaaattaactgattaatttcccttatgttgaggcatggaaaaaataataacaaaaaaaaccttcgggtgggggccccgttccccatttgccctattgngaaggcgctttccaattcacttcccggcctgttacaacgttttgactggg

SEQ ID NO: 310002 - DNA, 1492 bp, Homo sapiens
cgcggggacgcccgggcggccctgaaggggacggggcggccccagtcggaggtcgcagggagctccgcccccgactcggtataagagctgggcccggcccacggcggcggcggcggcggcggagagagctggctcagggcgtccgctaggctcggacgacctgctgagcctcccaaaccgcttccataaggctttgcctttccaacttcagctacagtgttagctaagtttggaaagaaggaaaaaagaaaatccctgggccccttttcttttgttctttgccaaagtcgtcgttgtagtctttttgcccaaggctgttgtgtttttagaggtgctatctccagttccttgcactcctgttaacaagcacctcagcgagagcagcagcagcgatagcagccgcagaagagccagcggggtcgcctagtgtcatgaccagggcgggagatcacaaccgccagagaggatgctgtggatccttggccgactacctgacctctgcaaaattccttctctaccttggtcattctctctctacttggggagatcggatgtggcactttgcggtgtctgtgtttctggtagagctctatggaaacagcctccttttgacagcagtctacgggctggtggtggcagggtctgttctggtcctgggagccatcatcggtgactgggtggacaagaatgctagacttaaagtggcccagacctcgctggtggtacagaatgtttcagtcatcctgtgtggaatcatcctgatgatggttttcttacataaacatgagcttctgaccatgtaccatggatgggttctcacttcctgctatatcctgatcatcactattgcaaatattgcaaatttggccagtactgctactgcaatcacaatccaaagggattggattgttgttgttgcaggagaagacagaagcaaactagcaaatatgaatgccacaatacgaaggattgaccagttaaccaacatcttagcccccatggctgttggccagattatgacatttggctccccagtcatcggctgtggctttatttcgggatggaacttggtatccatgtgcgtggagtacgtcctgctctggaaggtttaccagaaaaccccagctctagctgtgaaagctggtcttaaagaagaggaaactgaattgaaacagctgaatttacacaaaggtaaactgaacacaatgatctctccttttgttctcatgttcagaccttaaatgttggtgaagatcaaaactattttgaatttgtatcaggttttattaccagtgggggccagatgaggttaaatatatcgctttggtagacgaggcaagagcaggcttttgaggatctagggaaaaactccgggttgaatctggtggggttagaatgggtcccctagccctcttccttgatgtgagcagtagttatagaggttcaattttacttgagagatagctgggcaaagctaagtcataggactggg

SEQ ID NO: 310003 - DNA, 1151 bp, Homo sapiens
cgcggggacgcccgggcggccctgaaggggacggggcggccccagtcggaggtcgcagggagctccgcccccgactcggtataagagctgggcccggcccacggcggcggcggcggcggcggagagagctggctcagggcgtccgctaggctcggacgacctgctgagcctcccaaaccgcttccataaggctttgcctttccaacttcagctacagtgttagctaagtttggaaagaaggaaaaaagaaaatccctgggccccttttcttttgttctttgccaaagtcgtcgttgtagtctttttgcccaaggctgttgtgtttttagaggtgctatctccagttccttgcactcctgttaacaagcacctcagcgagagcagcagcagcgatagcagccgcagaagagccagcggggtcgcctagtgtcatgaccagggcgggagatcacaaccgccagagaggatgctgtggatccttggccgactacctgacctctgcaaaattccttctctaccttggtcattctctctctacttggggagatcggatgtggcactttgcggtgtctgtgtttctggtagagctctatggaaacagcctccttttgacagcagtctacgggctggtggtggcagggtctgttctggtcctgggagccatcatcggtgactgggtggacaagaatgctagacttaaagtggcccagacctcgctggtggtacagaatgtttcagtcatcctgtgtggaatcatcctgatgatggttttcttacataaacatgagcttctgaccatgtaccatggatgggttctcgtaagttctcaatgagattcttgatggcagaaaattgaatatctggtagtggtaaaggatgaaaatgctttgaagctattttttttttttggccagtgtgaccttttaatattgatttctgtgtctactgtaatatcccctatagtttgttttgttgttgttttgcccacaacaggcactcattaagtattgtttgaatttaaattttgtcctattggtttctaatggcatttctaagagtttactatagaattcagttgtttgttttcagctttttagtgacctatactttgtttgtgctatttaataaatgttatccatatctaaattagt

SEQ ID NO: 310004 - DNA, 987 bp, Homo sapiens
cgcggggacgcccgggcggccctgaaggggacggggcggccccagtcggaggtcgcagggagctccgcccccgactcggtataagagctgggcccggcccacggcggcggcggcggcggcggagagagctggctcagggcgtccgctaggctcggacgacctgctgagcctcccaaaccgcttccataaggctttgcctttccaacttcagctacagtgttagctaagtttggaaagaaggaaaaaagaaaatccctgggccccttttcttttgttctttgccaaagtcgtcgttgtagtctttttgcccaaggctgttgtgtttttagaggtgctatctccagttccttgcactcctgttaacaagcacctcagcgagagcagcagcagcgatagcagccgcagaagagccagcggggtcgcctagtgtcatgaccagggcgggagatcacaaccgccagagaggatgctgtggatccttggccgactacctgacctctgcaaaattccttctctaccttggtcattctctctctacttgggtaagtgagaatgcatagtcttacaacacagttgcgcaattttttatttcctttcgttctagccagttgtattaagccaacttccagttttgtcaagcagttaaagaaataaatcatccaagtacacatgctttaatgaaaacgttatttacatcgaagatctttccccatgagccactgtgcctggccatctctatattatcatacacagtggtttcgctgccctaagaatcctctttgctctgtctgctcatctccccatccctgctaacccctggcaaccactgatctttctcccatccccagttgtgcttagttggaattatacagtatgtatccttttcagactggtttctttgagttagtaatatacatttaaatttcctccatgtctttccatggcttgataactcacttatttttagtaccgaataatattcaaaaa

SEQ ID NO: 310005 - DNA, 774 bp, Homo sapiens
cgcggggacgcccgggcggccctgaaggggacggggcggccccagtcggaggtcgcagggagctccgcccccgactcggtataagagctgggcccggcccacggcggcggcggcggcggcggagagagctggctcagggcgtccgctaggctcggacgacctgctgagcctcccaaaccgcttccataaggctttgcctttccaacttcagctacagtgttagctaagtttggaaagaaggaaaaaagaaaatccctgggccccttttcttttgttctttgccaaagtcgtcgttgtagtctttttgcccaaggctgttgtgtttttagaggtgctatctccagttccttgcactcctgttaacaagcacctcagcgagagcagcagcagcgatagcagccgcagaagagccagcggggtcgcctagtgtcatgaccagggcgggagatcacaaccgccagagaggatgctgtggatccttggccgactacctgacctctgcaaaattccttctctaccttggtcattctctctctacttgggtaagtgagaatgcatagtcttacaacacagttgcgcaattttttatttcctttcgttctagccagttgtattaagccaacttccagttttgtcaagcagttaaagaaataaatcatccaagtacacatgctttaatgaaaacgttatttacatcgaagatctttccccatgagtgttagttaatgcaacttaattatcagatcatcgtagtttatgtagatagacaactat

SEQ ID NO: 310006 - DNA, 428 bp, Homo sapiens
cttttctttcctgtgagaatataaactctgtgaagacagggaagaatgttacttttcttctttatagtgttaagaattgttgagaataatgactagcttataataggcatttaagatatatttgttgaaaaaaatgaatgtagagtcactgctgtattcattttaaaaagctattagactgatttatgcaattccaaggggattatcattgttgaggcaaatttagtgggacttgacccaaacaacaaatatttttccaacaaaatgtctttcttacaaatgtacttttagaaaaccacattttaggaatctatactcttggtttacagctttgtattgtgtaaatgggcagtctctctttgatgggtttgcacacttacctgcctctttcacctgcctctctagatatgaatgccacaatacgaagg

SEQ ID NO: 310007 - DNA, 383 bp, Homo sapiens
ggtttaccagaaaaccccagctctagctgtgaaagctggtcttaaagaagaggaaactgaattgaaacagctgaatttacacaaaggtaaactgaacacaatgatctctccttttgttctcatgttcagaccttaaatgttggtgaagatcaaaactattttgaatttgtatcaggttttattaccagtgggggccagatgaggttaaatatatcgctttggtagacgaggcaagagcaggcttttgaggatctagggaaaaactccgggttgaatctggtggggttagaatgggtcccctagccctcttccttgatgtgagcagtagttatagaggttcaattttacttgagagatagctgggcaaagctaagtcataggac

SEQ ID NO: 310008 - DNA, 1056 bp, Homo sapiens
acgcggttctccctgatcccggagctgggctcagggctcggactcagtcctgcagcgcctctaggctgcggatccgcgcttcaaccacctgctttgcgctgcgtccggggaagtggggaggagacgggagggagggaggaggcggggagaggaggaaagaggcagcttacacacgccttccagtccctctactcagagcagcccggagaccgctgccgccgctgccgctgctaccaccgctgccacctgaggagacccgccgcccccccgtcgccgcctcctgcgagtccttcttagcacctggcgtttcatgcacattgccactgccattattattatcattccaatacaaggaaaataaaagaagataccagcgaaaagaaccgcttacacctttccgaattactcaagtgtctcctgcggcgtggactccgtcagtggcccaccaagaaggaggaggaatatggaatccaagggggccagttcctgccgtctgctcttaagtgtgacctacctgggacttggttaattgcccttgttcttttaaataaaattctttctgtgagtaactgtgaatttcaaattaacctaaatgcaatattaaactgtgagtacaaatgtaggaaggtaaaattgtgtggaatatggcaaaaaaataattcctatcttacataacaaatgatattttaaaataaagccaataaacacatagttcttagaatgtattagtctgaaagattccaccttaagtgttagaggcaaagaaaaaagcagagttccagaataaatcagtggattataggacagacctcagtggaggatggcaacctttcttcatttgttcatgttctacttgatgtggttattgcaaagacaagatatatcagtagatagagccttagacagtctttcggaattaatcatcagtattacaagcttgattctggcatttagccttaaaaatgtgttgatgctataggtcttttttatatttaacggtgttgattttttcccatatttcttgcagatagtaaaatcaaatcttctcaggtatga

SEQ ID NO: 310009 - DNA, 4895 bp, Homo sapiens
acgcggttctccctgatcccggagctgggctcagggctcggactcagtcctgcagcgcctctaggctgcggatccgcgcttcaaccacctgctttgcgctgcgtccggggaagtggggaggagacgggagggagggaggaggcggggagaggaggaaagaggcagcttacacacgccttccagtccctctactcagagcagcccggagaccgctgccgccgctgccgctgctaccaccgctgccacctgaggagacccgccgcccccccgtcgccgcctcctgcgagtccttcttagcacctggcgtttcatgcacattgccactgccattattattatcattccaatacaaggaaaataaaagaagataccagcgaaaagaaccgcttacacctttccgaattactcaagtgtctcctggaaacagagggtcgttgtccccggaggagcagccgaagggcccgtgggctggtgttgaccgggagggaggaggagttgggggcattgcgtggtggaaagttgcgtgcggcagagaaccgaaggtgcagcgccacagcccaggggacggtgtgtctgggagaagacgctgcccctgcgtcgggacccgccagcgcgcgggcaccgcggggcccgggacgacgccccctcctgcggcgtggactccgtcagtggcccaccaagaaggaggaggaatatggaatccaagggggccagttcctgccgtctgctcttctgcctcttgatctccgccaccgtcttcaggccaggccttggatggtatactgtaaattcagcatatggagataccattatcataccttgccgacttgacgtacctcagaatctcatgtttggcaaatggaaatatgaaaagcccgatggctccccagtatttattgccttcagatcctctacaaagaaaagtgtgcagtacgacgatgtaccagaatacaaagacagattgaacctctcagaaaactacactttgtctatcagtaatgcaaggatcagtgatgaaaagagatttgtgtgcatgctagtaactgaggacaacgtgtttgaggcacctacaatagtcaaggtgttcaagcaaccatctaaacctgaaattgtaagcaaagcactgtttctcgaaacagagcagctaaaaaagttgggtgactgcatttcagaagacagttatccagatggcaatatcacatggtacaggaatggaaaagtgctacatccccttgaaggagcggtggtcataatttttaaaaaggaaatggacccagtgactcagctctataccatgacttccaccctggagtacaagacaaccaaggctgacatacaaatgccattcacctgctcggtgacatattatggaccatctggccagaaaacaattcattctgaacaggcagtatttgatatttactatcctacagagcaggtgacaatacaagtgctgccaccaaaaaatgccatcaaagaaggggataacatcactcttaaatgcttagggaatggcaaccctcccccagaggaatttttgttttacttaccaggacagcccgaaggaataagaagctcaaatacttacacactgacggatgtgaggcgcaatgcaacaggagactacaagtgttccctgatagacaaaaaaagcatgattgcttcaacagccatcacagttcactatttggatttgtccttaaacccaagtggagaagtgactagacagattggtgatgccctacccgtgtcatgcacaatatctgctagcaggaatgcaactgtggtatggatgaaagataacatcaggcttcgatctagcccgtcattttctagtcttcattatcaggatgctggaaactatgtctgcgaaactgctctgcaggaggttgaaggactaaagaaaagagagtcattgactctcattgtagaaggcaaacctcaaataaaaatgacaaagaaaactgatcccagtggactatctaaaacaataatctgccatgtggaaggttttccaaagccagccattcagtggacaattactggcagtggaagcgtcataaaccaaacagaggaatctccttatattaatggcaggtattatagtaaaattatcatttcccctgaagagaatgttacattaacttgcacagcagaaaaccaactggagagaacagtaaactccttgaatgtctctgctataagtattccagaacacgatgaggcagacgagataagtgatgaaaacagagaaaaggtgaatgaccaggcaaaactaattgtgggaatcgttgttggtctcctccttgctgcccttgttgctggtgtcgtctactggctgtacatgaagaagtcaaagactgcatcaaaacatgtaaacaaggacctcggtaatatggaagaaaacaaaaagttagaagaaaacaatcacaaaactgaagcctaagagagaaactgtcctagttgtccagagataaaaatcatatagaccaattgaagcatgaacgtggattgtatttaagacataaacaaagacattgacagcaattcatggttcaagtattaagcagttcattctaccaagctgtcacaggttttcagagaattatctcaagtaaaacaaatgaaatttaattacaaacaataagaacaagttttggcagccatgataataggtcatatgttgtgtttggttcaattttttttccgtaaatgtctgcactgaggatttctttttggtttgccttttatgtaaattttttacgtagctatttttatacactgtaagctttgttctgggagttgctgttaatctgatgtataatgtaatgtttttatttcaattgtttatatggataatctgagcaggtacatttctgattctgattgctatcagcaatgccccaaactttctcataagcacctaaaacccaaaggtggcagcttgtgaagattggggacactcatattgccctaattaaaaactgtgatttttatcacaagggaggggaggccgagagtcagactgatagacaccataggagccgactctttgatatgccaccagcgaactctcagaaataaatcacagatgcatatagacacacatacataatggtactcccaaactgacaattttacctattctgaaaaagacataaaacagaatttggtagcacttacctctacagacacctgctaataaattattttctgtcaaaagaaaaaacacaagcatgtgtgagagacagtttggaaaaatcatggtcaacattcccattttcatagatcacaatgtaaatcactataattacaaattggtgttaaatcctttgggttatccactgccttaaaattatacctatttcatgtttaaaaagatatcaatcagaattggagtttttaacagtggtcattatcaaagctgtgttattttccacagaatatagaatatatatttttttcgtgtgtgtttttgttaactaccctacagatattgaatgcaccttgagataatttagtgtttttaactgatacataatttatcaagcagtacatgaaagtgtaataataaaatgtctatgtatctttagttacattcaaatttgtaactttataaacatgttttatgcttgaggaaatttttaaggtggtagtataaatggaaactttttgaagtagaccagatatgggctacttgtgactagacttttaaactttgctctttcaagcagaagcctggtttctgggagaacactgcacagcgatttctttcccaggatttacacaactttaaagggaagataaatgaacatcagatttctaggtatagaactatgttattgaaaggaaaaggaaaactggtgtttgtttcttagactcatgaaataaaaaattatgaaggcaatgaaaaataaattgaaaattaaagtcagatgagaataggaataatactttgccacttctgcattatttagaaacatacgttattgtacatttgtaaaccatttactgtctgggcaatagtgactccgtttaataaaagcttccgtagtgcattggtatggattaaatgcataaaatattcttagactcgatgctgtataaaatattatgggaaaaaaagaaaatacgttattttgcctctaaacttttattgaagttttatttggcaggaaaaaaaattgaatcttggtcaacatttaaaccaaagtaaaaggggaaaaaccaaagttatttgttttgcatggctaagccattctgttatctctgtaaatactgtgatttcttttttattttctctttagaattttgttaaagaaattctaaaatttttaaacacctgctctccacaataaatcacaaacactaaaataaaattacttccatataaatattattttctcttttggtgtgggagatcaaaggtttaaagtctaacttctaagatatatttgcagaaagaagcaacatgacaatagagagagttatgctacaattatttcttggtttccacttgcaatggttaattaagtccaaaaacagctgtcagaacctcgagagcagaacatgagaaactcagagctctggaccgaaagcagaaagtttgccgggaaaaaaaaagacaacattattaccatcgattcagtgcctggataaagaggaaagcttacttgtttaatggcagccacatgcacgaagatgctaagaagaaaaagaattccaaatcctcaacttttgaggtttcggctctccaatttaactctttggcaacaggaaacaggttttgcaagttcaaggttcactccctatatgtgattataggaattgtttgtggaaatggattaacatacccgtctatgcctaaaagataataaaactgaaatatgtcttca

SEQ ID NO: 310010 - DNA, 4188 bp, Homo sapiens
agcggcgttggtagtctgaccctaggtaatggtcaccgacgtcgtcttcaggcaccgaccgcctggctgtcttactacaaaattcagcatatggagataccattatcataccttgccgacttgacgtacctcagaatctcatgtttggcaaatggaaatatgaaaagcccgatggctccccagtatttattgccttcagatcctctacaaagaaaagtgtgcagtacgacgatgtaccagaatacaaagacagattgaacctctcagaaaactacactttgtctatcagtaatgcaaggatcagtgatgaaaagagatttgtgtgcatgctagtaactgaggacaacgtgtttgaggcacctacaatagtcaaggtgttcaagcaaccatctaaacctgaaattgtaagcaaagcactgtttctcgaaacagagcagctaaaaaagttgggtgactgcatttcagaagacagttatccagatggcaatatcacatggtacaggaatggaaaagtgctacatccccttgaaggagcggtggtcataatttttaaaaaggaaatggacccagtgactcagctctataccatgacttccaccctggagtacaagacaaccaaggctgacatacaaatgccattcacctgctcggtgacatattatggaccatctggccagaaaacaattcattctgaacaggcagtatttgatatttactatcctacagagcaggtgacaatacaagtgctgccaccaaaaaatgccatcaaagaaggggataacatcactcttaaatgcttagggaatggcaaccctcccccagaggaatttttgttttacttaccaggacagcccgaaggaataagaagctcaaatacttacacactgacggatgtgaggcgcaatgcaacaggagactacaagtgttccctgatagacaaaaaaagcatgattgcttcaacagccatcacagttcactatttggatttgtccttaaacccaagtggagaagtgactagacagattggtgatgccctacccgtgtcatgcacaatatctgctagcaggaatgcaactgtggtatggatgaaagataacatcaggcttcgatctagcccgtcattttctagtcttcattatcaggatgctggaaactatgtctgcgaaactgctctgcaggaggttgaaggactaaagaaaagagagtcattgactctcattgtagaaggcaaacctcaaataaaaatgacaaagaaaactgatcccagtggactatctaaaacaataatctgccatgtggaaggttttccaaagccagccattcagtggacaattactggcagtggaagcgtcataaaccaaacagaggaatctccttatattaatggcaggtattatagtaaaattatcatttcccctgaagagaatgttacattaacttgcacagcagaaaaccaactggagagaacagtaaactccttgaatgtctctgctataagtattccagaacacgatgaggcagacgagataagtgatgaaaacagagaaaaggtgaatgaccaggcaaaactaattgtgggaatcgttgttggtctcctccttgctgcccttgttgctggtgtcgtctactggctgtacatgaagaagtcaaagactgcatcaaaacatgtaaacaaggacctcggtaatatggaagaaaacaaaaagttagaagaaaacaatcacaaaactgaagcctaagagagaaactgtcctagttgtccagagataaaaatcatatagaccaattgaagcatgaacgtggattgtatttaagacataaacaaagacattgacagcaattcatggttcaagtattaagcagttcattctaccaagctgtcacaggttttcagagaattatctcaagtaaaacaaatgaaatttaattacaaacaataagaacaagttttggcagccatgataataggtcatatgttgtgtttggttcaattttttttccgtaaatgtctgcactgaggatttctttttggtttgccttttatgtaaattttttacgtagctatttttatacactgtaagctttgttctgggagttgctgttaatctgatgtataatgtaatgtttttatttcaattgtttatatggataatctgagcaggtacatttctgattctgattgctatcagcaatgccccaaactttctcataagcacctaaaacccaaaggtggcagcttgtgaagattggggacactcatattgccctaattaaaaactgtgatttttatcacaagggaggggaggccgagagtcagactgatagacaccataggagccgactctttgatatgccaccagcgaactctcagaaataaatcacagatgcatatagacacacatacataatggtactcccaaactgacaattttacctattctgaaaaagacataaaacagaatttggtagcacttacctctacagacacctgctaataaattattttctgtcaaaagaaaaaacacaagcatgtgtgagagacagtttggaaaaatcatggtcaacattcccattttcatagatcacaatgtaaatcactataattacaaattggtgttaaatcctttgggttatccactgccttaaaattatacctatttcatgtttaaaaagatatcaatcagaattggagtttttaacagtggtcattatcaaagctgtgttattttccacagaatatagaatatatatttttttcgtgtgtgtttttgttaactaccctacagatattgaatgcaccttgagataatttagtgtttttaactgatacataatttatcaagcagtacatgaaagtgtaataataaaatgtctatgtatctttagttacattcaaatttgtaactttataaacatgttttatgcttgaggaaatttttaaggtggtagtataaatggaaactttttgaagtagaccagatatgggctacttgtgactagacttttaaactttgctctttcaagcagaagcctggtttctgggagaacactgcacagcgatttctttcccaggatttacacaactttaaagggaagataaatgaacatcagatttctaggtatagaactatgttattgaaaggaaaaggaaaactggtgtttgtttcttagactcatgaaataaaaaattatgaaggcaatgaaaaataaattgaaaattaaagtcagatgagaataggaataatactttgccacttctgcattatttagaaacatacgttattgtacatttgtaaaccatttactgtctgggcaatagtgactccgtttaataaaagcttccgtagtgcattggtatggattaaatgcataaaatattcttagactcgatgctgtataaaatattatgggaaaaaaagaaaatacgttattttgcctctaaacttttattgaagttttatttggcaggaaaaaaaattgaatcttggtcaacatttaaaccaaagtaaaaggggaaaaaccaaagttatttgttttgcatggctaagccattctgttatctctgtaaatactgtgatttcttttttattttctctttagaattttgttaaagaaattctaaaatttttaaacacctgctctccacaataaatcacaaacactaaaataaaattacttccatataaatattattttctcttttggtgtgggagatcaaaggtttaaagtctaacttctaagatatatttgcagaaagaagcaacatgacaatagagagagttatgctacaattatttcttggtttccacttgcaatggttaattaagtccaaaaacagctgtcagaacctcgagagcagaacatgagaaactcagagctctggaccgaaagcagaaagtttgccgggaaaaaaaaagacaacattattaccatcgattcagtgcctggataaagaggaaagcttacttgtttaatggcagccacatgcacgaagatgctaagaagaaaaagaattccaaatcctcaacttttgaggtttcggctctccaatttaactctttggcaacaggaaacaggttttgcaagttcaaggttcactccctatatgtgattataggaattgtttgtggaaatggattaacatacccgtctatgcctaaaagataataaaactgaaatatgtcttca

SEQ ID NO: 310011 - DNA, 4856 bp, Homo sapiens
acgcggttctccctgatcccggagctgggctcagggctcggactcagtcctgcagcgcctctaggctgcggatccgcgcttcaaccacctgctttgcgctgcgtccggggaagtggggaggagacgggagggagggaggaggcggggagaggaggaaagaggcagcttacacacgccttccagtccctctactcagagcagcccggagaccgctgccgccgctgccgctgctaccaccgctgccacctgaggagacccgccgcccccccgtcgccgcctcctgcgagtccttcttagcacctggcgtttcatgcacattgccactgccattattattatcattccaatacaaggaaaataaaagaagataccagcgaaaagaaccgcttacacctttccgaattactcaagtgtctcctggaaacagagggtcgttgtccccggaggagcagccgaagggcccgtgggctggtgttgaccgggagggaggaggagttgggggcattgcgtggtggaaagttgcgtgcggcagagaaccgaaggtgcagcgccacagcccaggggacggtgtgtctgggagaagacgctgcccctgcgtcgggacccgccagcgcgcgggcaccgcggggcccgggacgacgccccctcctgcggcgtggactccgtcagtggcccaccaagaaggaggaggaatatggaatccaagggggccagttcctgccgtctgctcttctgcctcttgatctccgccaccgtcttcaggccaggccttggatggtatactgtaaattcagcatatggagataccattatcataccttgccgacttgacgtacctcagaatctcatgtttggcaaatggaaatatgaaaagcccgatggctccccagtatttattgccttcagatcctctacaaagaaaagtgtgcagtacgacgatgtaccagaatacaaagacagattgaacctctcagaaaactacactttgtctatcagtaatgcaaggatcagtgatgaaaagagatttgtgtgcatgctagtaactgaggacaacgtgtttgaggcacctacaatagtcaaggtgttcaagcaaccatctaaacctgaaattgtaagcaaagcactgtttctcgaaacagagcagctaaaaaagttgggtgactgcatttcagaagacagttatccagatggcaatatcacatggtacaggaatggaaaagtgctacatccccttgaaggagcggtggtcataatttttaaaaaggaaatggacccagtgactcagctctataccatgacttccaccctggagtacaagacaaccaaggctgacatacaaatgccattcacctgctcggtgacatattatggaccatctggccagaaaacaattcattctgaacaggcagtatttgatatttactatcctacagagcaggtgacaatacaagtgctgccaccaaaaaatgccatcaaagaaggggataacatcactcttaaatgcttagggaatggcaaccctcccccagaggaatttttgttttacttaccaggacagcccgaaggaataagaagctcaaatacttacacactgacggatgtgaggcgcaatgcaacaggagactacaagtgttccctgatagacaaaaaaagcatgattgcttcaacagccatcacagttcactatttggatttgtccttaaacccaagtggagaagtgactagacagattggtgatgccctacccgtgtcatgcacaatatctgctagcaggaatgcaactgtggtatggatgaaagataacatcaggcttcgatctagcccgtcattttctagtcttcattatcaggatgctggaaactatgtctgcgaaactgctctgcaggaggttgaaggactaaagaaaagagagtcattgactctcattgtagaaggcaaacctcaaataaaaatgacaaagaaaactgatcccagtggactatctaaaacaataatctgccatgtggaaggttttccaaagccagccattcagtggacaattactggcagtggaagcgtcataaaccaaacagaggaatctccttatattaatggcaggtattatagtaaaattatcatttcccctgaagagaatgttacattaacttgcacagcagaaaaccaactggagagaacagtaaactccttgaatgtctctgctaatgaaaacagagaaaaggtgaatgaccaggcaaaactaattgtgggaatcgttgttggtctcctccttgctgcccttgttgctggtgtcgtctactggctgtacatgaagaagtcaaagactgcatcaaaacatgtaaacaaggacctcggtaatatggaagaaaacaaaaagttagaagaaaacaatcacaaaactgaagcctaagagagaaactgtcctagttgtccagagataaaaatcatatagaccaattgaagcatgaacgtggattgtatttaagacataaacaaagacattgacagcaattcatggttcaagtattaagcagttcattctaccaagctgtcacaggttttcagagaattatctcaagtaaaacaaatgaaatttaattacaaacaataagaacaagttttggcagccatgataataggtcatatgttgtgtttggttcaattttttttccgtaaatgtctgcactgaggatttctttttggtttgccttttatgtaaattttttacgtagctatttttatacactgtaagctttgttctgggagttgctgttaatctgatgtataatgtaatgtttttatttcaattgtttatatggataatctgagcaggtacatttctgattctgattgctatcagcaatgccccaaactttctcataagcacctaaaacccaaaggtggcagcttgtgaagattggggacactcatattgccctaattaaaaactgtgatttttatcacaagggaggggaggccgagagtcagactgatagacaccataggagccgactctttgatatgccaccagcgaactctcagaaataaatcacagatgcatatagacacacatacataatggtactcccaaactgacaattttacctattctgaaaaagacataaaacagaatttggtagcacttacctctacagacacctgctaataaattattttctgtcaaaagaaaaaacacaagcatgtgtgagagacagtttggaaaaatcatggtcaacattcccattttcatagatcacaatgtaaatcactataattacaaattggtgttaaatcctttgggttatccactgccttaaaattatacctatttcatgtttaaaaagatatcaatcagaattggagtttttaacagtggtcattatcaaagctgtgttattttccacagaatatagaatatatatttttttcgtgtgtgtttttgttaactaccctacagatattgaatgcaccttgagataatttagtgtttttaactgatacataatttatcaagcagtacatgaaagtgtaataataaaatgtctatgtatctttagttacattcaaatttgtaactttataaacatgttttatgcttgaggaaatttttaaggtggtagtataaatggaaactttttgaagtagaccagatatgggctacttgtgactagacttttaaactttgctctttcaagcagaagcctggtttctgggagaacactgcacagcgatttctttcccaggatttacacaactttaaagggaagataaatgaacatcagatttctaggtatagaactatgttattgaaaggaaaaggaaaactggtgtttgtttcttagactcatgaaataaaaaattatgaaggcaatgaaaaataaattgaaaattaaagtcagatgagaataggaataatactttgccacttctgcattatttagaaacatacgttattgtacatttgtaaaccatttactgtctgggcaatagtgactccgtttaataaaagcttccgtagtgcattggtatggattaaatgcataaaatattcttagactcgatgctgtataaaatattatgggaaaaaaagaaaatacgttattttgcctctaaacttttattgaagttttatttggcaggaaaaaaaattgaatcttggtcaacatttaaaccaaagtaaaaggggaaaaaccaaagttatttgttttgcatggctaagccattctgttatctctgtaaatactgtgatttcttttttattttctctttagaattttgttaaagaaattctaaaatttttaaacacctgctctccacaataaatcacaaacactaaaataaaattacttccatataaatattattttctcttttggtgtgggagatcaaaggtttaaagtctaacttctaagatatatttgcagaaagaagcaacatgacaatagagagagttatgctacaattatttcttggtttccacttgcaatggttaattaagtccaaaaacagctgtcagaacctcgagagcagaacatgagaaactcagagctctggaccgaaagcagaaagtttgccgggaaaaaaaaagacaacattattaccatcgattcagtgcctggataaagaggaaagcttacttgtttaatggcagccacatgcacgaagatgctaagaagaaaaagaattccaaatcctcaacttttgaggtttcggctctccaatttaactctttggcaacaggaaacaggttttgcaagttcaaggttcactccctatatgtgattataggaattgtttgtggaaatggattaacatacccgtctatgcctaaaagataataaaactgaaatatgtcttca

SEQ ID NO: 310012 - DNA, 2767 bp, Homo sapiens
ttaaacactgtgttttcagtggatgaatttaacacagatgggccacagcagagcacaggaaaaggaaattggaatacacatcgatagaagacacacagactgaagcacagagaggaaaaagaacagccaagaccaacaagagcataagaaacatgtggacacacacatgtctaagctatgtatagaattgaaattccagaagaatgaaagagcaagaatagcaatcaccggactgcatcaaaacatgtaaacaaggacctcggtaatatggaagaaaacaaaaagttagaagaaaacaatcacaaaactgaagcctaagagagaaactgtcctagttgtccagagataaaaatcatatagaccaattgaagcatgaacgtggattgtatttaagacataaacaaagacattgacagcaattcatggttcaagtattaagcagttcattctaccaagctgtcacaggttttcagagaattatctcaagtaaaacaaatgaaatttaattacaaacaataagaacaagttttggcagccatgataataggtcatatgttgtgtttggttcaattttttttccgtaaatgtctgcactgaggatttctttttggtttgccttttatgtaaattttttacgtagctatttttatacactgtaagctttgttctgggagttgctgttaatctgatgtataatgtaatgtttttatttcaattgtttatatggataatctgagcaggtacatttctgattctgattgctatcagcaatgccccaaactttctcataagcacctaaaacccaaaggtggcagcttgtgaagattggggacactcatattgccctaattaaaaactgtgatttttatcacaagggaggggaggccgagagtcagactgatagacaccataggagccgactctttgatatgccaccagcgaactctcagaaataaatcacagatgcatatagacacacatacataatggtactcccaaactgacaattttacctattctgaaaaagacataaaacagaatttggtagcacttacctctacagacacctgctaataaattattttctgtcaaaagaaaaaacacaagcatgtgtgagagacagtttggaaaaatcatggtcaacattcccattttcatagatcacaatgtaaatcactataattacaaattggtgttaaatcctttgggttatccactgccttaaaattatacctatttcatgtttaaaaagatatcaatcagaattggagtttttaacagtggtcattatcaaagctgtgttattttccacagaatatagaatatatatttttttcgtgtgtgtttttgttaactaccctacagatattgaatgcaccttgagataatttagtgtttttaactgatacataatttatcaagcagtacatgaaagtgtaataataaaatgtctatgtatctttagttacattcaaatttgtaactttataaacatgttttatgcttgaggaaatttttaaggtggtagtataaatggaaactttttgaagtagaccagatatgggctacttgtgactagacttttaaactttgctctttcaagcagaagcctggtttctgggagaacactgcacagcgatttctttcccaggatttacacaactttaaagggaagataaatgaacatcagatttctaggtatagaactatgttattgaaaggaaaaggaaaactggtgtttgtttcttagactcatgaaataaaaaattatgaaggcaatgaaaaataaattgaaaattaaagtcagatgagaataggaataatactttgccacttctgcattatttagaaacatacgttattgtacatttgtaaaccatttactgtctgggcaatagtgactccgtttaataaaagcttccgtagtgcattggtatggattaaatgcataaaatattcttagactcgatgctgtataaaatattatgggaaaaaaagaaaatacgttattttgcctctaaacttttattgaagttttatttggcaggaaaaaaaattgaatcttggtcaacatttaaaccaaagtaaaaggggaaaaaccaaagttatttgttttgcatggctaagccattctgttatctctgtaaatactgtgatttcttttttattttctctttagaattttgttaaagaaattctaaaatttttaaacacctgctctccacaataaatcacaaacactaaaataaaattacttccatataaatattattttctcttttggtgtgggagatcaaaggtttaaagtctaacttctaagatatatttgcagaaagaagcaacatgacaatagagagagttatgctacaattatttcttggtttccacttgcaatggttaattaagtccaaaaacagctgtcagaacctcgagagcagaacatgagaaactcagagctctggaccgaaagcagaaagtttgccgggaaaaaaaaagacaacattattaccatcgattcagtgcctggataaagaggaaagcttacttgtttaatggcagccacatgcacgaagatgctaagaagaaaaagaattccaaatcctcaacttttgaggtttcggctctccaatttaactctttggcaacaggaaacaggttttgcaagttcaaggttcactccctatatgtgattataggaattgtttgtggaaatggattaacatacccgtctatgcctaaaagataataaaactgaaatatgtcttca

SEQ ID NO: 310013 - DNA, 5059 bp, Homo sapiens
acgcggttctccctgatcccggagctgggctcagggctcggactcagtcctgcagcgcctctaggctgcggatccgcgcttcaaccacctgctttgcgctgcgtccggggaagtggggaggagacgggagggagggaggaggcggggagaggaggaaagaggcagcttacacacgccttccagtccctctactcagagcagcccggagaccgctgccgccgctgccgctgctaccaccgctgccacctgaggagacccgccgcccccccgtcgccgcctcctgcgagtccttcttagcacctggcgtttcatgcacattgccactgccattattattatcattccaatacaaggaaaataaaagaagataccagcgaaaagaaccgcttacacctttccgaattactcaagtgtctcctggaaacagagggtcgttgtccccggaggagcagccgaagggcccgtgggctggtgttgaccgggagggaggaggagttgggggcattgcgtggtggaaagttgcgtgcggcagagaaccgaaggtgcagcgccacagcccaggggacggtgtgtctgggagaagacgctgcccctgcgtcgggacccgccagcgcgcgggcaccgcggggcccgggacgacgccccctcctgcggcgtggactccgtcagtggcccaccaagaaggaggaggaatatggaatccaagggggccagttcctgccgtctgctcttctgcctcttgatctccgccaccgtcttcaggccaggccttggatggtatactgtaaattcagcatatggagataccattatcataccttgccgacttgacgtacctcagaatctcatgtttggcaaatggaaatatgaaaagcccgatggctccccagtatttattgccttcagatcctctacaaagaaaagtgtgcagtacgacgatgtaccagaatacaaagacagattgaacctctcagaaaactacactttgtctatcagtaatgcaaggatcagtgatgaaaagagatttgtgtgcatgctagtaactgaggacaacgtgtttgaggcacctacaatagtcaaggtgttcaagcaaccatctaaacctgaaattgtaagcaaagcactgtttctcgaaacagagcagctaaaaaagttgggtgactgcatttcagaagacagttatccagatggcaatatcacatggtacaggaatggaaaagtgctacatccccttgaaggagcggtggtcataatttttaaaaaggaaatggacccagtgactcagctctataccatgacttccaccctggagtacaagacaaccaaggctgacatacaaatgccattcacctgctcggtgacatattatggaccatctggccagaaaacaattcattctgaacaggcagtatttgatatttactatcctacagagcaggtgacaatacaagtgctgccaccaaaaaatgccatcaaagaaggggataacatcactcttaaatgcttagggaatggcaaccctcccccagaggaatttttgttttacttaccaggacagcccgaaggaataagaagctcaaatacttacacactgacggatgtgaggcgcaatgcaacaggagactacaagtgttccctgatagacaaaaaaagcatgattgcttcaacagccatcacagttcactatttggatttgtccttaaacccaagtggagaagtgactagacagattggtgatgccctacccgtgtcatgcacaatatctgctagcaggaatgcaactgtggtatggatgaaagataacatcaggcttcgatctagcccgtcattttctagtcttcattatcaggatgctggaaactatgtctgcgaaactgctctgcaggaggttgaaggactaaagaaaagagagtcattgactctcattgtagaaggcaaacctcaaataaaaatgacaaagaaaactgatcccagtggactatctaaaacaataatctgccatgtggaaggttttccaaagccagccattcagtggacaattactggcagtggaagcgtcataaaccaaacagaggaatctccttatattaatggcaggtattatagtaaaattatcatttcccctgaagagaatgttacattaacttgcacagcagaaaaccaactggagagaacagtaaactccttgaatgtctctgctataagtattccagaacacgatgaggcagacgagataagtgatgaaaacagagaaaaggtgaatgaccaggcaaaactaattgtgggaatcgttgttggtctcctccttgctgcccttgttgctggtgtcgtctactggctgtacatgaagaagtcaaagactgcatcaaaacatgtaaacaaggacctcggtaatatggaagaaaacaaaaagttagaagaaaacaatcacaaaactgaagcctaagagagaaactgtcctagttgtccagagataaaaatcatatagaccaattgaagcatgaacgtggattgtatttaagacataaacaaagacattgacagcaattcatggttcaagtattaagcagttcattctaccaagctgtcacaggttttcagagaattatctcaagtaaaacaaatgaaatttaattacaaacaataagaacaagttttggcagccatgataataggtcatatgttgtgtttggttcaattttttttccgtaaatgtctgcactgaggatttctttttggtttgccttttatgtaaattttttacgtagctatttttatacactgtaagctttgttctgggagttgctgttaatctgatgtataatgtaatgtttttatttcaattgtttatatggataatctgagcaggtacatttctgattctgattgctatcagcaatgccccaaactttctcataagcacctaaaacccaaaggtggcagcttgtgaagattggggacactcatattgccctaattaaaaactgtgatttttatcacaagggaggggaggccgagagtcagactgatagacaccataggagccgactctttgatatgccaccagcgaactctcagaaataaatcacagatgcatatagacacacatacataatggtactcccaaactgacaattttacctattctgaaaaagacataaaacagaatttggtagcacttacctctacagacacctgctaataaattattttctgtcaaaagaaaaaacacaagcatgtgtgagagacagtttggaaaaatcatggtcaacattcccattttcatagatcacaatgtaaatcactataattacaaattggtgttaaatcctttgggttatccactgccttaaaattatacctatttcatgtttaaaaagatatcaatcagaattggagtttttaacagtggtcattatcaaagctgtgttattttccacagaatatagaatatatatttttttcgtgtgtgtttttgttaactaccctacagatattgaatgcaccttgagataatttagtgtttttaactgatacataatttatcaagcagtacatgaaagtgtaataataaaatgtctatgtatctttagttacattcaaatttgtaactttataaacatgttttatgcttgaggaaatttttaaggtggtagtataaatggaaactttttgaagtagaccagatatgggctacttgtgactagacttttaaactttgctctttcaagcagaagcctggtttctgggagaacactgcacagcgatttctttcccaggatttacacaactttaaagggaagataaatgaacatcagatttctaggtatagaactatgttattgaaaggaaaaggaaaactggtgtttgtttcttagactcatgaaataaaaaattatgaaggcaatgaaaaataaattgaaaattaaagtcagatgagaataggaataatactttgccacttctgcattatttagaaacatacgttattgtacatttgtaaaccatttactgtctgggcaatagtgactccgtttaataaaagcttccgtagtgcattggtatggattaaatgcataaaatattcttagactcgatgctgtataaaatattatgggaaaaaaagaaaatacgttattttgcctctaaacttttattgaagttttatttggcaggaaaaaaaattgaatcttggtcaacatttaaaccaaagtaaaaggggaaaaaccaaagttatttgttttgcatggctaagccattctgttatctctgtaaatactgtgatttcttttttattttctctttagaattttgttaaagaaattctaaaatttttaaacacctgctctccacaataaatcacaaacactaaaataaaattacttccatataaatattattttctcttttggtgtgggagatcaaaggtttaaagtctaacttctaagatatatttgcagaaagaagcaacatgacaatagagagagttatgctacaattatttcttggtttccacttgcaatggttaattaagtccaaaaacagctgtcagaacctcgagagcagaacatgagaaactcagagctctggaccgaaagcagaaagtttgccgggaaaaaaaaagacaacattattaccatcgattcagtgcctggataaagaggaaagcttacttgtttaatggcagccacatgcacgaagatgctaagaagaaaaagaattccaaatcctcaacttttgaggtttcggctctccaatttaactctttggcaacaggaaacaggttttgcaagttcaaggttcactccctatatgtgattataggaattgtttgtggaaatggattaacatacccgtctatgcctaaaagataataaaactgaaatatgtcttcatccaacaacaacacacaaaaaaaaaacatgttgcgggcccgcgcccgaaaatttaaaccattgggggcgcgcgcccaagaaggaacagccaaacggccagagaccgggcggagggggtcccccaaaaaagcggggcgggcgaaccaggggggccgcttcacgcc

SEQ ID NO: 310014 - DNA, 2598 bp, Homo sapiens
  misc_feature (57)..(57): n is a, c, g, or t
  misc_feature (60)..(60): n is a, c, g, or t
aacgtacctactgcgataaactcggtccaacgagaagagaaggggggggctccaggnatnggactgcatcaaaacatgtaaacaaggacctcggtaatatggaagaaaacaaaaagttagaagaaaacaatcacaaaactgaagcctaagagagaaactgtcctagttgtccagagataaaaatcatatagaccaattgaagcatgaacgtggattgtatttaagacataaacaaagacattgacagcaattcatggttcaagtattaagcagttcattctaccaagctgtcacaggttttcagagaattatctcaagtaaaacaaatgaaatttaattacaaacaataagaacaagttttggcagccatgataataggtcatatgttgtgtttggttcaattttttttccgtaaatgtctgcactgaggatttctttttggtttgccttttatgtaaattttttacgtagctatttttatacactgtaagctttgttctgggagttgctgttaatctgatgtataatgtaatgtttttatttcaattgtttatatggataatctgagcaggtacatttctgattctgattgctatcagcaatgccccaaactttctcataagcacctaaaacccaaaggtggcagcttgtgaagattggggacactcatattgccctaattaaaaactgtgatttttatcacaagggaggggaggccgagagtcagactgatagacaccataggagccgactctttgatatgccaccagcgaactctcagaaataaatcacagatgcatatagacacacatacataatggtactcccaaactgacaattttacctattctgaaaaagacataaaacagaatttggtagcacttacctctacagacacctgctaataaattattttctgtcaaaagaaaaaacacaagcatgtgtgagagacagtttggaaaaatcatggtcaacattcccattttcatagatcacaatgtaaatcactataattacaaattggtgttaaatcctttgggttatccactgccttaaaattatacctatttcatgtttaaaaagatatcaatcagaattggagtttttaacagtggtcattatcaaagctgtgttattttccacagaatatagaatatatatttttttcgtgtgtgtttttgttaactaccctacagatattgaatgcaccttgagataatttagtgtttttaactgatacataatttatcaagcagtacatgaaagtgtaataataaaatgtctatgtatctttagttacattcaaatttgtaactttataaacatgttttatgcttgaggaaatttttaaggtggtagtataaatggaaactttttgaagtagaccagatatgggctacttgtgactagacttttaaactttgctctttcaagcagaagcctggtttctgggagaacactgcacagcgatttctttcccaggatttacacaactttaaagggaagataaatgaacatcagatttctaggtatagaactatgttattgaaaggaaaaggaaaactggtgtttgtttcttagactcatgaaataaaaaattatgaaggcaatgaaaaataaattgaaaattaaagtcagatgagaataggaataatactttgccacttctgcattatttagaaacatacgttattgtacatttgtaaaccatttactgtctgggcaatagtgactccgtttaataaaagcttccgtagtgcattggtatggattaaatgcataaaatattcttagactcgatgctgtataaaatattatgggaaaaaaagaaaatacgttattttgcctctaaacttttattgaagttttatttggcaggaaaaaaaattgaatcttggtcaacatttaaaccaaagtaaaaggggaaaaaccaaagttatttgttttgcatggctaagccattctgttatctctgtaaatactgtgatttcttttttattttctctttagaattttgttaaagaaattctaaaatttttaaacacctgctctccacaataaatcacaaacactaaaataaaattacttccatataaatattattttctcttttggtgtgggagatcaaaggtttaaagtctaacttctaagatatatttgcagaaagaagcaacatgacaatagagagagttatgctacaattatttcttggtttccacttgcaatggttaattaagtccaaaaacagctgtcagaacctcgagagcagaacatgagaaactcagagctctggaccgaaagcagaaagtttgccgggaaaaaaaaagacaacattattaccatcgattcagtgcctggataaagaggaaagcttacttgtttaatggcagccacatgcacgaagatgctaagaagaaaaagaattccaaatcctcaacttttgaggtttcggctctccaatttaactctttggcaacaggaaacaggttttgcaagttcaaggttcactccctatatgtgattataggaattgtttgtggaaatggattaacatacccgtctatgcctaaaagataataaaactgaaatatgtcttca

SEQ ID NO: 310015 - DNA, 2642 bp, Homo sapiens
tttaggatttaccaactgaatgttgacttctttatgtatcactctctagttgctccaaacaagttatgattcttactttagatgaaaggagtggcagttaatgaagactgcatcaaaacatgtaaacaaggacctcggtaatatggaagaaaacaaaaagttagaagaaaacaatcacaaaactgaagcctaagagagaaactgtcctagttgtccagagataaaaatcatatagaccaattgaagcatgaacgtggattgtatttaagacataaacaaagacattgacagcaattcatggttcaagtattaagcagttcattctaccaagctgtcacaggttttcagagaattatctcaagtaaaacaaatgaaatttaattacaaacaataagaacaagttttggcagccatgataataggtcatatgttgtgtttggttcaattttttttccgtaaatgtctgcactgaggatttctttttggtttgccttttatgtaaattttttacgtagctatttttatacactgtaagctttgttctgggagttgctgttaatctgatgtataatgtaatgtttttatttcaattgtttatatggataatctgagcaggtacatttctgattctgattgctatcagcaatgccccaaactttctcataagcacctaaaacccaaaggtggcagcttgtgaagattggggacactcatattgccctaattaaaaactgtgatttttatcacaagggaggggaggccgagagtcagactgatagacaccataggagccgactctttgatatgccaccagcgaactctcagaaataaatcacagatgcatatagacacacatacataatggtactcccaaactgacaattttacctattctgaaaaagacataaaacagaatttggtagcacttacctctacagacacctgctaataaattattttctgtcaaaagaaaaaacacaagcatgtgtgagagacagtttggaaaaatcatggtcaacattcccattttcatagatcacaatgtaaatcactataattacaaattggtgttaaatcctttgggttatccactgccttaaaattatacctatttcatgtttaaaaagatatcaatcagaattggagtttttaacagtggtcattatcaaagctgtgttattttccacagaatatagaatatatatttttttcgtgtgtgtttttgttaactaccctacagatattgaatgcaccttgagataatttagtgtttttaactgatacataatttatcaagcagtacatgaaagtgtaataataaaatgtctatgtatctttagttacattcaaatttgtaactttataaacatgttttatgcttgaggaaatttttaaggtggtagtataaatggaaactttttgaagtagaccagatatgggctacttgtgactagacttttaaactttgctctttcaagcagaagcctggtttctgggagaacactgcacagcgatttctttcccaggatttacacaactttaaagggaagataaatgaacatcagatttctaggtatagaactatgttattgaaaggaaaaggaaaactggtgtttgtttcttagactcatgaaataaaaaattatgaaggcaatgaaaaataaattgaaaattaaagtcagatgagaataggaataatactttgccacttctgcattatttagaaacatacgttattgtacatttgtaaaccatttactgtctgggcaatagtgactccgtttaataaaagcttccgtagtgcattggtatggattaaatgcataaaatattcttagactcgatgctgtataaaatattatgggaaaaaaagaaaatacgttattttgcctctaaacttttattgaagttttatttggcaggaaaaaaaattgaatcttggtcaacatttaaaccaaagtaaaaggggaaaaaccaaagttatttgttttgcatggctaagccattctgttatctctgtaaatactgtgatttcttttttattttctctttagaattttgttaaagaaattctaaaatttttaaacacctgctctccacaataaatcacaaacactaaaataaaattacttccatataaatattattttctcttttggtgtgggagatcaaaggtttaaagtctaacttctaagatatatttgcagaaagaagcaacatgacaatagagagagttatgctacaattatttcttggtttccacttgcaatggttaattaagtccaaaaacagctgtcagaacctcgagagcagaacatgagaaactcagagctctggaccgaaagcagaaagtttgccgggaaaaaaaaagacaacattattaccatcgattcagtgcctggataaagaggaaagcttacttgtttaatggcagccacatgcacgaagatgctaagaagaaaaagaattccaaatcctcaacttttgaggtttcggctctccaatttaactctttggcaacaggaaacaggttttgcaagttcaaggttcactccctatatgtgattataggaattgtttgtggaaatggattaacatacccgtctatgcctaaaagataataaaactgaaatatgtcttca

SEQ ID NO: 310016 - DNA, 2876 bp, Homo sapiens
cacatgactttttttgtttgttttttccacttctctagggttcttttccccagtcctttgtaaacatagattttaactactgttttcttcaaaatcgtataacttctcaatgaaaaactgtacttgaagacaaatcccacgaaatagtgtgatttgaagaaatgagtgtacttttaacctaaagagaaatgcaatgaaatattttcttgaaaaaaaacttgtaatattagtattaattttacaaaaaaagaaaactctgaataattccaaaaactatttgtagaatggatgaagcaatgcctgagattatagatgggcttggggacaatggagttttataaaaggccctcctgtaaagtaatttactaaattacttttagtacaaagtatctgttgatgttaaaaaattattgctttggaagcttatctaaattatttttttttcatttcagagataaaaatcatatagaccaattgaagcatgaacgtggattgtatttaagacataaacaaagacattgacagcaattcatggttcaagtattaagcagttcattctaccaagctgtcacaggttttcagagaattatctcaagtaaaacaaatgaaatttaattacaaacaataagaacaagttttggcagccatgataataggtcatatgttgtgtttggttcaattttttttccgtaaatgtctgcactgaggatttctttttggtttgccttttatgtaaattttttacgtagctatttttatacactgtaagctttgttctgggagttgctgttaatctgatgtataatgtaatgtttttatttcaattgtttatatggataatctgagcaggtacatttctgattctgattgctatcagcaatgccccaaactttctcataagcacctaaaacccaaaggtggcagcttgtgaagattggggacactcatattgccctaattaaaaactgtgatttttatcacaagggaggggaggccgagagtcagactgatagacaccataggagccgactctttgatatgccaccagcgaactctcagaaataaatcacagatgcatatagacacacatacataatggtactcccaaactgacaattttacctattctgaaaaagacataaaacagaatttggtagcacttacctctacagacacctgctaataaattattttctgtcaaaagaaaaaacacaagcatgtgtgagagacagtttggaaaaatcatggtcaacattcccattttcatagatcacaatgtaaatcactataattacaaattggtgttaaatcctttgggttatccactgccttaaaattatacctatttcatgtttaaaaagatatcaatcagaattggagtttttaacagtggtcattatcaaagctgtgttattttccacagaatatagaatatatatttttttcgtgtgtgtttttgttaactaccctacagatattgaatgcaccttgagataatttagtgtttttaactgatacataatttatcaagcagtacatgaaagtgtaataataaaatgtctatgtatctttagttacattcaaatttgtaactttataaacatgttttatgcttgaggaaatttttaaggtggtagtataaatggaaactttttgaagtagaccagatatgggctacttgtgactagacttttaaactttgctctttcaagcagaagcctggtttctgggagaacactgcacagcgatttctttcccaggatttacacaactttaaagggaagataaatgaacatcagatttctaggtatagaactatgttattgaaaggaaaaggaaaactggtgtttgtttcttagactcatgaaataaaaaattatgaaggcaatgaaaaataaattgaaaattaaagtcagatgagaataggaataatactttgccacttctgcattatttagaaacatacgttattgtacatttgtaaaccatttactgtctgggcaatagtgactccgtttaataaaagcttccgtagtgcattggtatggattaaatgcataaaatattcttagactcgatgctgtataaaatattatgggaaaaaaagaaaatacgttattttgcctctaaacttttattgaagttttatttggcaggaaaaaaaattgaatcttggtcaacatttaaaccaaagtaaaaggggaaaaaccaaagttatttgttttgcatggctaagccattctgttatctctgtaaatactgtgatttcttttttattttctctttagaattttgttaaagaaattctaaaatttttaaacacctgctctccacaataaatcacaaacactaaaataaaattacttccatataaatattattttctcttttggtgtgggagatcaaaggtttaaagtctaacttctaagatatatttgcagaaagaagcaacatgacaatagagagagttatgctacaattatttcttggtttccacttgcaatggttaattaagtccaaaaacagctgtcagaacctcgagagcagaacatgagaaactcagagctctggaccgaaagcagaaagtttgccgggaaaaaaaaagacaacattattaccatcgattcagtgcctggataaagaggaaagcttacttgtttaatggcagccacatgcacgaagatgctaagaagaaaaagaattccaaatcctcaacttttgaggtttcggctctccaatttaactctttggcaacaggaaacaggttttgcaagttcaaggttcactccctatatgtgattataggaattgtttgtggaaatggattaacatacccgtctatgcctaaaagataataaaactgaaatatgtcttca

SEQ ID NO: 310017 - DNA, 4119 bp, Homo sapiens
acgcggttctccctgatcccggagctgggctcagggctcggactcagtcctgcagcgcctctaggctgcggatccgcgcttcaaccacctgctttgcgctgcgtccggggaagtggggaggagacgggagggagggaggaggcggggagaggaggaaagaggcagcttacacacgccttccagtccctctactcagagcagcccggagaccgctgccgccgctgccgctgctaccaccgctgccacctgaggagacccgccgcccccccgtcgccgcctcctgcgagtccttcttagcacctggcgtttcatgcacattgccactgccattattattatcattccaatacaaggaaaataaaagaagataccagcgaaaagaaccgcttacacctttccgaattactcaagtgtctcctggaaacagagggtcgttgtccccggaggagcagccgaagggcccgtgggctggtgttgaccgggagggaggaggagttgggggcattgcgtggtggaaagttgcgtgcggcagagaaccgaaggtgcagcgccacagcccaggggacggtgtgtctgggagaagacgctgcccctgcgtcgggacccgccagcgcgcgggcaccgcggggcccgggacgacgccccctcctgcggcgtggactccgtcagtggcccaccaagaaggaggaggaatatggaatccaagggggccagttcctgccgtctgctcttctgcctcttgatctccgccaccgtcttcaggccaggccttggatggtatactgtaaattcagcatatggagataccattatcataccttgccgacttgacgtacctcagaatctcatgtttggcaaatggaaatatgaaaagcccgatggctccccagtatttattgccttcagatcctctacaaagaaaagtgtgcagtacgacgatgtaccagaatacaaagacagattgaacctctcagaaaactacactttgtctatcagtaatgcaaggatcagtgatgaaaagagatttgtgtgcatgctagtaactgaggacaacgtgtttgaggcacctacaatagtcaaggtgttcaagcaaccatctaaacctgaaattgtaagcaaagcactgtttctcgaaacagagcagctaaaaaagttgggtgactgcatttcagaagacagttatccagatggcaatatcacatggtacaggaatggaaaagtgctacatccccttgaaggagcggtggtcataatttttaaaaaggaaatggacccagtgactcagctctataccatgacttccaccctggagtacaagacaaccaaggctgacatacaaatgccattcacctgctcggtgacatattatggaccatctggccagaaaacaattcattctgaacaggcagtatttgatatttactatcctacagagcaggtgacaatacaagtgctgccaccaaaaaatgccatcaaagaaggggataacatcactcttaaatgcttagggaatggcaaccctcccccagaggaatttttgttttacttaccaggacagcccgaaggaataagaagctcaaatacttacacactgacggatgtgaggcgcaatgcaacaggagactacaagtgttccctgatagacaaaaaaagcatgattgcttcaacagccatcacagttcactatttggatttgtccttaaacccaagtggagaagtgactagacagattggtgatgccctacccgtgtcatgcacaatatctgctagcaggaatgcaactgtggtatggatgaaagataacatcaggcttcgatctagcccgtcattttctagtcttcattatcaggatgctggaaactatgtctgcgaaactgctctgcaggaggttgaaggactaaagaaaagagagtcattgactctcattgtagaaggcaaacctcaaataaaaatgacaaagaaaactgatcccagtggactatctaaaacaataatctgccatgtggaaggttttccaaagccagccattcagtggacaattactggcagtggaagcgtcataaaccaaacagaggaatctccttatattaatggcaggtattatagtaaaattatcatttcccctgaagagaatgttacattaacttgcacagcagaaaaccaactggagagaacagtaaactccttgaatgtctctgctataagtattccagaacacgatgaggcagacgagataagtgatgaaaacagagaaaaggtgaatgaccaggcaaaactaattgtgggaatcgttgttggtctcctccttgctgcccttgttgctggtgtcgtctactggctgtacatgaagaagtcaaagactgcatcaaaacatgtaaacaaggacctcggtaatatggaagaaaacaaaaagttagaagaaaacaatcacaaaactgaagcctaagagagaaactgtcctagttgtccagagataaaaatcatatagaccaattgaagcatgaacgtggattgtatttaagacataaacaaagacattgacagcaattcatggttcaagtattaagcagttcattctaccaagctgtcacaggttttcagagaattatctcaagtaaaacaaatgaaatttaattacaaacaataagaacaagttttggcagccatgataataggtcatatgttgtgtttggttcaattttttttccgtaaatgtctgcactgaggatttctttttggtttgccttttatgtaaattttttacgtagctatttttatacactgtaagctttgttctgggagttgctgttaatctgatgtataatgtaatgtttttatttcaattgtttatatggataatctgagcaggtacatttctgattctgattgctatcagcaatgccccaaactttctcataagcacctaaaacccaaaggtggcagcttgtgaagattggggacactcatattgccctaattaaaaactgtgatttttatcacaagggaggggaggccgagagtcagactgatagacaccataggagccgactctttgatatgccaccagcgaactctcagaaataaatcacagatgcatatagacacacatacataatggtactcccaaactgacaattttacctattctgaaaaagacataaaacagaatttggtagcacttacctctacagacacctgctaataaattattttctgtcaaaagaaaaaacacaagcatgtgtgagagacagtttggaaaaatcatggtcaacattcccattttcatagatcacaatgtaaatcactataattacaaattggtgttaaatcctttgggttatccactgccttaaaattatacctatttcatgtttaaaaagatatcaatcagaattggagtttttaacagtggtcattatcaaagctgtgttattttccacagaatatagaatatatatttttttcgtgtgtgtttttgttaactaccctacagatattgaatgcaccttgagataatttagtgtttttaactgatacataatttatcaagcagtacatgaaagtgtaataataaaatgtctatgtatctttagttacattcaaatttgtaactttataaacatgttttatgcttgaggaaatttttaaggtggtagtataaatggaaactttttgaagtagaccagatatgggctacttgtgactagacttttaaactttgctctttcaagcagaagcctggtttctgggagaacactgcacagcgatttctttcccaggatttacacaactttaaagggaagataaatgaacatcagatttctaggtatagaactatgttattgaaaggaaaaggaaaactggtgtttgtttcttagactcatgaaataaaaaattatgaaggcaatgaaaaataaattgaaaattaaagtcagatgagaataggaataatactttgccacttctgcattatttagaaacatacgttattgtacatttgtaaaccatttactgtctgggcaatagtgactccgtttaataaaagcttccgtagtgcattggtatggattaaatgcataaaatattcttagactcgatgctgtataaaatattatggga

SEQ ID NO: 310018 - DNA, 4058 bp, Homo sapiens
acgcggttctccctgatcccggagctgggctcagggctcggactcagtcctgcagcgcctctaggctgcggatccgcgcttcaaccacctgctttgcgctgcgtccggggaagtggggaggagacgggagggagggaggaggcggggagaggaggaaagaggcagcttacacacgccttccagtccctctactcagagcagcccggagaccgctgccgccgctgccgctgctaccaccgctgccacctgaggagacccgccgcccccccgtcgccgcctcctgcgagtccttcttagcacctggcgtttcatgcacattgccactgccattattattatcattccaatacaaggaaaataaaagaagataccagcgaaaagaaccgcttacacctttccgaattactcaagtgtctcctggaaacagagggtcgttgtccccggaggagcagccgaagggcccgtgggctggtgttgaccgggagggaggaggagttgggggcattgcgtggtggaaagttgcgtgcggcagagaaccgaaggtgcagcgccacagcccaggggacggtgtgtctgggagaagacgctgcccctgcgtcgggacccgccagcgcgcgggcaccgcggggcccgggacgacgccccctcctgcggcgtggactccgtcagtggcccaccaagaaggaggaggaatatggaatccaagggggccagttcctgccgtctgctcttctgcctcttgatctccgccaccgtcttcaggccaggccttggatggtatactgtaaattcagcatatggagataccattatcataccttgccgacttgacgtacctcagaatctcatgtttggcaaatggaaatatgaaaagcccgatggctccccagtatttattgccttcagatcctctacaaagaaaagtgtgcagtacgacgatgtaccagaatacaaagacagattgaacctctcagaaaactacactttgtctatcagtaatgcaaggatcagtgatgaaaagagatttgtgtgcatgctagtaactgaggacaacgtgtttgaggcacctacaatagtcaaggtgttcaagcaaccatctaaacctgaaattgtaagcaaagcactgtttctcgaaacagagcagctaaaaaagttgggtgactgcatttcagaagacagttatccagatggcaatatcacatggtacaggaatggaaaagtgctacatccccttgaaggagcggtggtcataatttttaaaaaggaaatggacccagtgactcagctctataccatgacttccaccctggagtacaagacaaccaaggctgacatacaaatgccattcacctgctcggtgacatattatggaccatctggccagaaaacaattcattctgaacaggcagtatttgatatttactatcctacagagcaggtgacaatacaagtgctgccaccaaaaaatgccatcaaagaaggggataacatcactcttaaatgcttagggaatggcaaccctcccccagaggaatttttgttttacttaccaggacagcccgaaggaataagaagctcaaatacttacacactgacggatgtgaggcgcaatgcaacaggagactacaagtgttccctgatagacaaaaaaagcatgattgcttcaacagccatcacagttcactatttggatttgtccttaaacccaagtggagaagtgactagacagattggtgatgccctacccgtgtcatgcacaatatctgctagcaggaatgcaactgtggtatggatgaaagataacatcaggcttcgatctagcccgtcattttctagtcttcattatcaggatgctggaaactatgtctgcgaaactgctctgcaggaggttgaaggactaaagaaaagagagtcattgactctcattgtagaaggcaaacctcaaataaaaatgacaaagaaaactgatcccagtggactatctaaaacaataatctgccatgtggaaggttttccaaagccagccattcagtggacaattactggcagtggaagcgtcataaaccaaacagaggaatctccttatattaatggcaggtattatagtaaaattatcatttcccctgaagagaatgttacattaacttgcacagcagaaaaccaactggagagaacagtaaactccttgaatgtctctgctataagtattccagaacacgatgaggcagacgagataagtgatgaaaacagagaaaaggtgaatgaccaggcaaaactaattgtgggaatcgttgttggtctcctccttgctgcccttgttgctggtgtcgtctactggctgtacatgaagaagtcaaagactgcatcaaaacatgtaaacaaggacctcggtaatatggaagaaaacaaaaagttagaagaaaacaatcacaaaactgaagcctaagagagaaactgtcctagttgtccagagataaaaatcatatagaccaattgaagcatgaacgtggattgtatttaagacataaacaaagacattgacagcaattcatggttcaagtattaagcagttcattctaccaagctgtcacaggttttcagagaattatctcaagtaaaacaaatgaaatttaattacaaacaataagaacaagttttggcagccatgataataggtcatatgttgtgtttggttcaattttttttccgtaaatgtctgcactgaggatttctttttggtttgccttttatgtaaattttttacgtagctatttttatacactgtaagctttgttctgggagttgctgttaatctgatgtataatgtaatgtttttatttcaattgtttatatggataatctgagcaggtacatttctgattctgattgctatcagcaatgccccaaactttctcataagcacctaaaacccaaaggtggcagcttgtgaagattggggacactcatattgccctaattaaaaactgtgatttttatcacaagggaggggaggccgagagtcagactgatagacaccataggagccgactctttgatatgccaccagcgaactctcagaaataaatcacagatgcatatagacacacatacataatggtactcccaaactgacaattttacctattctgaaaaagacataaaacagaatttggtagcacttacctctacagacacctgctaataaattattttctgtcaaaagaaaaaacacaagcatgtgtgagagacagtttggaaaaatcatggtcaacattcccattttcatagatcacaatgtaaatcactataattacaaattggtgttaaatcctttgggttatccactgccttaaaattatacctatttcatgtttaaaaagatatcaatcagaattggagtttttaacagtggtcattatcaaagctgtgttattttccacagaatatagaatatatatttttttcgtgtgtgtttttgttaactaccctacagatattgaatgcaccttgagataatttagtgtttttaactgatacataatttatcaagcagtacatgaaagtgtaataataaaatgtctatgtatctttagttacattcaaatttgtaactttataaacatgttttatgcttgaggaaatttttaaggtggtagtataaatggaaactttttgaagtagaccagatatgggctacttgtgactagacttttaaactttgctctttcaagcagaagcctggtttctgggagaacactgcacagcgatttctttcccaggatttacacaactttaaagggaagataaatgaacatcagatttctaggtatagaactatgttattgaaaggaaaaggaaaactggtgtttgtttcttagactcatgaaataaaaaattatgaaggcaatgaaaaataaattgaaaattaaagtcagatgagaataggaataatactttgccacttctgcattatttagaaacatacgttattgtacatttgtaaaccatttactgtctgggcaatagtgactccgtttaataaaagcttccgtagtgca

SEQ ID NO: 310019 - DNA, 2740 bp, Homo sapiens
  misc_feature (2697)..(2697): n is a, c, g, or t
acgcggttctccctgatcccggagctgggctcagggctcggactcagtcctgcagcgcctctaggctgcggatccgcgcttcaaccacctgctttgcgctgcgtccggggaagtggggaggagacgggagggagggaggaggcggggagaggaggaaagaggcagcttacacacgccttccagtccctctactcagagcagcccggagaccgctgccgccgctgccgctgctaccaccgctgccacctgaggagacccgccgcccccccgtcgccgcctcctgcgagtccttcttagcacctggcgtttcatgcacattgccactgccattattattatcattccaatacaaggaaaataaaagaagataccagcgaaaagaaccgcttacacctttccgaattactcaagtgtctcctggaaacagagggtcgttgtccccggaggagcagccgaagggcccgtgggctggtgttgaccgggagggaggaggagttgggggcattgcgtggtggaaagttgcgtgcggcagagaaccgaaggtgcagcgccacagcccaggggacggtgtgtctgggagaagacgctgcccctgcgtcgggacccgccagcgcgcgggcaccgcggggcccgggacgacgccccctcctgcggcgtggactccgtcagtggcccaccaagaaggaggaggaatatggaatccaagggggccagttcctgccgtctgctcttctgcctcttgatctccgccaccgtcttcaggccaggccttggatggtatactgtaaattcagcatatggagataccattatcataccttgccgacttgacgtacctcagaatctcatgtttggcaaatggaaatatgaaaagcccgatggctccccagtatttattgccttcagatcctctacaaagaaaagtgtgcagtacgacgatgtaccagaatacaaagacagattgaacctctcagaaaactacactttgtctatcagtaatgcaaggatcagtgatgaaaagagatttgtgtgcatgctagtaactgaggacaacgtgtttgaggcacctacaatagtcaaggtgttcaagcaaccatctaaacctgaaattgtaagcaaagcactgtttctcgaaacagagcagctaaaaaagttgggtgactgcatttcagaagacagttatccagatggcaatatcacatggtacaggaatggaaaagtgctacatccccttgaaggagcggtggtcataatttttaaaaaggaaatggacccagtgactcagctctataccatgacttccaccctggagtacaagacaaccaaggctgacatacaaatgccattcacctgctcggtgacatattatggaccatctggccagaaaacaattcattctgaacaggcagtatttgatatttactatcctacagagcaggtgacaatacaagtgctgccaccaaaaaatgccatcaaagaaggggataacatcactcttaaatgcttagggaatggcaaccctcccccagaggaatttttgttttacttaccaggacagcccgaaggaataagaagctcaaatacttacacactgacggatgtgaggcgcaatgcaacaggagactacaagtgttccctgatagacaaaaaaagcatgattgcttcaacagccatcacagttcactatttggatttgtccttaaacccaagtggagaagtgactagacagattggtgatgccctacccgtgtcatgcacaatatctgctagcaggaatgcaactgtggtatggatgaaagataacatcaggcttcgatctagcccgtcattttctagtcttcattatcaggatgctggaaactatgtctgcgaaactgctctgcaggaggttgaaggactaaagaaaagagagtcattgactctcattgtagaaggcaaacctcaaataaaaatgacaaagaaaactgatcccagtggactatctaaaacaataatctgccatgtggaaggttttccaaagccagccattcagtggacaattactggcagtggaagcgtcataaaccaaacagaggaatctccttatattaatggcaggtattatagtaaaattatcatttcccctgaagagaatgttacattaacttgcacagcagaaaaccaactggagagaacagtaaactccttgaatgtctctgctataagtattccagaacacgatgaggcagacgagataagtgatgaaaacagagaaaaggtgaatgaccaggcaaaactaattgtgggaatcgttgttggtctcctccttgctgcccttgttgctggtgtcgtctactggctgtacatgaagaagtcaaagtgagttgtggaaaaaagatcttcatcgttcattgactttcactgggagaaaatacaatgtgctaattttgctcactccagtcgtgcatataatttatacaataaggaagatgtatccccaaatcaggttgattatatattttgtttcaactaattttgactacactgcctttgtcagggacatggcttgggatactgtttcacatgtgtccgtttatttgtctcaatcaatagcctgaattcaattatttgattttttcaaaaaaaaactaagagcagattgcgcaacgaatagacctaagttacccaatgctcacataacaaatattgaataaaccnccaaagttgagatcctgtggccccttgtggcctaaccggggga

SEQ ID NO: 310020 - DNA, 2236 bp, Homo sapiens
  misc_feature (2236)..(2236): n is a, c, g, or t
acgcggttctccctgatcccggagctgggctcagggctcggactcagtcctgcagcgcctctaggctgcggatccgcgcttcaaccacctgctttgcgctgcgtccggggaagtggggaggagacgggagggagggaggaggcggggagaggaggaaagaggcagcttacacacgccttccagtccctctactcagagcagcccggagaccgctgccgccgctgccgctgctaccaccgctgccacctgaggagacccgccgcccccccgtcgccgcctcctgcgagtccttcttagcacctggcgtttcatgcacattgccactgccattattattatcattccaatacaaggaaaataaaagaagataccagcgaaaagaaccgcttacacctttccgaattactcaagtgtctcctggaaacagagggtcgttgtccccggaggagcagccgaagggcccgtgggctggtgttgaccgggagggaggaggagttgggggcattgcgtggtggaaagttgcgtgcggcagagaaccgaaggtgcagcgccacagcccaggggacggtgtgtctgggagaagacgctgcccctgcgtcgggacccgccagcgcgcgggcaccgcggggcccgggacgacgccccctcctgcggcgtggactccgtcagtggcccaccaagaaggaggaggaatatggaatccaagggggccagttcctgccgtctgctcttctgcctcttgatctccgccaccgtcttcaggccaggccttggatggtatactgtaaattcagcatatggagataccattatcataccttgccgacttgacgtacctcagaatctcatgtttggcaaatggaaatatgaaaagcccgatggctccccagtatttattgccttcagatcctctacaaagaaaagtgtgcagtacgacgatgtaccagaatacaaagacagattgaacctctcagaaaactacactttgtctatcagtaatgcaaggatcagtgatgaaaagagatttgtgtgcatgctagtaactgaggacaacgtgtttgaggcacctacaatagtcaaggtgttcaagcaaccatctaaacctgaaattgtaagcaaagcactgtttctcgaaacagagcagctaaaaaagttgggtgactgcatttcagaagacagttatccagatggcaatatcacatggtacaggaatggaaaagtgctacatccccttgaaggagcggtggtcataatttttaaaaaggaaatggacccagtgactcagctctataccatgacttccaccctggagtacaagacaaccaaggctgacatacaaatgccattcacctgctcggtgacatattatggaccatctggccagaaaacaattcattctgaacaggcagtatttgatatttactatcctacagagcaggtgacaatacaagtgctgccaccaaaaaatgccatcaaagaaggggataacatcactcttaaatgcttagggaatggcaaccctcccccagaggaatttttgttttacttaccaggacagcccgaaggaataagaagctcaaatacttacacactgacggatgtgaggcgcaatgcaacaggagactacaagtgttccctgatagacaaaaaaagcatgattgcttcaacagccatcacagttcactatttggatttgtccttaaacccaagtggagaagtgactagacagattggtgatgccctacccgtgtcatgcacaatatctgctagcaggaatgcaactgtggtatggatgaaagataacatcaggcttcgatctagcccgtcattttctagtcttcattatcaggatgctggaaactatgtctgcgaaactgctctgcaggaggttgaaggactaaagaaaagagagtcattgactctcattgtagaaggcaaacctcaaataaaaatgacaaagaaaactgatcccagtggactatctaaaacaataatctgccatgtggaaggttttccaaagccagccattcagtggacaattactggcagtggaagcgtcataaaccaaacagaggaatctccttatattaatggcaggtattatagtaaaattatcatttcccctgaagagaatgttacattaacttgcacagcagaaaaccaactggagagaacagtagccatcctaggacgtatgctggtatagacgtgactcaaaggactcgatgcgggccan

SEQ ID NO: 310021 - DNA, 2261 bp, Homo sapiens
  misc_feature (2224)..(2224): n is a, c, g, or t
  misc_feature (2228)..(2228): n is a, c, g, or t
acgcggttctccctgatcccggagctgggctcagggctcggactcagtcctgcagcgcctctaggctgcggatccgcgcttcaaccacctgctttgcgctgcgtccggggaagtggggaggagacgggagggagggaggaggcggggagaggaggaaagaggcagcttacacacgccttccagtccctctactcagagcagcccggagaccgctgccgccgctgccgctgctaccaccgctgccacctgaggagacccgccgcccccccgtcgccgcctcctgcgagtccttcttagcacctggcgtttcatgcacattgccactgccattattattatcattccaatacaaggaaaataaaagaagataccagcgaaaagaaccgcttacacctttccgaattactcaagtgtctcctggaaacagagggtcgttgtccccggaggagcagccgaagggcccgtgggctggtgttgaccgggagggaggaggagttgggggcattgcgtggtggaaagttgcgtgcggcagagaaccgaaggtgcagcgccacagcccaggggacggtgtgtctgggagaagacgctgcccctgcgtcgggacccgccagcgcgcgggcaccgcggggcccgggacgacgccccctcctgcggcgtggactccgtcagtggcccaccaagaaggaggaggaatatggaatccaagggggccagttcctgccgtctgctcttctgcctcttgatctccgccaccgtcttcaggccaggccttggatggtatactgtaaattcagcatatggagataccattatcataccttgccgacttgacgtacctcagaatctcatgtttggcaaatggaaatatgaaaagcccgatggctccccagtatttattgccttcagatcctctacaaagaaaagtgtgcagtacgacgatgtaccagaatacaaagacagattgaacctctcagaaaactacactttgtctatcagtaatgcaaggatcagtgatgaaaagagatttgtgtgcatgctagtaactgaggacaacgtgtttgaggcacctacaatagtcaaggtgttcaagcaaccatctaaacctgaaattgtaagcaaagcactgtttctcgaaacagagcagctaaaaaagttgggtgactgcatttcagaagacagttatccagatggcaatatcacatggtacaggaatggaaaagtgctacatccccttgaaggagcggtggtcataatttttaaaaaggaaatggacccagtgactcagctctataccatgacttccaccctggagtacaagacaaccaaggctgacatacaaatgccattcacctgctcggtgacatattatggaccatctggccagaaaacaattcattctgaacaggcagtatttgatatttactatcctacagagcaggtgacaatacaagtgctgccaccaaaaaatgccatcaaagaaggggataacatcactcttaaatgcttagggaatggcaaccctcccccagaggaatttttgttttacttaccaggacagcccgaaggaataagaagctcaaatacttacacactgacggatgtgaggcgcaatgcaacaggagactacaagtgttccctgatagacaaaaaaagcatgattgcttcaacagccatcacagttcactatttggatttgtccttaaacccaagtggagaagtgactagacagattggtgatgccctacccgtgtcatgcacaatatctgctagcaggaatgcaactgtggtatggatgaaagataacatcaggcttcgatctagcccgtcattttctagtcttcattatcaggatgctggaaactatgtctgcgaaactgctctgcaggaggttgaaggactaaagaaaagagagtcattgactctcattgtagaaggcaaacctcaaataaaaatgacaaagaaaactgatcccagtggactatctaaaacaataatctgccatgtggaaggttttccaaagccagccattcagtggacaattactggcagtggaagcgtcataaaccaaacagaggaatctccttatattaatggcaggtattatagtaaaattatcatttcccctgaagagaatgttacattaacttgcacagcagaaaaccaactggagagaacagtaaactccttgaatgtctctgctaccagaacacgtatgcggccgggnctcnttttactaatacgaatataagttaaattgggcg

SEQ ID NO: 310022 - DNA, 1562 bp, Homo sapiens
acgcggttctccctgatcccggagctgggctcagggctcggactcagtcctgcagcgcctctaggctgcggatccgcgcttcaaccacctgctttgcgctgcgtccggggaagtggggaggagacgggagggagggaggaggcggggagaggaggaaagaggcagcttacacacgccttccagtccctctactcagagcagcccggagaccgctgccgccgctgccgctgctaccaccgctgccacctgaggagacccgccgcccccccgtcgccgcctcctgcgagtccttcttagcacctggcgtttcatgcacattgccactgccattattattatcattccaatacaaggaaaataaaagaagataccagcgaaaagaaccgcttacacctttccgaattactcaagtgtctcctggaaacagagggtcgttgtccccggaggagcagccgaagggcccgtgggctggtgttgaccgggagggaggaggagttgggggcattgcgtggtggaaagttgcgtgcggcagagaaccgaaggtgcagcgccacagcccaggggacggtgtgtctgggagaagacgctgcccctgcgtcgggacccgccagcgcgcgggcaccgcggggcccgggacgacgccccctcctgcggcgtggactccgtcagtggcccaccaagaaggaggaggaatatggaatccaagggggccagttcctgccgtctgctcttctgcctcttgatctccgccaccgtcttcaggccaggccttggatggtatactgtaaattcagcatatggagataccattatcataccttgccgacttgacgtacctcagaatctcatgtttggcaaatggaaatatgaaaagcccgatggctccccagtatttattgccttcagatcctctacaaagaaaagtgtgcagtacgacgatgtaccagaatacaaagacagattgaacctctcagaaaactacactttgtctatcagtaatgcaaggatcagtgatgaaaagagatttgtgtgcatgctagtaactgaggacaacgtgtttgaggcacctacaatagtcaaggtgttcaagcaaccatctaaacctgaaattgtaagcaaagcactgtttctcgaaacagagcagctaaaaaagttgggtgactgcatttcagaagacagttatccagatggcaatatcacatggtacaggaatggaaaagtgctacatccccttgaaggagcggtggtcataatttttaaaaaggaaatggacccagtgactcagctctataccatgacttccaccctggagtacaagacaaccaaggctgacatacaaatgccattcacctgctcggtgacatattatggaccatctggccagaaaacaattcattctgaacaggcagtatttgatatttactatcctacagagcaggtgacaatacaagtgctgccaccaaaaaatgccatcaaagaaggggataacatcactcttaaatgcttagggaatggcatttgtatgtcagccttggttgtcttgtactccagtgtggagagag

SEQ ID NO: 310023 - DNA, 3040 bp, Homo sapiens
gggatgactcggcgacgccgccaggcgcgttacccggcgtgctccgcgcggcgccggcgaagggacgtgggggaaggggcagggaggaggaagcggtggctgctgcggatgtcggtgtgagcgagcggcgcctgaacacacggcggctgccgagcgcctgacccgggcctgcgccagagcctgcaccgagctccggggccccacacccgctacggtggccctgcgcccgttgctactgaggcggcgtgctctgcattcttcgctgtccaggcctgccggctctggtgtctgctggctcctccttgctcgcctgctccctcctgcttgcctgagtcaccgccgccgccgccgccacagccatggccgagagtggtgaaagcggcggtcctccgggctcccaggatagcgccgccggagccgaaggtgctggcgcccccgcggccgctgcctccgcggagcccaaaatcatgaaagtcaccgtgaagaccccgaaggaaaaggaggaattcgccgtgcccgagaatagctccgtccagcagtttaaggaagaaatctctaaacgttttaaatcacatactgaccaacttgtgttgatatttgctggaaaaattttgaaagatcaagataccttgagtcagcatggaattcatgatggacttactgttcaccttgtcattaaaacacaaaacaggcctcaggatcattcagctcagcaaacaaatacagctggaagcaatgttactacatcatcaactcctaatagtaactctacatctggttctgctactagcaacccttttggtttaggtggccttgggggacttgcaggtctgagtagcttgggtttgaatactaccaacttctctgaactacagagtcagatgcagcgacaacttttgtctaaccctgaaatgatggtccagatcatggaaaatccctttgttcagagcatgctctcaaatcctgacctgatgagacagttaattatggccaatccacaaatgcagcagttgatacagagaaatccagaaattagtcatatgttgaataatccagatataatgagacaaacgttggaacttgccaggaatccagcaatgatgcaggagatgatgaggaaccaggaccgagctttgagcaacctagaaagcatcccagggggatataatgctttaaggcgcatgtacacagatattcaggaaccaatgctgagtgctgcacaagagcagtttggtggtaatccatttgcttccttggtgagcaatacatcctctggtgaaggtagtcaaccttcccgtacagaaaatagagatccactacccaatccatgggctccacagacttcccagagttcatcagcttccagcggcactgccagcactgtgggtggcactactggtagtactgccagtggcacttctgggcagagtactactgcgccaaatttggtgcctggagtaggagctagtatgttcaacacaccaggaatgcagagcttgttgcaacaaataactgaaaacccacaacttatgcaaaacatgttgtctgccccctacatgagaagcatgatgcagtcactaagccagaatcctgaccttgctgcacagatgatgctgaataatcccctatttgctggaaatcctcagcttcaagaacaaatgagacaacagctcccaactttcctccaacaaatgcagaatcctgatacactatcagcaatgtcaaaccctagagcaatgcaggccttgttacagattcagcagggtttacagacattagcaacggaagccccgggcctcatcccagggtttactcctggcttgggggcattaggaagcactggaggctcttcgggaactaatggatctaacgccacacctagtgaaaacacaagtcccacagcaggaaccactgaacctggacatcagcagtttattcagcagatgctgcaggctcttgctggagtaaatcctcagctacagaatccagaagtcagatttcagcaacaactggaacaactcagtgcaatgggatttttgaaccgtgaagcaaacttgcaagctctaatagcaacaggaggtgatatcaatgcagctattgaaaggttactgggctcccagccatcatagcagcatttctgtatcttgaaaaaatgtaatttatttttgataacggctcttaaactttaaaatacctgctttatttcattttgactcttggaattctgtgctgttataaacaaacccaatatgatgcattttaaggtggagtacagtaagatgtgtgggtttttctgtatttttcttttctggaacagtgggaattaaggctactgcatgcatcacttctgcatttattgtaattttttaaaaacatcaccttttatagttgggtgaccagattttgtcctgcatctgtccagtttatttgctttttaaacattagcctatggtagtaatttatgtagaataaaagcattaaaaagaagcaaatcatttgcactctataatttgtggtacagtattgcttattgtgactttggcatgcatttttgcaaacaatgctgtaagatttatactactgataattttgttttatttgtatacaatatagagtatgcacatttgggactgcatttctggaaacatactgcaataggctctctgagcaaaacacctgtaactaaaaaagtgaagataagaaaatactcttaaagctgagtatttcctaattgtatagaatcttacagcatctttgacaaacatctcccagcaaaagtgccggttagtcaggtttgttgaaaatacagtagaaaagctgattctggttatctctttaaggacaattaattgtacagacacataatgtaacattgtctcaacattcattcacagattgactgtaaattaccttaatctttgtgcagactgaaggaacactgtagtataccccaaagtgcatttgcctaggacttctcagcttctcccataggtagtttaacaggcattaaaatttgtaattgaaatgttgctttcactga

SEQ ID NO: 310024 - DNA, 2509 bp, Homo sapiens
gggatgactcggcgacgccgccaggcgcgttacccggcgtgctccgcgcggcgccggcgaagggacgtgggggaaggggcagggaggaggaagcggtggctgctgcggatgtcggtgtgagcgagcggcgcctgaacacacggcggctgccgagcgcctgacccgggcctgcgccagagcctgcaccgagctccggggccccacacccgctacggtggccctgcgcccgttgctactgaggcggcgtgctctgcattcttcgctgtccaggcctgccggctctggtgtctgctggctcctccttgctcgcctgctccctcctgcttgcctgagtcaccgccgccgccgccgccacagccatggccgagagtggtgaaagcggcggtcctccgggctcccaggatagcgccgccggagccgaaggtgctggcgcccccgcggccgctgcctccgcggagcccaaaatcatgaaagtcaccgtgaagaccccgaaggaaaaggaggaattcgccgtgcccgagaatagctccgtccagcagtttaaggaagaaatctctaaacgttttaaatcacatactgaccaacttgtgttgatatttgctggaaaaattttgaaagatcaagataccttgagtcagcatggaattcatgatggacttactgttcaccttgtcattaaaacacaaaacaggcctcaggatcattcagctcagcaaacaaatacagctggaagcaatgttactacatcatcaactcctaatagtaactctacatctggttctgctactagcaacccttttggtttaggtggccttgggggacttgcaggtctgagtagcttgggtttgaatactaccaacttctctgaactacagagtcagatgcagcgacaacttttgtctaaccctgaaatgatggtccagatcatggaaaatccctttgttcagagcatgctctcaaatcctgacctgatgagacagttaattatggccaatccacaaatgcagcagttgatacagagaaatccagaaattagtcatatgttgaataatccagatataatgagacaaacgttggaacttgccaggaatccagcaatgatgcaggagatgatgaggaaccaggaccgagctttgagcaacctagaaagcatcccagggggatataatgctttaaggcgcatgtacacagatattcaggaaccaatgctgagtgctgcacaagagcagtttggtggtaatccatttgcttccttggtgagcaatacatcctctggtgaaggtagtcaaccttcccgtacagaaaatagagatccactacccaatccatgggctccacagacttcccagagttcatcagcttccagcggcactgccagcactgtgggtggcactactggtagtactgccagtggcacttctgggcagagtactactgcgccaaatttggtgcctggagtaggagctagtatgttcaacacaccaggaatgcagagcttgttgcaacaaataactgaaaacccacaacttatgcaaaacatgttgtctgccccctacatgagaagcatgatgcagtcactaagccagaatcctgaccttgctgcacagatgatgctgaataatcccctatttgctggaaatcctcagcttcaagaacaaatgagacaacagctcccaactttcctccaacaaatgcagaatcctgatacactatcagcaatgtcaaaccctagagcaatgcaggccttgttacagattcagcagggtttacagacattagcaacggaagccccgggcctcatcccagggtttactcctggcttgggggcattaggaagcactggaggctcttcgggaactaatggatctaacgccacacctagtgaaaacacaagtcccacagcaggaaccactgaacctggacatcagcagtttattcagcagatgctgcaggctcttgctggagtaaatcctcagctacagaatccagaagtcagatttcagcaacaactggaacaactcagtgcaatgggatttttgaaccgtgaagcaaacttgcaagctctaatagcaacaggaggtgatatcaatgcagctattgaaaggttactgggctcccagccatcatagcagcatttctgtatcttgaaaaaatgtaatttatttttgataacggctcttaaactttaaaatacctgctttatttcattttgactcttggaattctgtgctgttataaacaaacccaatatgatgcattttaaggtggagtacagtaagatgtgtgggtttttctgtatttttcttttctggaacagtgggaattaaggctactgcatgcatcacttctgcatttattgtaattttttaaaaacatcaccttttatagttgggtgaccagattttgtcctgcatctgtccagtttatttgctttttaaacattagcctatggtagtaatttatgtagaataaaagcattaaaaagaagcaaatcatttgcactctataa

SEQ ID NO: 310025 - DNA, 2425 bp, Homo sapiens
gggatgactcggcgacgccgccaggcgcgttacccggcgtgctccgcgcggcgccggcgaagggacgtgggggaaggggcagggaggaggaagcggtggctgctgcggatgtcggtgtgagcgagcggcgcctgaacacacggcggctgccgagcgcctgacccgggcctgcgccagagcctgcaccgagctccggggccccacacccgctacggtggccctgcgcccgttgctactgaggcggcgtgctctgcattcttcgctgtccaggcctgccggctctggtgtctgctggctcctccttgctcgcctgctccctcctgcttgcctgagtcaccgccgccgccgccgccacagccatggccgagagtggtgaaagcggcggtcctccgggctcccaggatagcgccgccggagccgaaggtgctggcgcccccgcggccgctgcctccgcggagcccaaaatcatgaaagtcaccgtgaagaccccgaaggaaaaggaggaattcgccgtgcccgagaatagctccgtccagcagtttaaggaagaaatctctaaacgttttaaatcacatactgaccaacttgtgttgatatttgctggaaaaattttgaaagatcaagataccttgagtcagcatggaattcatgatggacttactgttcaccttgtcattaaaacacaaaacaggcctcaggatcattcagctcagcaaacaaatacagctggaagcaatgttactacatcatcaactcctaatagtaactctacatctggttctgctactagcaacccttttggtttaggtggccttgggggacttgcaggtctgagtagcttgggtttgaatactaccaacttctctgaactacagagtcagatgcagcgacaacttttgtctaaccctgaaatgatggtccagatcatggaaaatccctttgttcagagcatgctctcaaatcctgacctgatgagacagttaattatggccaatccacaaatgcagcagttgatacagagaaatccagaaattagtcatatgttgaataatccagatataatgagacaaacgttggaacttgccaggaatccagcaatgatgcaggagatgatgaggaaccaggaccgagctttgagcaacctagaaagcatcccagggggatataatgctttaaggcgcatgtacacagatattcaggaaccaatgctgagtgctgcacaagagcagtttggtggtaatccatttgcttccttggtgagcaatacatcctctggtgaaggtagtcaaccttcccgtacagaaaatagagatccactacccaatccatgggctccacagacttcccagagttcatcagcttccagcggcactgccagcactgtgggtggcactactggtagtactgccagtggcacttctgggcagagtactactgcgccaaatttggtgcctggagtaggagctagtatgttcaacacaccaggaatgcagagcttgttgcaacaaataactgaaaacccacaacttatgcaaaacatgttgtctgccccctacatgagaagcatgatgcagtcactaagccagaatcctgaccttgctgcacagatgcagaatcctgatacactatcagcaatgtcaaaccctagagcaatgcaggccttgttacagattcagcagggtttacagacattagcaacggaagccccgggcctcatcccagggtttactcctggcttgggggcattaggaagcactggaggctcttcgggaactaatggatctaacgccacacctagtgaaaacacaagtcccacagcaggaaccactgaacctggacatcagcagtttattcagcagatgctgcaggctcttgctggagtaaatcctcagctacagaatccagaagtcagatttcagcaacaactggaacaactcagtgcaatgggatttttgaaccgtgaagcaaacttgcaagctctaatagcaacaggaggtgatatcaatgcagctattgaaaggttactgggctcccagccatcatagcagcatttctgtatcttgaaaaaatgtaatttatttttgataacggctcttaaactttaaaatacctgctttatttcattttgactcttggaattctgtgctgttataaacaaacccaatatgatgcattttaaggtggagtacagtaagatgtgtgggtttttctgtatttttcttttctggaacagtgggaattaaggctactgcatgcatcacttctgcatttattgtaattttttaaaaacatcaccttttatagttgggtgaccagattttgtcctgcatctgtccagtttatttgctttttaaacattagcctatggtagtaatttatgtagaataaaagcattaaaaagaagcaaatcatttgcactctataa

SEQ ID NO: 310026 - DNA, 771 bp, Homo sapiens
gggatgactcggcgacgccgccaggcgcgttacccggcgtgctccgcgcggcgccggcgaagggacgtgggggaaggggcagggaggaggaagcggtggctgctgcggatgtcggtgtgagcgagcggcgcctgaacacacggcggctgccgagcgcctgacccgggcctgcgccagagcctgcaccgagctccggggccccacacccgctacggtggccctgcgcccgttgctactgaggcggcgtgctctgcattcttcgctgtccaggcctgccggctctggtgtctgctggctcctccttgctcgcctgctccctcctgcttgcctgagtcaccgccgccgccgccgccacagccatggccgagagtggtgaaagcggcggtcctccgggctcccaggatagcgccgccggagccgaaggtgctggcgcccccgcggccgctgcctccgcggagcccaaaatcatgaaagtcaccgtgaagaccccgaaggaaaaggaggaattcgccgtgcccgagaatagctccgtccagcaggtgaggccgcctggggctcgggccgggatgggggtggcggcaggacctccgcccgccgccccaggagaccttttggaagggcctgggagaggggtcgtcctcggccattctcccgggcgtcgtcccaaattagatcacacccaagttcgtgggtttgcgccttgggacaccgcaatggtttgtggcgtggcggcgcggcctgtttgtgggacgggctgatgccgcttttctc

SEQ ID NO: 310027 - DNA, 806 bp, Homo sapiens
gtttattctgccagtgtagtagaaaatatatcttcatgaatgccagttactcccatttttctttcaatggcatatattcacgtttgttcaaggaaaagcctaagaaaatgattgcttttattttttaggatattgcatgtcattatcataaccaccattctcattgagagagaatatgcctcatttttttgtttttgttcttctggagatccctcttgtggacagtatcttcccttttcctttttttatttatgttctaccttcctcccttttaagtgccagctgaggcacttgggggaagatagaataaaacaaggtacattacttgtttcagatatttccagttaaaattgtttgaacacttgccccatagatgatgctgaataatcccctatttgctggaaatcctcagcttcaagaacaaatgagacaacagctcccaactttcctccaacaaatgcagaatcctgatacactatcagcaatgtcaaaccctagagcaatgcaggccttgttacagattcagcagggtttacagacattagcaacggaagccccgggcctcatcccaggacgttggaacttgccaggaatccagcaatgatgcaggagatgatgaggaaccaggaccgagctttgagccacctagaaagcatcccagggggatataatgctttaaggcgcatgtacacagatattcaggaaccaatgctgagtgctgcacaagagcagtttggtggtaatccatttgcttccttggtgagcaatacatcctctggtgaaggtagtcaaccttcccgtacgaa

SEQ ID NO: 310028 - DNA, 3946 bp, Homo sapiens
gggatgactcggcgacgccgccaggcgcgttacccggcgtgctccgcgcggcgccggcgaagggacgtgggggaaggggcagggaggaggaagcggtggctgctgcggatgtcggtgtgagcgagcggcgcctgaacacacggcggctgccgagcgcctgacccgggcctgcgccagagcctgcaccgagctccggggccccacacccgctacggtggccctgcgcccgttgctactgaggcggcgtgctctgcattcttcgctgtccaggcctgccggctctggtgtctgctggctcctccttgctcgcctgctccctcctgcttgcctgagtcaccgccgccgccgccgccacagccatggccgagagtggtgaaagcggcggtcctccgggctcccaggatagcgccgccggagccgaaggtgctggcgcccccgcggccgctgcctccgcggagcccaaaatcatgaaagtcaccgtgaagaccccgaaggaaaaggaggaattcgccgtgcccgagaatagctccgtccagcagtttaaggaagaaatctctaaacgttttaaatcacatactgaccaacttgtgttgatatttgctggaaaaattttgaaagatcaagataccttgagtcagcatggaattcatgatggacttactgttcaccttgtcattaaaacacaaaacaggcctcaggatcattcagctcagcaaacaaatacagctggaagcaatgttactacatcatcaactcctaatagtaactctacatctggttctgctactagcaacccttttggtttaggtggccttgggggacttgcaggtctgagtagcttgggtttgaatactaccaacttctctgaactacagagtcagatgcagcgacaacttttgtctaaccctgaaatgatggtccagatcatggaaaatccctttgttcagagcatgctctcaaatcctgacctgatgagacagttaattatggccaatccacaaatgcagcagttgatacagagaaatccagaaattagtcatatgttgaataatccagatataatgagacaaacgttggaacttgccaggaatccagcaatgatgcaggagatgatgaggaaccaggaccgagctttgagcaacctagaaagcatcccagggggatataatgctttaaggcgcatgtacacagatattcaggaaccaatgctgagtgctgcacaagagcagtttggtggtaatccatttgcttccttggtgagcaatacatcctctggtgaaggtagtcaaccttcccgtacagaaaatagagatccactacccaatccatgggctccacagacttcccagagttcatcagcttccagcggcactgccagcactgtgggtggcactactggtagtactgccagtggcacttctgggcagagtactactgcgccaaatttggtgcctggagtaggagctagtatgttcaacacaccaggaatgcagagcttgttgcaacaaataactgaaaacccacaacttatgcaaaacatgttgtctgccccctacatgagaagcatgatgcagtcactaagccagaatcctgaccttgctgcacagatgatgctgaataatcccctatttgctggaaatcctcagcttcaagaacaaatgagacaacagctcccaactttcctccaacaaatgcagaatcctgatacactatcagcaatgtcaaaccctagagcaatgcaggccttgttacagattcagcagggtttacagacattagcaacggaagccccgggcctcatcccagggtttactcctggcttgggggcattaggaagcactggaggctcttcgggaactaatggatctaacgccacacctagtgaaaacacaagtcccacagcaggaaccactgaacctggacatcagcagtttattcagcagatgctgcaggctcttgctggagtaaatcctcagctacagaatccagaagtcagatttcagcaacaactggaacaactcagtgcaatgggatttttgaaccgtgaagcaaacttgcaagctctaatagcaacaggaggtgatatcaatgcagctattgaaaggttactgggctcccagccatcatagcagcatttctgtatcttgaaaaaatgtaatttatttttgataacggctcttaaactttaaaatacctgctttatttcattttgactcttggaattctgtgctgttataaacaaacccaatatgatgcattttaaggtggagtacagtaagatgtgtgggtttttctgtatttttcttttctggaacagtgggaattaaggctactgcatgcatcacttctgcatttattgtaattttttaaaaacatcaccttttatagttgggtgaccagattttgtcctgcatctgtccagtttatttgctttttaaacattagcctatggtagtaatttatgtagaataaaagcattaaaaagaagcaaatcatttgcactctataatttgtggtacagtattgcttattgtgactttggcatgcatttttgcaaacaatgctgtaagatttatactactgataattttgttttatttgtatacaatatagagtatgcacatttgggactgcatttctggaaacatactgcaataggctctctgagcaaaacacctgtaactaaaaaagtgaagataagaaaatactcttaaagctgagtatttcctaattgtatagaatcttacagcatctttgacaaacatctcccagcaaaagtgccggttagtcaggtttgttgaaaatacagtagaaaagctgattctggttatctctttaaggacaattaattgtacagacacataatgtaacattgtctcaacattcattcacagattgactgtaaattaccttaatctttgtgcagactgaaggaacactgtagtataccccaaagtgcatttgcctaggacttctcagcttctcccataggtagtttaacaggcattaaaatttgtaattgaaatgttgctttcactgaaaaagtgtcttgatgtttcagttatttttaatcgccataaaaaaatagaactatcttttgggtttatctgttttctcatgcacaggcaatacacaaatttaaaatgagttgtgagccaattgtttctgaagtgttttggtagttctattaagaaatagttaaatattgtgcttttcagagcctcagagaaagggggacggggtgggggggtggggcagcggaatctgtcctggatggggccagcttaaataatactggcaaccaagattctgttaggatttctgtgcatatagtgtagtaaagaagtatcattcaggggtgaaaaacaaagagccgttttaatgatgttgagtacatttggctgttttatagcctttttcttccctcccccaaagaattctgtttgcctaactcccaaactgttggggtggtacattcctttaggaccaattaaaacataattgagggtcagtgatacatttggctgactctggttcagtattctcttaggtgattatattctctcatgtacagttacaggaaattaaaatgttaaagtaacctaaaatgaattcagaccaataaaatcaagggaaatacaagttgattgcattacttctgtatgttgcttgctattaaaaaggttaagaggccaggttacccaccagtccttgcactgttctgacactttccccaggaggaaaacaagtacaaaggttacggtggaggcataagtagaagagattgttaagaagggtattcatgtgtctttgctctttctgctttatgcctcagtttggtttaaaaacttctgtactggcaaatggtggtattcagtgtgggatagtgtcataactaatttgacaatttattaatcataaaataacaataaatctctagctttta

SEQ ID NO: 310029 - DNA, 3990 bp, Homo sapiens
tagttcacaaggcacccacttaccaagctttttcacctttccaatttgcttcaaatgccgaacgactgtagaatggtcaatgttgagttcttcagcaacttcaggtgtagttataagaggatcagcttcgatgattgctctcaattggtcactgtcaacttccgatggctggccactatgctcctcatcttcaaggctctcctctcctttgtgaaacttcttgaaccaccactgcactgtgcgttcattagcagttcctgggccaaatgtgttgctgatgttgtgagttgtctccgctgctttatgacccattttgaacttgaataagaaaattgctcgaatttgctttttgtctaacatcatttccatagtctgagtcaccgccgccgccgccgccacagccatggccgagagtggtgaaagcggcggtcctccgggctcccaggatagcgccgccggagccgaaggtgctggcgcccccgcggccgctgcctccgcggagcccaaaatcatgaaagtcaccgtgaagaccccgaaggaaaaggaggaattcgccgtgcccgagaatagctccgtccagcagtttaaggaagaaatctctaaacgttttaaatcacatactgaccaacttgtgttgatatttgctggaaaaattttgaaagatcaagataccttgagtcagcatggaattcatgatggacttactgttcaccttgtcattaaaacacaaaacaggcctcaggatcattcagctcagcaaacaaatacagctggaagcaatgttactacatcatcaactcctaatagtaactctacatctggttctgctactagcaacccttttggtttaggtggccttgggggacttgcaggtctgagtagcttgggtttgaatactaccaacttctctgaactacagagtcagatgcagcgacaacttttgtctaaccctgaaatgatggtccagatcatggaaaatccctttgttcagagcatgctctcaaatcctgacctgatgagacagttaattatggccaatccacaaatgcagcagttgatacagagaaatccagaaattagtcatatgttgaataatccagatataatgagacaaacgttggaacttgccaggaatccagcaatgatgcaggagatgatgaggaaccaggaccgagctttgagcaacctagaaagcatcccagggggatataatgctttaaggcgcatgtacacagatattcaggaaccaatgctgagtgctgcacaagagcagtttggtggtaatccatttgcttccttggtgagcaatacatcctctggtgaaggtagtcaaccttcccgtacagaaaatagagatccactacccaatccatgggctccacagacttcccagagttcatcagcttccagcggcactgccagcactgtgggtggcactactggtagtactgccagtggcacttctgggcagagtactactgcgccaaatttggtgcctggagtaggagctagtatgttcaacacaccaggaatgcagagcttgttgcaacaaataactgaaaacccacaacttatgcaaaacatgttgtctgccccctacatgagaagcatgatgcagtcactaagccagaatcctgaccttgctgcacagatgatgctgaataatcccctatttgctggaaatcctcagcttcaagaacaaatgagacaacagctcccaactttcctccaacaaatgcagaatcctgatacactatcagcaatgtcaaaccctagagcaatgcaggccttgttacagattcagcagggtttacagacattagcaacggaagccccgggcctcatcccagggtttactcctggcttgggggcattaggaagcactggaggctcttcgggaactaatggatctaacgccacacctagtgaaaacacaagtcccacagcaggaaccactgaacctggacatcagcagtttattcagcagatgctgcaggctcttgctggagtaaatcctcagctacagaatccagaagtcagatttcagcaacaactggaacaactcagtgcaatgggatttttgaaccgtgaagcaaacttgcaagctctaatagcaacaggaggtgatatcaatgcagctattgaaaggttactgggctcccagccatcatagcagcatttctgtatcttgaaaaaatgtaatttatttttgataacggctcttaaactttaaaatacctgctttatttcattttgactcttggaattctgtgctgttataaacaaacccaatatgatgcattttaaggtggagtacagtaagatgtgtgggtttttctgtatttttcttttctggaacagtgggaattaaggctactgcatgcatcacttctgcatttattgtaattttttaaaaacatcaccttttatagttgggtgaccagattttgtcctgcatctgtccagtttatttgctttttaaacattagcctatggtagtaatttatgtagaataaaagcattaaaaagaagcaaatcatttgcactctataatttgtggtacagtattgcttattgtgactttggcatgcatttttgcaaacaatgctgtaagatttatactactgataattttgttttatttgtatacaatatagagtatgcacatttgggactgcatttctggaaacatactgcaataggctctctgagcaaaacacctgtaactaaaaaagtgaagataagaaaatactcttaaagctgagtatttcctaattgtatagaatcttacagcatctttgacaaacatctcccagcaaaagtgccggttagtcaggtttgttgaaaatacagtagaaaagctgattctggttatctctttaaggacaattaattgtacagacacataatgtaacattgtctcaacattcattcacagattgactgtaaattaccttaatctttgtgcagactgaaggaacactgtagtataccccaaagtgcatttgcctaggacttctcagcttctcccataggtagtttaacaggcattaaaatttgtaattgaaatgttgctttcactgaaaaagtgtcttgatgtttcagttatttttaatcgccataaaaaaatagaactatcttttgggtttatctgttttctcatgcacaggcaatacacaaatttaaaatgagttgtgagccaattgtttctgaagtgttttggtagttctattaagaaatagttaaatattgtgcttttcagagcctcagagaaagggggacggggtgggggggtggggcagcggaatctgtcctggatggggccagcttaaataatactggcaaccaagattctgttaggatttctgtgcatatagtgtagtaaagaagtatcattcaggggtgaaaaacaaagagccgttttaatgatgttgagtacatttggctgttttatagcctttttcttccctcccccaaagaattctgtttgcctaactcccaaactgttggggtggtacattcctttaggaccaattaaaacataattgagggtcagtgatacatttggctgactctggttcagtattctcttaggtgattatattctctcatgtacagttacaggaaattaaaatgttaaagtaacctaaaatgaattcagaccaataaaatcaagggaaatacaagttgattgcattacttctgtatgttgcttgctattaaaaaggttaagaggccaggttacccaccagtccttgcactgttctgacactttccccaggaggaaaacaagtacaaaggttacggtggaggcataagtagaagagattgttaagaagggtattcatgtgtctttgctctttctgctttatgcctcagtttggtttaaaaacttctgtactggcaaatggtggtattcagtgtgggatagtgtcataactaatttgacaatttattaatcataaaataacaataaatctctagctttta

SEQ ID NO: 310030 - DNA, 3888 bp, Homo sapiens
gggatgactcggcgacgccgccaggcgcgttacccggcgtgctccgcgcggcgccggcgaagggacgtgggggaaggggcagggaggaggaagcggtggctgctgcggatgtcggtgtgagcgagcggcgcctgaacacacggcggctgccgagcgcctgacccgggcctgcgccagagcctgcaccgagctccggggccccacacccgctacggtggccctgcgcccgttgctactgaggcggcgtgctctgcattcttcgctgtccaggcctgccggctctggtgtctgctggctcctccttgctcgcctgctccctcctgcttgcctgagtcaccgccgccgccgccgccacagccatggccgagagtggtgaaagcggcggtcctccgggctcccaggatagcgccgccggagccgaaggtgctggcgcccccgcggccgctgcctccgcggagcccaaaatcatgaaagtcaccgtgaagaccccgaaggaaaaggaggaattcgccgtgcccgagaatagctccgtccagcagtttaaggaagaaatctctaaacgttttaaatcacatactgaccaacttgtgttgatatttgctggaaaaattttgaaagatcaagataccttgagtcagcatggaattcatgatggacttactgttcaccttgtcattaaaacacaaaacaggcctcaggatcattcagctcagcaaacaaatacagctggaagcaatgttactacatcatcaactcctaatagtaactctacatctggttctgctactagcaacccttttggtttaggtggccttgggggacttgcaggtctgagtagcttgggtttgaatactaccaacttctctgaactacagagtcagatgcagcgacaacttttgtctaaccctgaaatgatggtccagatcatggaaaatccctttgttcagagcatgctctcaaatcctgacctgatgagacagttaattatggccaatccacaaatgcagcagttgatacagagaaatccagaaattagtcatatgttgaataatccagatataatgagacaaacgttggaacttgccaggaatccagcaatgatgcaggagatgatgaggaaccaggaccgagctttgagcaacctagaaagcatcccagggggatataatgctttaaggcgcatgtacacagatattcaggaaccaatgctgagtgctgcacaagagcagtttggtggtaatccatttgcttccttggtgagcaatacatcctctggtgaaggtagtcaaccttcccgtacagaaaatagagatccactacccaatccatgggctccacagacttcccagagttcatcagcttccagcggcactgccagcactgtgggtggcactactggtagtactgccagtggcacttctgggcagagtactactgcgccaaatttggtgcctggagtaggagctagtatgttcaacacaccaggaatgcagagcttgttgcaacaaataactgaaaacccacaacttatgcaaaacatgttgtctgccccctacatgagaagcatgatgcagtcactaagccagaatcctgaccttgctgcacagatgatgctgaataatcccctatttgctggaaatcctcagcttcaagaacaaatgagacaacagctcccaactttcctccaacaaatgcagaatcctgatacactatcagcaatgtcaaaccctagagcaatgcaggccttgttacagattcagcagggtttacagacattagcaacggaagccccgggcctcatcccagggtttactcctggcttgggggcattaggaagcactggaggctcttcgggaactaatggatctaacgccacacctagtgaaaacacaagtcccacagcaggaaccactgaacctggacatcagcagtttattcagcagatgctgcaggctcttgctggagtaaatcctcagctacagaatccagaagtcagatttcagcaacaactggaacaactcagtgcaatgggatttttgaaccgtgaagcaaacttgcaagctctaatagcaacaggaggtgatatcaatgcagctattgaaaggttactgggctcccagccatcatagcagcatttctgtatcttgaaaaaatgtaatttatttttgataacggctcttaaactttaaaatacctgctttatttcattttgactcttggaattctgtgctgttataaacaaacccaatatgatgcattttaaggtggagtacagtaagatgtgtgggtttttctgtatttttcttttctggaacagtgggaattaaggctactgcatgcatcacttctgcatttattgtaattttttaaaaacatcaccttttatagttgggtgaccagattttgtcctgcatctgtccagtttatttgctttttaaacattagcctatggtagtaatttatgtagaataaaagcattaaaaagaagcaaatcatttgcactctataatttgtggtacagtattgcttattgtgactttggcatgcatttttgcaaacaatgctgtaagatttatactactgataattttgttttatttgtatacaatatagagtatgcacatttgggactgcatttctggaaacatactgcaataggctctctgagcaaaacacctgtaactaaaaaagtgaagataagaaaatactcttaaagctgagtatttcctaattgtatagaatcttacagcatctttgacaaacatctcccagcaaaagtgccggttagtcaggtttgttgaacataatgtaacattgtctcaacattcattcacagattgactgtaaattaccttaatctttgtgcagactgaaggaacactgtagtataccccaaagtgcatttgcctaggacttctcagcttctcccataggtagtttaacaggcattaaaatttgtaattgaaatgttgctttcactgaaaaagtgtcttgatgtttcagttatttttaatcgccataaaaaaatagaactatcttttgggtttatctgttttctcatgcacaggcaatacacaaatttaaaatgagttgtgagccaattgtttctgaagtgttttggtagttctattaagaaatagttaaatattgtgcttttcagagcctcagagaaagggggacggggtgggggggtggggcagcggaatctgtcctggatggggccagcttaaataatactggcaaccaagattctgttaggatttctgtgcatatagtgtagtaaagaagtatcattcaggggtgaaaaacaaagagccgttttaatgatgttgagtacatttggctgttttatagcctttttcttccctcccccaaagaattctgtttgcctaactcccaaactgttggggtggtacattcctttaggaccaattaaaacataattgagggtcagtgatacatttggctgactctggttcagtattctcttaggtgattatattctctcatgtacagttacaggaaattaaaatgttaaagtaacctaaaatgaattcagaccaataaaatcaagggaaatacaagttgattgcattacttctgtatgttgcttgctattaaaaaggttaagaggccaggttacccaccagtccttgcactgttctgacactttccccaggaggaaaacaagtacaaaggttacggtggaggcataagtagaagagattgttaagaagggtattcatgtgtctttgctctttctgctttatgcctcagtttggtttaaaaacttctgtactggcaaatggtggtattcagtgtgggatagtgtcataactaatttgacaatttattaatcataaaataacaataaatctctagctttta

SEQ ID NO: 310031 - DNA, 4022 bp, Homo sapiens
gggatgactcggcgacgccgccaggcgcgttacccggcgtgctccgcgcggcgccggcgaagggacgtgggggaaggggcagggaggaggaagcggtggctgctgcggatgtcggtgtgagcgagcggcgcctgaacacacggcggctgccgagcgcctgacccgggcctgcgccagagcctgcaccgagctccggggccccacacccgctacggtggccctgcgcccgttgctactgaggcggcgtgctctgcattcttcgctgtccaggcctgccggctctggtgtctgctggctcctccttgctcgcctgctccctcctgcttgcctgagtcaccgccgccgccgccgccacagccatggccgagagtggtgaaagcggcggtcctccgggctcccaggatagcgccgccggagccgaaggtgctggcgcccccgcggccgctgcctccgcggagcccaaaatcatgaaagtcaccgtgaagaccccgaaggaaaaggaggaattcgccgtgcccgagaatagctccgtccagcagtttaaggaagaaatctctaaacgttttaaatcacatactgaccaacttgtgttgatatttgctggaaaaattttgaaagatcaagataccttgagtcagcatggaattcatgatggacttactgttcaccttgtcattaaaacacaaaacaggcctcaggatcattcagctcagcaaacaaatacagctggaagcaatgttactacatcatcaactcctaatagtaactctacatctggttctgctactagcaacccttttggtttaggtggccttgggggacttgcaggtctgagtagcttgggtttgaatactaccaacttctctgaactacagagtcagatgcagcgacaacttttgtctaaccctgaaatgatggtccagatcatggaaaatccctttgttcagagcatgctctcaaatcctgacctgatgagacagttaattatggccaatccacaaatgcagcagttgatacagagaaatccagaaattagtcatatgttgaataatccagatataatgagacaaacgttggaacttgccaggaatccagcaatgatgcaggagatgatgaggaaccaggaccgagctttgagcaacctagaaagcatcccagggggatataatgctttaaggcgcatgtacacagatattcaggaaccaatgctgagtgctgcacaagagcagtttggtggtaatccatttgcttccttggtgagcaatacatcctctggtgaaggtagtcaaccttcccgtacagaaaatagagatccactacccaatccatgggctccacagacttcccagagttcatcagcttccagcggcactgccagcactgtgggtggcactactggtagtactgccagtggcacttctgggcagagtactactgcgccaaatttggtgcctggagtaggagctagtatgttcaacacaccaggaatgcagagcttgttgcaacaaataactgaaaacccacaacttatgcaaaacatgttgtctgccccctacatgagaagcatgatgcagtcactaagccagaatcctgaccttgctgcacagatgatgctgaataatcccctatttgctggaaatcctcagcttcaagaacaaatgagacaacagctcccaactttcctccaacaaatgcagaatcctgatacactatcagcaatgtcaaaccctagagcaatgcaggccttgttacagattcagcagggtttacagacattagcaacggaagccccgggcctcatcccagggtttactcctggcttgggggcattaggaagcactggaggctcttcgggaactaatggatctaacgccacacctagtgaaaacacaagtcccacagcaggaaccactgaacctggacatcagcagtttattcagcagatgctgcaggctcttgctggagtaaatcctcagctacagaatccagaagtcagatttcagcaacaactggaacaactcagtgcaatgggatttttgaaccgtgaagcaaacttgcaagctctaatagcaacaggaggtgatatcaatgcagctattgaaaggttactgggctcccagccatcatagcagcatttctgtatcttgaaaaaatgtaatttatttttgataacggctcttaaactttaaaatacctgctttatttcattttgactcttggaattctgtgctgttataaacaaacccaatatgatgcattttaaggtggagtacagtaagatgtgtgggtttttctgtatttttcttttctggaacagtgggaattaaggctactgcatgcatcacttctgcatttattgtaattttttaaaaacatcaccttttatagttgggtgaccagattttgtcctgcatctgtccagtttatttgctttttaaacattagcctatggtagtaatttatgtagaataaaagcattaaaaagaagcaaatcatttgcactctataatttgtggtacagtattgcttattgtgactttggcatgcatttttgcaaacaatgctgtaagatttatactactgataattttgttttatttgtatacaatatagagtatgcacatttgggactgcatttctggaaacatactgcaataggctctctgagcaaaacacctgtaactaaaaaagtgaagataagaaaatactcttaaagctgagtatttcctaattgtatagaatcttacagcatctttgacaaacatctcccagcaaaagtgccggttagtcaggtttgttgaaaatacagtagaaaagctgattctggttatctctttaaggacaattaattgtacagacacataatgtaacattgtctcaacattcattcacagattgactgtaaattaccttaatctttgtgcagactgaaggaacactgtagtataccccaaagtgcatttgcctaggacttctcagcttctcccataggtagtttaacaggcattaaaatttgtaattgaaatgttgctttcactgaaaaagtgtcttgatgtttcagttatttttaatcgccataaaaaaatagaactatcttttgggtttatctgttttctcatgcacaggcaatacacaaatttaaaatgagttgtgagccaattgtttctgaagtgttttggtagttctattaagaaatagttaaatattgtgcttttcagagcctcagagaaagggggacggggtgggggggtggggcagcggaatctgtcctggatggggccagcttaaataatactggcaaccaagattctgttaggatttctgtgcatatagtgtagtaaagaagtatcattcaggggtgaaaaacaaagagccgttttaatgatgttgagtacatttggctgttttatagcctttttcttccctcccccaaagaattctgtttgcctaactcccaaactgttggggtggtacattcctttaggaccaattaaaacataattgagggtcagtgatacatttggctgactctggttcagtattctcttaggtgattatattctctcatgtacagttacaggaaattaaaatgttaaagtaacctaaaatgaattcagaccaataaaatcaagggaaatacaagttgattgcattacttctgtatgttgcttgctattaaaaaggttaagaggccaggttacccaccagtccttgcactgttctgacactttccccaggaggaaaacaagtacaaaggttacggtggaggcataagtagaagagattgttaagaagggtattcatgtgtctttgctctttctgctttatgcctcagtttggtttaaaaacttctgtactggcaaatggtggtattcagtgtgggatagtgtcataactaatttgacaatttattaatcataaaataacaataaatctctagcttttaaaaaaaacaaaaggcggagcgctaaatatccctcaagggcacaattagcgtaccgattcttgtcaaagggccctta

SEQ ID NO: 310032 - DNA, 5540 bp, Homo sapiens
  misc_feature (5070)..(5070): n is a, c, g, or t
  misc_feature (5084)..(5084): n is a, c, g, or t
  misc_feature (5086)..(5086): n is a, c, g, or t
  misc_feature (5089)..(5089): n is a, c, g, or t
  misc_feature (5093)..(5093): n is a, c, g, or t
  misc_feature (5099)..(5099): n is a, c, g, or t
  misc_feature (5102)..(5102): n is a, c, g, or t
  misc_feature (5105)..(5105): n is a, c, g, or t
  misc_feature (5113)..(5113): n is a, c, g, or t
  misc_feature (5115)..(5115): n is a, c, g, or t
  misc_feature (5118)..(5118): n is a, c, g, or t
  misc_feature (5165)..(5166): n is a, c, g, or t
  misc_feature (5189)..(5193): n is a, c, g, or t
gggatgactcggcgacgccgccaggcgcgttacccggcgtgctccgcgcggcgccggcgaagggacgtgggggaaggggcagggaggaggaagcggtggctgctgcggatgtcggtgtgagcgagcggcgcctgaacacacggcggctgccgagcgcctgacccgggcctgcgccagagcctgcaccgagctccggggccccacacccgctacggtggccctgcgcccgttgctactgaggcggcgtgctctgcattcttcgctgtccaggcctgccggctctggtgtctgctggctcctccttgctcgcctgctccctcctgcttgcctgagtcaccgccgccgccgccgccacagccatggccgagagtggtgaaagcggcggtcctccgggctcccaggatagcgccgccggagccgaaggtgctggcgcccccgcggccgctgcctccgcggagcccaaaatcatgaaagtcaccgtgaagaccccgaaggaaaaggaggaattcgccgtgcccgagaatagctccgtccagcagtttaaggaagaaatctctaaacgttttaaatcacatactgaccaacttgtgttgatatttgctggaaaaattttgaaagatcaagataccttgagtcagcatggaattcatgatggacttactgttcaccttgtcattaaaacacaaaacaggcctcaggatcattcagctcagcaaacaaatacagctggaagcaatgttactacatcatcaactcctaatagtaactctacatctggttctgctactagcaacccttttggtttaggtggccttgggggacttgcaggtctgagtagcttgggtttgaatactaccaacttctctgaactacagagtcagatgcagcgacaacttttgtctaaccctgaaatgatggtccagatcatggaaaatccctttgttcagagcatgctctcaaatcctgacctgatgagacagttaattatggccaatccacaaatgcagcagttgatacagagaaatccagaaattagtcatatgttgaataatccagatataatgagacaaacgttggaacttgccaggaatccagcaatgatgcaggagatgatgaggaaccaggaccgagctttgagcaacctagaaagcatcccagggggatataatgctttaaggcgcatgtacacagatattcaggaaccaatgctgagtgctgcacaagagcagtttggtggtaatccatttgcttccttggtgagcaatacatcctctggtgaaggtagtcaaccttcccgtacagaaaatagagatccactacccaatccatgggctccacagacttcccagagttcatcagcttccagcggcactgccagcactgtgggtggcactactggtagtactgccagtggcacttctgggcagagtactactgcgccaaatttggtgcctggagtaggagctagtatgttcaacacaccaggaatgcagagcttgttgcaacaaataactgaaaacccacaacttatgcaaaacatgttgtctgccccctacatgagaagcatgatgcagtcactaagccagaatcctgaccttgctgcacagatgatgctgaataatcccctatttgctggaaatcctcagcttcaagaacaaatgagacaacagctcccaactttcctccaacaaatgcagaatcctgatacactatcagcaatgtcaaaccctagagcaatgcaggccttgttacagattcagcagggtttacagacattagcaacggaagccccgggcctcatcccagggtttactcctggcttgggggcattaggaagcactggaggctcttcgggaactaatggatctaacgccacacctagtgaaaacacaagtcccacagcaggaaccactgaacctggacatcagcagtttattcagcagatgctgcaggctcttgctggagtaaatcctcagctacagaatccagaagtcagatttcagcaacaactggaacaactcagtgcaatgggatttttgaaccgtgaagcaaacttgcaagctctaatagcaacaggaggtgatatcaatgcagctattgaaaggttactgggctcccagccatcatagcagcatttctgtatcttgaaaaaatgtaatttatttttgataacggctcttaaactttaaaatacctgctttatttcattttgactcttggaattctgtgctgttataaacaaacccaatatgatgcattttaaggtggagtacagtaagatgtgtgggtttttctgtatttttcttttctggaacagtgggaattaaggctactgcatgcatcacttctgcatttattgtaattttttaaaaacatcaccttttatagttgggtgaccagattttgtcctgcatctgtccagtttatttgctttttaaacattagcctatggtagtaatttatgtagaataaaagcattaaaaagaagcaaatcatttgcactctataatttgtggtacagtattgcttattgtgactttggcatgcatttttgcaaacaatgctgtaagatttatactactgataattttgttttatttgtatacaatatagagtatgcacatttgggactgcatttctggaaacatactgcaataggctctctgagcaaaacacctgtaactaaaaaagtgaagataagaaaatactcttaaagctgagtatttcctaattgtatagaatcttacagcatctttgacaaacatctcccagcaaaagtgccggttagtcaggtttgttgaaaatacagtagaaaagctgattctggttatctctttaaggacaattaattgtacagacacataatgtaacattgtctcaacattcattcacagattgactgtaaattaccttaatctttgtgcagactgaaggaacactgtagtataccccaaagtgcatttgcctaggacttctcagcttctcccataggtagtttaacaggcattaaaatttgtaattgaaatgttgctttcactgaaaaagtgtcttgatgtttcagttatttttaatcgccataaaaaaatagaactatcttttgggtttatctgttttctcatgcacaggcaatacacaaatttaaaatgagttgtgagccaattgtttctgaagtgttttggtagttctattaagaaatagttaaatattgtgcttttcagagcctcagagaaagggggacggggtgggggggtggggcagcggaatctgtcctggatggggccagcttaaataatactggcaaccaagattctgttaggatttctgtgcatatagtgtagtaaagaagtatcattcaggggtgaaaaacaaagagccgttttaatgatgttgagtacatttggctgttttatagcctttttcttccctcccccaaagaattctgtttgcctaactcccaaactgttggggtggtacattcctttaggaccaattaaaacataattgagggtcagtgatacatttggctgactctggttcagtattctcttaggtgattatattctctcatgtacagttacaggaaattaaaatgttaaagtaacctaaaatgaattcagaccaataaaatcaagggaaatacaagttgattgcattacttctgtatgttgcttgctattaaaaaggttaagaggccaggttacccaccagtccttgcactgttctgacactttccccaggaggaaaacaagtacaaaggttacggtggaggcataagtagaagagattgttaagaagggtattcatgtgtctttgctctttctgctttatgcctcagtttggtttaaaaacttctgtactggcaaatggtggtattcagtgtgggatagtgtcataactaatttgacaatttattaatcataaaataacaataaatctctagcttttacaaaacaccacaccccccaacaaagggcggggcccgcctccaaaagtttcccccctcgaagggcgccccacacttttaaccgcgtttcccccaccttttcctgttgtctcccaccagcggtgcgcccccccctatcacgctcggcactctcgcgcctttcataacccctcagccgccatctgggcccccgctccgtcttttccaccccacgtgtccgtcgcactctgcgcgccaccacccttggtccatcccgctcggccggacacccattctcgcgtcacacggcgacccccttcacactcccgtgccgcgcgtgggtcgaccccctacacttccgccccccacacaccttaccccttaaccacagaccgactttttaacagccgcctctacacggcggctacaccttctctacaccgctctctctccacacaccgtcgctcttcacccggttcgtcacacacccttaacccttccgcattatatccgcctctcgcctccgccctttcgcaacaaagctctccgcgcccacaccctcagacctcttcttcaaccctttccatcgaccaccacactcttcttttttttacccccccagcgaacccattccccctcccacaaaaaaacctcccctcctccctaccaaccacccactacacccacaccacacacctcaacctacactcaccccacccacctccctccacatactcaccctcacaactcactacacccctctctcaccttaccacccacgaacccccactcactcatactgcagactcgacactccacacgcaccccatacaccccaccatcaccacccgcacctccctccaccactacctacacgccaactgctcagacaccgcgcgcatcaaccagtcagctcatcgccacagcactcgcaacaccacagcacgagcccgccaccgctacccacccctcccccctgcgccccacaccccctgcaccccccccacacgaccacacacccgcccccccctgcccactcacctcctccacctccccctccctccccacctccctccctcaccaccctcccctcatcaccatcaccgaccgcgcccccaccaccgaccctccccccccacatctccacncctccccccccccncncgncccncacccnccnccnccccctcncnacncccccccctccccctcaaccccaacccccctcctcccgcgccgccgnnaggccctctttggccccctctgnnnnnaatggatctaacgccacacctagtgaaaacacaagtcccacagcaggaaccactgaacctggacatcagcagtttattcagcagatgctgcaggctcttgctggagtaaatcctcagctacagaatccagaagtcagatttcagcaacaactggaacaactcagtgcaatgggatttttgaaccgtgaagcaaacttgcaagctctaatagcaacaggaggtgatatcaatgcagctattgaaaggttactgggctcccagccatcatagcagcatttctgtatcttgaaaaaatgtaatttatttttgataacggctcttaaactttaaaatacctgctttatttc

SEQ ID NO: 310033 - DNA, 4282 bp, Homo sapiens
gggatgactcggcgacgccgccaggcgcgttacccggcgtgctccgcgcggcgccggcgaagggacgtgggggaaggggcagggaggaggaagcggtggctgctgcggatgtcggtgtgagcgagcggcgcctgaacacacggcggctgccgagcgcctgacccgggcctgcgccagagcctgcaccgagctccggggccccacacccgctacggtggccctgcgcccgttgctactgaggcggcgtgctctgcattcttcgctgtccaggcctgccggctctggtgtctgctggctcctccttgctcgcctgctccctcctgcttgcctgagtcaccgccgccgccgccgccacagccatggccgagagtggtgaaagcggcggtcctccgggctcccaggatagcgccgccggagccgaaggtgctggcgcccccgcggccgctgcctccgcggagcccaaaatcatgaaagtcaccgtgaagaccccgaaggaaaaggaggaattcgccgtgcccgagaatagctccgtccagcagtttaaggaagaaatctctaaacgttttaaatcacatactgaccaacttgtgttgatatttgctggaaaaattttgaaagatcaagataccttgagtcagcatggaattcatgatggacttactgttcaccttgtcattaaaacacaaaacaggcctcaggatcattcagctcagcaaacaaatacagctggaagcaatgttactacatcatcaactcctaatagtaactctacatctggttctgctactagcaacccttttggtttaggtggccttgggggacttgcaggtctgagtagcttgggtttgaatactaccaacttctctgaactacagagtcagatgcagcgacaacttttgtctaaccctgaaatgatggtccagatcatggaaaatccctttgttcagagcatgctctcaaatcctgacctgatgagacagttaattatggccaatccacaaatgcagcagttgatacagagaaatccagaaattagtcatatgttgaataatccagatataatgagacaaacgttggaacttgccaggaatccagcaatgatgcaggagatgatgaggaaccaggaccgagctttgagcaacctagaaagcatcccagggggatataatgctttaaggcgcatgtacacagatattcaggaaccaatgctgagtgctgcacaagagcagtttggtggtaatccatttgcttccttggtgagcaatacatcctctggtgaaggtagtcaaccttcccgtacagaaaatagagatccactacccaatccatgggctccacagacttcccagagttcatcagcttccagcggcactgccagcactgtgggtggcactactggtagtactgccagtggcacttctgggcagagtactactgcgccaaatttggtgcctggagtaggagctagtatgttcaacacaccaggaatgcagagcttgttgcaacaaataactgaaaacccacaacttatgcaaaacatgttgtctgccccctacatgagaagcatgatgcagtcactaagccagaatcctgaccttgctgcacagatgatgctgaataatcccctatttgctggaaatcctcagcttcaagaacaaatgagacaacagctcccaactttcctccaacaaatgcagaatcctgatacactatcagcaatgtcaaaccctagagcaatgcaggccttgttacagattcagcagggtttacagacattagcaacggaagccccgggcctcatcccagggtttactcctggcttgggggcattaggaagcactggaggctcttcgggaactaatggatctaacgccacacctagtgaaaacacaagtcccacagcaggaaccactgaacctggacatcagcagtttattcagcagatgctgcaggctcttgctggagtaaatcctcagctacagaatccagaagtcagatttcagcaacaactggaacaactcagtgcaatgggatttttgaaccgtgaagcaaacttgcaagctctaatagcaacaggaggtgatatcaatgcagctattgaaaggttactgggctcccagccatcatagcagcatttctgtatcttgaaaaaatgtaatttatttttgataacggctcttaaactttaaaatacctgctttatttcattttgactcttggaattctgtgctgttataaacaaacccaatatgatgcattttaaggtggagtacagtaagatgtgtgggtttttctgtatttttcttttctggaacagtgggaattaaggctactgcatgcatcacttctgcatttattgtaattttttaaaaacatcaccttttatagttgggtgaccagattttgtcctgcatctgtccagtttatttgctttttaaacattagcctatggtagtaatttatgtagaataaaagcattaaaaagaagcaaatcatttgcactctataatttgtggtacagtattgcttattgtgactttggcatgcatttttgcaaacaatgctgtaagatttatactactgataattttgttttatttgtatacaatatagagtatgcacatttgggactgcatttctggaaacatactgcaataggctctctgagcaaaacacctgtaactaaaaaagtgaagataagaaaatactcttaaagctgagtatttcctaattgtatagaatcttacagcatctttgacaaacatctcccagcaaaagtgccggttagtcaggtttgttgaaaatacagtagaaaagctgattctggttatctctttaaggacaattaattgtacagacacataatgtaacattgtctcaacattcattcacagattgactgtaaattaccttaatctttgtgcagactgaaggaacactgtagtataccccaaagtgcatttgcctaggacttctcagcttctcccataggtagtttaacaggcattaaaatttgtaattgaaatgttgctttcactgaaaaagtgtcttgatgtttcagttatttttaatcgccataaaaaaatagaactatcttttgggtttatctgttttctcatgcacaggcaatacacaaatttaaaatgagttgtgagccaattgtttctgaagtgttttggtagttctattaagaaatagttaaatattgtgcttttcagagcctcagagaaagggggacggggtgggggggtggggcagcggaatctgtcctggatggggccagcttaaataatactggcaaccaagattctgttaggatttctgtgcatatagtgtagtaaagaagtatcattcaggggtgaaaaacaaagagccgttttaatgatgttgagtacatttggctgttttatagcctttttcttccctcccccaaagaattctgtttgcctaactcccaaactgttggggtggtacattcctttaggaccaattaaaacataattgagggtcagtgatacatttggctgactctggttcagtattctcttaggtgattatattctctcatgtacagttacaggaaattaaaatgttaaagtaacctaaaatgaattcagaccaataaaatcaagggaaatacaagttgattgcattacttctgtatgttgcttgctattaaaaaggttaagaggccaggttacccaccagtccttgcactgttctgacactttccccaggaggaaaacaagtacaaaggttacggtggaggcataagtagaagagattgttaagaagggtattcatgtgtctttgctctttctgctttatgcctcagtttggtttaaaaacttctgtactggcaaatggtggtattcagtgtgggatagtgtcataactaatttgacaatttattaatcataaaataacaataaatctctagcttttaaaaaaaaaaaaaaaaaaaaaaaaaaaaaaaaaaaaaaaaaaaaaaaaaaaaaaaaaaaaaaaaaaaaaaaaaaaaaaaaaaaaaaaaaaaaaaaaaaaaaaaaaaaacctcggggggggccccgttcccaatttggccttatagggagcctttttacaattaattgcccgtgttttaaacaacgctaaatggaaaaaccctgggtttcccaaatttatatccttgtgaaaaaatccccttttgccaattggctttattgcaaaaagccccaaccatatggcttttcaaaaatttgcaaccttaattggaattggaaatttaagctaaaaattttgt

SEQ ID NO: 310034 - DNA, 3862 bp, Homo sapiens
gggatgactcggcgacgccgccaggcgcgttacccggcgtgctccgcgcggcgccggcgaagggacgtgggggaaggggcagggaggaggaagcggtggctgctgcggatgtcggtgtgagcgagcggcgcctgaacacacggcggctgccgagcgcctgacccgggcctgcgccagagcctgcaccgagctccggggccccacacccgctacggtggccctgcgcccgttgctactgaggcggcgtgctctgcattcttcgctgtccaggcctgccggctctggtgtctgctggctcctccttgctcgcctgctccctcctgcttgcctgagtcaccgccgccgccgccgccacagccatggccgagagtggtgaaagcggcggtcctccgggctcccaggatagcgccgccggagccgaaggtgctggcgcccccgcggccgctgcctccgcggagcccaaaatcatgaaagtcaccgtgaagaccccgaaggaaaaggaggaattcgccgtgcccgagaatagctccgtccagcagtttaaggaagaaatctctaaacgttttaaatcacatactgaccaacttgtgttgatatttgctggaaaaattttgaaagatcaagataccttgagtcagcatggaattcatgatggacttactgttcaccttgtcattaaaacacaaaacaggcctcaggatcattcagctcagcaaacaaatacagctggaagcaatgttactacatcatcaactcctaatagtaactctacatctggttctgctactagcaacccttttggtttaggtggccttgggggacttgcaggtctgagtagcttgggtttgaatactaccaacttctctgaactacagagtcagatgcagcgacaacttttgtctaaccctgaaatgatggtccagatcatggaaaatccctttgttcagagcatgctctcaaatcctgacctgatgagacagttaattatggccaatccacaaatgcagcagttgatacagagaaatccagaaattagtcatatgttgaataatccagatataatgagacaaacgttggaacttgccaggaatccagcaatgatgcaggagatgatgaggaaccaggaccgagctttgagcaacctagaaagcatcccagggggatataatgctttaaggcgcatgtacacagatattcaggaaccaatgctgagtgctgcacaagagcagtttggtggtaatccatttgcttccttggtgagcaatacatcctctggtgaaggtagtcaaccttcccgtacagaaaatagagatccactacccaatccatgggctccacagacttcccagagttcatcagcttccagcggcactgccagcactgtgggtggcactactggtagtactgccagtggcacttctgggcagagtactactgcgccaaatttggtgcctggagtaggagctagtatgttcaacacaccaggaatgcagagcttgttgcaacaaataactgaaaacccacaacttatgcaaaacatgttgtctgccccctacatgagaagcatgatgcagtcactaagccagaatcctgaccttgctgcacagatgcagaatcctgatacactatcagcaatgtcaaaccctagagcaatgcaggccttgttacagattcagcagggtttacagacattagcaacggaagccccgggcctcatcccagggtttactcctggcttgggggcattaggaagcactggaggctcttcgggaactaatggatctaacgccacacctagtgaaaacacaagtcccacagcaggaaccactgaacctggacatcagcagtttattcagcagatgctgcaggctcttgctggagtaaatcctcagctacagaatccagaagtcagatttcagcaacaactggaacaactcagtgcaatgggatttttgaaccgtgaagcaaacttgcaagctctaatagcaacaggaggtgatatcaatgcagctattgaaaggttactgggctcccagccatcatagcagcatttctgtatcttgaaaaaatgtaatttatttttgataacggctcttaaactttaaaatacctgctttatttcattttgactcttggaattctgtgctgttataaacaaacccaatatgatgcattttaaggtggagtacagtaagatgtgtgggtttttctgtatttttcttttctggaacagtgggaattaaggctactgcatgcatcacttctgcatttattgtaattttttaaaaacatcaccttttatagttgggtgaccagattttgtcctgcatctgtccagtttatttgctttttaaacattagcctatggtagtaatttatgtagaataaaagcattaaaaagaagcaaatcatttgcactctataatttgtggtacagtattgcttattgtgactttggcatgcatttttgcaaacaatgctgtaagatttatactactgataattttgttttatttgtatacaatatagagtatgcacatttgggactgcatttctggaaacatactgcaataggctctctgagcaaaacacctgtaactaaaaaagtgaagataagaaaatactcttaaagctgagtatttcctaattgtatagaatcttacagcatctttgacaaacatctcccagcaaaagtgccggttagtcaggtttgttgaaaatacagtagaaaagctgattctggttatctctttaaggacaattaattgtacagacacataatgtaacattgtctcaacattcattcacagattgactgtaaattaccttaatctttgtgcagactgaaggaacactgtagtataccccaaagtgcatttgcctaggacttctcagcttctcccataggtagtttaacaggcattaaaatttgtaattgaaatgttgctttcactgaaaaagtgtcttgatgtttcagttatttttaatcgccataaaaaaatagaactatcttttgggtttatctgttttctcatgcacaggcaatacacaaatttaaaatgagttgtgagccaattgtttctgaagtgttttggtagttctattaagaaatagttaaatattgtgcttttcagagcctcagagaaagggggacggggtgggggggtggggcagcggaatctgtcctggatggggccagcttaaataatactggcaaccaagattctgttaggatttctgtgcatatagtgtagtaaagaagtatcattcaggggtgaaaaacaaagagccgttttaatgatgttgagtacatttggctgttttatagcctttttcttccctcccccaaagaattctgtttgcctaactcccaaactgttggggtggtacattcctttaggaccaattaaaacataattgagggtcagtgatacatttggctgactctggttcagtattctcttaggtgattatattctctcatgtacagttacaggaaattaaaatgttaaagtaacctaaaatgaattcagaccaataaaatcaagggaaatacaagttgattgcattacttctgtatgttgcttgctattaaaaaggttaagaggccaggttacccaccagtccttgcactgttctgacactttccccaggaggaaaacaagtacaaaggttacggtggaggcataagtagaagagattgttaagaagggtattcatgtgtctttgctctttctgctttatgcctcagtttggtttaaaaacttctgtactggcaaatggtggtattcagtgtgggatagtgtcataactaatttgacaatttattaatcataaaataacaataaatctctagctttta

SEQ ID NO: 310035 - DNA, 3907 bp, Homo sapiens
gggatgactcggcgacgccgccaggcgcgttacccggcgtgctccgcgcggcgccggcgaagggacgtgggggaaggggcagggaggaggaagcggtggctgctgcggatgtcggtgtgagcgagcggcgcctgaacacacggcggctgccgagcgcctgacccgggcctgcgccagagcctgcaccgagctccggggccccacacccgctacggtggccctgcgcccgttgctactgaggcggcgtgctctgcattcttcgctgtccaggcctgccggctctggtgtctgctggctcctccttgctcgcctgctccctcctgcttgcctgagtcaccgccgccgccgccgccacagccatggccgagagtggtgaaagcggcggtcctccgggctcccaggatagcgccgccggagccgaaggtgctggcgcccccgcggccgctgcctccgcggagcccaaaatcatgaaagtcaccgtgaagaccccgaaggaaaaggaggaattcgccgtgcccgagaatagctccgtccagcagtttaaggaagaaatctctaaacgttttaaatcacatactgaccaacttgtgttgatatttgctggaaaaattttgaaagatcaagataccttgagtcagcatggaattcatgatggacttactgttcaccttgtcattaaaacacaaaacaggcctcaggatcattcagctcagcaaacaaatacagctggaagcaatgttactacatcatcaactcctaatagtaactctacatctggttctgctactagcaacccttttggtttaggtggccttgggggacttgcaggtctgagtagcttgggtttgaatactaccaacttctctgaactacagagtcagatgcagcgacaacttttgtctaaccctgaaatgatggtccagatcatggaaaatccctttgttcagagcatgctctcaaatcctgacctgatgagacagttaattatggccaatccacaaatgcagcagttgatacagagaaatccagaaattagtcatatgttgaataatccagatataatgagacaaacgttggaacttgccaggaatccagcaatgatgcaggagatgatgaggaaccaggaccgagctttgagcaacctagaaagcatcccagggggatataatgctttaaggcgcatgtacacagatattcaggaaccaatgctgagtgctgcacaagagcagtttggtggtaatccatttgcttccttggtgagcaatacatcctctggtgaaggtagtcaaccttcccgtacagaaaatagagatccactacccaatccatgggctccacagacttcccagagttcatcagcttccagcggcactgccagcactgtgggtggcactactggtagtactgccagtggcacttctgggcagagtactactgcgccaaatttggtgcctggagtaggagctagtatgttcaacacaccaggaatgcagagcttgttgcaacaaataactgaaaacccacaacttatgcaaaacatgttgtctgccccctacatgagaagcatgatgcagtcactaagccagaatcctgaccttgctgcacagcttcaagaacaaatgagacaacagctcccaactttcctccaacaaatgcagaatcctgatacactatcagcaatgtcaaaccctagagcaatgcaggccttgttacagattcagcagggtttacagacattagcaacggaagccccgggcctcatcccagggtttactcctggcttgggggcattaggaagcactggaggctcttcgggaactaatggatctaacgccacacctagtgaaaacacaagtcccacagcaggaaccactgaacctggacatcagcagtttattcagcagatgctgcaggctcttgctggagtaaatcctcagctacagaatccagaagtcagatttcagcaacaactggaacaactcagtgcaatgggatttttgaaccgtgaagcaaacttgcaagctctaatagcaacaggaggtgatatcaatgcagctattgaaaggttactgggctcccagccatcatagcagcatttctgtatcttgaaaaaatgtaatttatttttgataacggctcttaaactttaaaatacctgctttatttcattttgactcttggaattctgtgctgttataaacaaacccaatatgatgcattttaaggtggagtacagtaagatgtgtgggtttttctgtatttttcttttctggaacagtgggaattaaggctactgcatgcatcacttctgcatttattgtaattttttaaaaacatcaccttttatagttgggtgaccagattttgtcctgcatctgtccagtttatttgctttttaaacattagcctatggtagtaatttatgtagaataaaagcattaaaaagaagcaaatcatttgcactctataatttgtggtacagtattgcttattgtgactttggcatgcatttttgcaaacaatgctgtaagatttatactactgataattttgttttatttgtatacaatatagagtatgcacatttgggactgcatttctggaaacatactgcaataggctctctgagcaaaacacctgtaactaaaaaagtgaagataagaaaatactcttaaagctgagtatttcctaattgtatagaatcttacagcatctttgacaaacatctcccagcaaaagtgccggttagtcaggtttgttgaaaatacagtagaaaagctgattctggttatctctttaaggacaattaattgtacagacacataatgtaacattgtctcaacattcattcacagattgactgtaaattaccttaatctttgtgcagactgaaggaacactgtagtataccccaaagtgcatttgcctaggacttctcagcttctcccataggtagtttaacaggcattaaaatttgtaattgaaatgttgctttcactgaaaaagtgtcttgatgtttcagttatttttaatcgccataaaaaaatagaactatcttttgggtttatctgttttctcatgcacaggcaatacacaaatttaaaatgagttgtgagccaattgtttctgaagtgttttggtagttctattaagaaatagttaaatattgtgcttttcagagcctcagagaaagggggacggggtgggggggtggggcagcggaatctgtcctggatggggccagcttaaataatactggcaaccaagattctgttaggatttctgtgcatatagtgtagtaaagaagtatcattcaggggtgaaaaacaaagagccgttttaatgatgttgagtacatttggctgttttatagcctttttcttccctcccccaaagaattctgtttgcctaactcccaaactgttggggtggtacattcctttaggaccaattaaaacataattgagggtcagtgatacatttggctgactctggttcagtattctcttaggtgattatattctctcatgtacagttacaggaaattaaaatgttaaagtaacctaaaatgaattcagaccaataaaatcaagggaaatacaagttgattgcattacttctgtatgttgcttgctattaaaaaggttaagaggccaggttacccaccagtccttgcactgttctgacactttccccaggaggaaaacaagtacaaaggttacggtggaggcataagtagaagagattgttaagaagggtattcatgtgtctttgctctttctgctttatgcctcagtttggtttaaaaacttctgtactggcaaatggtggtattcagtgtgggatagtgtcataactaatttgacaatttattaatcataaaataacaataaatctctagctttta

SEQ ID NO: 310036 - DNA, 3814 bp, Homo sapiens
gggatgactcggcgacgccgccaggcgcgttacccggcgtgctccgcgcggcgccggcgaagggacgtgggggaaggggcagggaggaggaagcggtggctgctgcggatgtcggtgtgagcgagcggcgcctgaacacacggcggctgccgagcgcctgacccgggcctgcgccagagcctgcaccgagctccggggccccacacccgctacggtggccctgcgcccgttgctactgaggcggcgtgctctgcattcttcgctgtccaggcctgccggctctggtgtctgctggctcctccttgctcgcctgctccctcctgcttgcctgagtcaccgccgccgccgccgccacagccatggccgagagtggtgaaagcggcggtcctccgggctcccaggatagcgccgccggagccgaaggtgctggcgcccccgcggccgctgcctccgcggagcccaaaatcatgaaagtcaccgtgaagaccccgaaggaaaaggaggaattcgccgtgcccgagaatagctccgtccagcagtttaaggaagaaatctctaaacgttttaaatcacatactgaccaacttgtgttgatatttgctggaaaaattttgaaagatcaagataccttgagtcagcatggaattcatgatggacttactgttcaccttgtcattaaaacacaaaacaggcctcaggatcattcagctcagcaaacaaatacagctggaagcaatgttactacatcatcaactcctaatagtaactctacatctggttctgctactagcaacccttttggtttaggtggccttgggggacttgcaggtctgagtagcttgggtttgaatactaccaacttctctgaactacagagtcagatgcagcgacaacttttgtctaaccctgaaatgatggtccagatcatggaaaatccctttgttcagagcatgctctcaaatcctgacctgatgagacagttaattatggccaatccacaaatgcagcagttgatacagagaaatccagaaattagtcatatgttgaataatccagatataatgagacaaacgttggaacttgccaggaatccagcaatgatgcaggagatgatgaggaaccaggaccgagctttgagcaacctagaaagcatcccagggggatataatgctttaaggcgcatgtacacagatattcaggaaccaatgctgagtgctgcacaagagcagtttggtggtaatccatttgcttccttggtgagcaatacatcctctggtgaaggtagtcaaccttcccgtacagaaaatagagatccactacccaatccatgggctccacagacttcccagagttcatcagcttccagcggcactgccagcactgtgggtggcactactggtagtactgccagtggcacttctgggcagagtactactgcgccaaatttggtgcctggagtaggagctagtatgttcaacacaccaggaatgcagagcttgttgcaacaaataactgaaaacccacaacttatgcaaaacatgttgtctgccccctacatgagaagcatgatgcagtcactaagccagaatcctgaccttgctgcacagatgatgctgaataatcccctatttgctggaaatcctcagcttcaagaacaaatgagacaacagctcccaactttcctccaacaaatgcagaatcctgatacactatcagcaatgtcaaaccctagagcaatgcaggccttgttacagattcagcagggtttacagacattagcaacggaagccccgggcctcatcccagggtttactcctggcttgggggcattaggaagcactggaggctcttcgggaactaatggatctaacgccacacctagtgaaaacacaagtcccacagcaggaaccactgaacctggacatcagcagtttattcagcagatgctgcaggctcttgctggagtaaatcctcagctacagaatccagaagtcagatttcagcaacaactggaacaactcagtgcaatgggatttttgaaccgtgaagcaaacttgcaagctctaatagcaacaggaggtgatatcaatgcagctattgaaaggttactgggctcccagccatcatagcagcatttctgtatcttgaaaaaatgtaatttatttttgataacggctcttaaactttaaaatacctgctttatttcattttgactcttggaattctgtgctgttataaacaaacccaatatgatgcattttaaggtggagtacagtaagatgtgtgggtttttctgtatttttcttttctggaacagtgggaattaaggctactgcatgcatcacttctgcatttattgtaattttttaaaaacatcaccttttatagttgggtgaccagattttgtcctgcatctgtccagtttatttgctttttaaacattagcctatggtagtaatttatgtagaataaaagcattaaaaagaagcaaatcatttgcactctataatttgtggtacagtattgcttattgtgactttggcatgcatttttgcaaacaatgctgtaagatttatactactgataattttgttttatttgtatacaatatagagtatgcacatttgggactgcatttctggaaacatactgcaataggctctctgagcaaaacacctgtaactaaaaaagtgaagataagaaaatactcttaaagctgagtatttcctaattgtatagaatcttacagcatctttgacaaacatctcccagcaaaagtgccggttagtcaggtttgttgaaaatacagtagaaaagctgattctggttatctctttaaggacaattaattgtacagacacataatgtaacattgtctcaacattcattcacagattgactgtaaattaccttaatctttgtgcagactgaaggaacactgtagtataccccaaagtgcatttgcctaggacttctcagcttctcccataggtagtttaacaggcattaaaatttgtaattgaaatgttgctttcactgaaaaagtgtcttgatgtttcagttatttttaatcgccataaaaaaatagaactatcttttgggtttatctgttttctcatgcacaggcaatacacaaatttaaaatgagttgtgagccaattgtttctgaagtgttttggtagttctattaagaaatagttaaatattgtgcttttcagagcctcagagaaagggggacggggtgggggggtggggcagcggaatctgtcctggatggggccagcttaaataatactggcaaccaagattctgttaggatttctgtgcatatagtgtagtaaagaagtatcattcaggggtgaaaaacaaagagccgttttaatgatgttgagtacatttggctgttttatagcctttttcttccctcccccaaagaattctgtttgcctaactcccaaactgttggggtggtacattcctttaggaccaataaaatcaagggaaatacaagttgattgcattacttctgtatgttgcttgctattaaaaaggttaagaggccaggttacccaccagtccttgcactgttctgacactttccccaggaggaaaacaagtacaaaggttacggtggaggcataagtagaagagattgttaagaagggtattcatgtgtctttgctctttctgctttatgcctcagtttggtttaaaaacttctgtactggcaaatggtggtattcagtgtgggatagtgtcataactaatttgacaatttattaatcataaaataacaataaatctctagctttta

SEQ ID NO: 310037 - DNA, 3415 bp, Homo sapiens
gggatgactcggcgacgccgccaggcgcgttacccggcgtgctccgcgcggcgccggcgaagggacgtgggggaaggggcagggaggaggaagcggtggctgctgcggatgtcggtgtgagcgagcggcgcctgaacacacggcggctgccgagcgcctgacccgggcctgcgccagagcctgcaccgagctccggggccccacacccgctacggtggccctgcgcccgttgctactgaggcggcgtgctctgcattcttcgctgtccaggcctgccggctctggtgtctgctggctcctccttgctcgcctgctccctcctgcttgcctgagtcaccgccgccgccgccgccacagccatggccgagagtggtgaaagcggcggtcctccgggctcccaggatagcgccgccggagccgaaggtgctggcgcccccgcggccgctgcctccgcggagcccaaaatcatgaaagtcaccgtgaagaccccgaaggaaaaggaggaattcgccgtgcccgagaatagctccgtccagcagacgttggaacttgccaggaatccagcaatgatgcaggagatgatgaggaaccaggaccgagctttgagcaacctagaaagcatcccagggggatataatgctttaaggcgcatgtacacagatattcaggaaccaatgctgagtgctgcacaagagcagtttggtggtaatccatttgcttccttggtgagcaatacatcctctggtgaaggtagtcaaccttcccgtacagaaaatagagatccactacccaatccatgggctccacagacttcccagagttcatcagcttccagcggcactgccagcactgtgggtggcactactggtagtactgccagtggcacttctgggcagagtactactgcgccaaatttggtgcctggagtaggagctagtatgttcaacacaccaggaatgcagagcttgttgcaacaaataactgaaaacccacaacttatgcaaaacatgttgtctgccccctacatgagaagcatgatgcagtcactaagccagaatcctgaccttgctgcacagatgatgctgaataatcccctatttgctggaaatcctcagcttcaagaacaaatgagacaacagctcccaactttcctccaacaaatgcagaatcctgatacactatcagcaatgtcaaaccctagagcaatgcaggccttgttacagattcagcagggtttacagacattagcaacggaagccccgggcctcatcccagggtttactcctggcttgggggcattaggaagcactggaggctcttcgggaactaatggatctaacgccacacctagtgaaaacacaagtcccacagcaggaaccactgaacctggacatcagcagtttattcagcagatgctgcaggctcttgctggagtaaatcctcagctacagaatccagaagtcagatttcagcaacaactggaacaactcagtgcaatgggatttttgaaccgtgaagcaaacttgcaagctctaatagcaacaggaggtgatatcaatgcagctattgaaaggttactgggctcccagccatcatagcagcatttctgtatcttgaaaaaatgtaatttatttttgataacggctcttaaactttaaaatacctgctttatttcattttgactcttggaattctgtgctgttataaacaaacccaatatgatgcattttaaggtggagtacagtaagatgtgtgggtttttctgtatttttcttttctggaacagtgggaattaaggctactgcatgcatcacttctgcatttattgtaattttttaaaaacatcaccttttatagttgggtgaccagattttgtcctgcatctgtccagtttatttgctttttaaacattagcctatggtagtaatttatgtagaataaaagcattaaaaagaagcaaatcatttgcactctataatttgtggtacagtattgcttattgtgactttggcatgcatttttgcaaacaatgctgtaagatttatactactgataattttgttttatttgtatacaatatagagtatgcacatttgggactgcatttctggaaacatactgcaataggctctctgagcaaaacacctgtaactaaaaaagtgaagataagaaaatactcttaaagctgagtatttcctaattgtatagaatcttacagcatctttgacaaacatctcccagcaaaagtgccggttagtcaggtttgttgaaaatacagtagaaaagctgattctggttatctctttaaggacaattaattgtacagacacataatgtaacattgtctcaacattcattcacagattgactgtaaattaccttaatctttgtgcagactgaaggaacactgtagtataccccaaagtgcatttgcctaggacttctcagcttctcccataggtagtttaacaggcattaaaatttgtaattgaaatgttgctttcactgaaaaagtgtcttgatgtttcagttatttttaatcgccataaaaaaatagaactatcttttgggtttatctgttttctcatgcacaggcaatacacaaatttaaaatgagttgtgagccaattgtttctgaagtgttttggtagttctattaagaaatagttaaatattgtgcttttcagagcctcagagaaagggggacggggtgggggggtggggcagcggaatctgtcctggatggggccagcttaaataatactggcaaccaagattctgttaggatttctgtgcatatagtgtagtaaagaagtatcattcaggggtgaaaaacaaagagccgttttaatgatgttgagtacatttggctgttttatagcctttttcttccctcccccaaagaattctgtttgcctaactcccaaactgttggggtggtacattcctttaggaccaattaaaacataattgagggtcagtgatacatttggctgactctggttcagtattctcttaggtgattatattctctcatgtacagttacaggaaattaaaatgttaaagtaacctaaaatgaattcagaccaataaaatcaagggaaatacaagttgattgcattacttctgtatgttgcttgctattaaaaaggttaagaggccaggttacccaccagtccttgcactgttctgacactttccccaggaggaaaacaagtacaaaggttacggtggaggcataagtagaagagattgttaagaagggtattcatgtgtctttgctctttctgctttatgcctcagtttggtttaaaaacttctgtactggcaaatggtggtattcagtgtgggatagtgtcataactaatttgacaatttattaatcataaaataacaataaatctctagctttta

SEQ ID NO: 310038 - DNA, 2972 bp, Homo sapiens
  misc_feature (2524)..(2524): n is a, c, g, or t
  misc_feature (2534)..(2535): n is a, c, g, or t
  misc_feature (2537)..(2537): n is a, c, g, or t
  misc_feature (2541)..(2541): n is a, c, g, or t
  misc_feature (2545)..(2547): n is a, c, g, or t
  misc_feature (2552)..(2552): n is a, c, g, or t
  misc_feature (2560)..(2561): n is a, c, g, or t
  misc_feature (2566)..(2566): n is a, c, g, or t
  misc_feature (2571)..(2571): n is a, c, g, or t
gggatgactcggcgacgccgccaggcgcgttacccggcgtgctccgcgcggcgccggcgaagggacgtgggggaaggggcagggaggaggaagcggtggctgctgcggatgtcggtgtgagcgagcggcgcctgaacacacggcggctgccgagcgcctgacccgggcctgcgccagagcctgcaccgagctccggggccccacacccgctacggtggccctgcgcccgttgctactgaggcggcgtgctctgcattcttcgctgtccaggcctgccggctctggtgtctgctggctcctccttgctcgcctgctccctcctgcttgcctgagtcaccgccgccgccgccgccacagccatggccgagagtggtgaaagcggcggtcctccgggctcccaggatagcgccgccggagccgaaggtgctggcgcccccgcggccgctgcctccgcggagcccaaaatcatgaaagtcaccgtgaagaccccgaaggaaaaggaggaattcgccgtgcccgagaatagctccgtccagcagtttaaggaagaaatctctaaacgttttaaatcacatactgaccaacttgtgttgatatttgctggaaaaattttgaaagatcaagataccttgagtcagcatggaattcatgatggacttactgttcaccttgtcattaaaacacaaaacaggcctcaggatcattcagctcagcaaacaaatacagctggaagcaatgttactacatcatcaactcctaatagtaactctacatctggttctgctactagcaacccttttggtttaggtggccttgggggacttgcaggtctgagtagcttgggtttgaatactaccaacttctctgaactacagagtcagatgcagcgacaacttttgtctaaccctgaaatgatggtccagatcatggaaaatccctttgttcagagcatgctctcaaatcctgacctgatgagacagttaattatggccaatccacaaatgcagcagttgatacagagaaatccagaaattagtcatatgttgaataatccagatataatgagacaaacgttggaacttgccaggaatccagcaatgatgcaggagatgatgaggaaccaggaccgagctttgagcaacctagaaagcatcccagggggatataatgctttaaggcgcatgtacacagatattcaggaaccaatgctgagtgctgcacaagagcagtttggtggtaatccatttgcttccttggtgagcaatacatcctctggtgaaggtagtcaaccttcccgtacagaaaatagagatccactacccaatccatgggctccacagacttcccagagttcatcagcttccagcggcactgccagcactgtgggtggcactactggtagtactgccagtggcacttctgggcagagtactactgcgccaaatttggtgcctggagtaggagctagtatgttcaacacaccaggaatgcagagcttgttgcaacaaataactgaaaacccacaacttatgcaaaacatgttgtctgccccctacatgagaagcatgatgcagtcactaagccagaatcctgaccttgctgcacagatgatgctgaataatcccctatttgctggaaatcctcagcttcaagaacaaatgagacaacagctcccaactttcctccaacaaatgcagaatcctgatacactatcagcaatgtcaaaccctagagcaatgcaggccttgttacagattcagcagggtttacagacattagcaacggaagccccgggcctcatcccagggtttactcctggcttgggggcattaggaagcactggaggctcttcgggaactaatggatctaacgccacacctagtgaaaacacaagtcccacagcaggaaccactgaacctggacatcagcagtttattcagcagatgctgcaggctcttgctggagtaaatcctcagctacagaatccagaagtcagatttcagcaacaactggaacaactcagtgcaatgggatttttgaaccgtgaagcaaacttgcaagctctaatagcaacaggaggtgatatcaatgcagctattgaaaggttactgggctcccagccatcatagcagcatttctgtatcttgaaaaaatgtaatttatttttgataacggctcttaaactttaaaatacctgctttatttcattttgactcttggaattctgtgctgttataaacaaacccaatatgatgcattttaaggtggagtacagtaagatgtgtgggtttttctgtatttttcttttctggaacagtgggaattaaggctactgcatgcatcacttctgcatttattgtaattttttaaaaacatcaccttttatagttgggtgaccagattttgtcctgcatctgtccagtttatttgctttttaaacattagcctatggtagtaatttatgtagaataaaagcattaaaaagaagcaaatcatttgcactctataaaaaaaaaaaaaaaanaaaaaaaaannanaaanaaannnaaaanaaaaaaannaaaanaaaanaaaaagccaacaaaacaacaaaagcacagacacagacaataaaaacgtcaccgccacaccaaaaacaccaccaccaataaaatcaagggaaatacaagttgattgcattacttctgtatgttgcttgctattaaaaaggttaagaggccaggttacccaccagtccttgcactgttctgacactttccccaggaggaaaacaagtacaaaggttacggtggaggcataagtagaagagattgttaagaagggtattcatgtgtctttgctctttctgctttatgcctcagtttggtttaaaaacttctgtactggcaaatggtggtattcagtgtgggatagtgtcataactaatttgacaatttattaatcataaaataacaataaatctctagctttta

SEQ ID NO: 310039 - DNA, 2712 bp, Homo sapiens
gtttattctgccagtgtagtagaaaatatatcttcatgaatgccagttactcccatttttctttcaatggcatatattcacgtttgttcaaggaaaagcctaagaaaatgattgcttttattttttaggatattgcatgtcattatcataaccaccattctcattgagagagaatatgcctcatttttttgtttttgttcttctggagatccctcttgtggacagtatcttcccttttcctttttttatttatgttctaccttcctcccttttaagtgccagctgaggcacttgggggaagatagaataaaacaaggtacattacttgtttcagatatttccagttaaaattgtttgaacacttgccccatagatgatgctgaataatcccctatttgctggaaatcctcagcttcaagaacaaatgagacaacagctcccaactttcctccaacaaatgcagaatcctgatacactatcagcaatgtcaaaccctagagcaatgcaggccttgttacagattcagcagggtttacagacattagcaacggaagccccgggcctcatcccagggtttactcctggcttgggggcattaggaagcactggaggctcttcgggaactaatggatctaacgccacacctagtgaaaacacaagtcccacagcaggaaccactgaacctggacatcagcagtttattcagcagatgctgcaggctcttgctggagtaaatcctcagctacagaatccagaagtcagatttcagcaacaactggaacaactcagtgcaatgggatttttgaaccgtgaagcaaacttgcaagctctaatagcaacaggaggtgatatcaatgcagctattgaaaggttactgggctcccagccatcatagcagcatttctgtatcttgaaaaaatgtaatttatttttgataacggctcttaaactttaaaatacctgctttatttcattttgactcttggaattctgtgctgttataaacaaacccaatatgatgcattttaaggtggagtacagtaagatgtgtgggtttttctgtatttttcttttctggaacagtgggaattaaggctactgcatgcatcacttctgcatttattgtaattttttaaaaacatcaccttttatagttgggtgaccagattttgtcctgcatctgtccagtttatttgctttttaaacattagcctatggtagtaatttatgtagaataaaagcattaaaaagaagcaaatcatttgcactctataatttgtggtacagtattgcttattgtgactttggcatgcatttttgcaaacaatgctgtaagatttatactactgataattttgttttatttgtatacaatatagagtatgcacatttgggactgcatttctggaaacatactgcaataggctctctgagcaaaacacctgtaactaaaaaagtgaagataagaaaatactcttaaagctgagtatttcctaattgtatagaatcttacagcatctttgacaaacatctcccagcaaaagtgccggttagtcaggtttgttgaaaatacagtagaaaagctgattctggttatctctttaaggacaattaattgtacagacacataatgtaacattgtctcaacattcattcacagattgactgtaaattaccttaatctttgtgcagactgaaggaacactgtagtataccccaaagtgcatttgcctaggacttctcagcttctcccataggtagtttaacaggcattaaaatttgtaattgaaatgttgctttcactgaaaaagtgtcttgatgtttcagttatttttaatcgccataaaaaaatagaactatcttttgggtttatctgttttctcatgcacaggcaatacacaaatttaaaatgagttgtgagccaattgtttctgaagtgttttggtagttctattaagaaatagttaaatattgtgcttttcagagcctcagagaaagggggacggggtgggggggtggggcagcggaatctgtcctggatggggccagcttaaataatactggcaaccaagattctgttaggatttctgtgcatatagtgtagtaaagaagtatcattcaggggtgaaaaacaaagagccgttttaatgatgttgagtacatttggctgttttatagcctttttcttccctcccccaaagaattctgtttgcctaactcccaaactgttggggtggtacattcctttaggaccaattaaaacataattgagggtcagtgatacatttggctgactctggttcagtattctcttaggtgattatattctctcatgtacagttacaggaaattaaaatgttaaagtaacctaaaatgaattcagaccaataaaatcaagggaaatacaagttgattgcattacttctgtatgttgcttgctattaaaaaggttaagaggccaggttacccaccagtccttgcactgttctgacactttccccaggaggaaaacaagtacaaaggttacggtggaggcataagtagaagagattgttaagaagggtattcatgtgtctttgctctttctgctttatgcctcagtttggtttaaaaacttctgtactggcaaatggtggtattcagtgtgggatagtgtcataactaatttgacaatttattaatcataaaataacaataaatctctagctttta

SEQ ID NO: 310040 - DNA, 2181 bp, Homo sapiens
tttgcaggaccttaggatatttcctatttgtgctttctgtaggtttactcctggcttgggggcattaggaagcactggaggctcttcgggaactaatggatctaacgccacacctagtgaaaacacaagtcccacagcaggaaccactgaacctggacatcagcagtttattcagcagatgctgcaggctcttgctggagtaaatcctcagctacagaatccagaagtcagatttcagcaacaactggaacaactcagtgcaatgggatttttgaaccgtgaagcaaacttgcaagctctaatagcaacaggaggtgatatcaatgcagctattgaaaggttactgggctcccagccatcatagcagcatttctgtatcttgaaaaaatgtaatttatttttgataacggctcttaaactttaaaatacctgctttatttcattttgactcttggaattctgtgctgttataaacaaacccaatatgatgcattttaaggtggagtacagtaagatgtgtgggtttttctgtatttttcttttctggaacagtgggaattaaggctactgcatgcatcacttctgcatttattgtaattttttaaaaacatcaccttttatagttgggtgaccagattttgtcctgcatctgtccagtttatttgctttttaaacattagcctatggtagtaatttatgtagaataaaagcattaaaaagaagcaaatcatttgcactctataatttgtggtacagtattgcttattgtgactttggcatgcatttttgcaaacaatgctgtaagatttatactactgataattttgttttatttgtatacaatatagagtatgcacatttgggactgcatttctggaaacatactgcaataggctctctgagcaaaacacctgtaactaaaaaagtgaagataagaaaatactcttaaagctgagtatttcctaattgtatagaatcttacagcatctttgacaaacatctcccagcaaaagtgccggttagtcaggtttgttgaaaatacagtagaaaagctgattctggttatctctttaaggacaattaattgtacagacacataatgtaacattgtctcaacattcattcacagattgactgtaaattaccttaatctttgtgcagactgaaggaacactgtagtataccccaaagtgcatttgcctaggacttctcagcttctcccataggtagtttaacaggcattaaaatttgtaattgaaatgttgctttcactgaaaaagtgtcttgatgtttcagttatttttaatcgccataaaaaaatagaactatcttttgggtttatctgttttctcatgcacaggcaatacacaaatttaaaatgagttgtgagccaattgtttctgaagtgttttggtagttctattaagaaatagttaaatattgtgcttttcagagcctcagagaaagggggacggggtgggggggtggggcagcggaatctgtcctggatggggccagcttaaataatactggcaaccaagattctgttaggatttctgtgcatatagtgtagtaaagaagtatcattcaggggtgaaaaacaaagagccgttttaatgatgttgagtacatttggctgttttatagcctttttcttccctcccccaaagaattctgtttgcctaactcccaaactgttggggtggtacattcctttaggaccaattaaaacataattgagggtcagtgatacatttggctgactctggttcagtattctcttaggtgattatattctctcatgtacagttacaggaaattaaaatgttaaagtaacctaaaatgaattcagaccaataaaatcaagggaaatacaagttgattgcattacttctgtatgttgcttgctattaaaaaggttaagaggccaggttacccaccagtccttgcactgttctgacactttccccaggaggaaaacaagtacaaaggttacggtggaggcataagtagaagagattgttaagaagggtattcatgtgtctttgctctttctgctttatgcctcagtttggtttaaaaacttctgtactggcaaatggtggtattcagtgtgggatagtgtcataactaatttgacaatttattaatcataaaataacaataaatctctagctttta

SEQ ID NO: 310041 - DNA, 2292 bp, Homo sapiens
gggatgactcggcgacgccgccaggcgcgttacccggcgtgctccgcgcggcgccggcgaagggacgtgggggaaggggcagggaggaggaagcggtggctgctgcggatgtcggtgtgagcgagcggcgcctgaacacacggcggctgccgagcgcctgacccgggcctgcgccagagcctgcaccgagctccggggccccacacccgctacggtggccctgcgcccgttgctactgaggcggcgtgctctgcattcttcgctgtccaggcctgccggctctggtgtctgctggctcctccttgctcgcctgctccctcctgcttgcctgagtcaccgccgccgccgccgccacagccatggccgagagtggtgaaagcggcggtcctccgggctcccaggatagcgccgccggagccgaaggtgctggcgcccccgcggccgctgcctccgcggagcccaaaatcatgaaagtcaccgtgaagaccccgaaggaaaaggaggaattcgccgtgcccgagaatagctccgtccagcagtttaaggaagaaatctctaaacgttttaaatcacatactgaccaacttgtgttgatatttgctggaaaaattttgaaagatcaagataccttgagtcagcatggaattcatgatggacttactgttcaccttgtcattaaaacacaaaacaggcctcaggatcattcagctcagcaaacaaatacagctggaagcaatgttactacatcatcaactcctaatagtaactctacatctggttctgctactagcaacccttttggtttaggtggccttgggggacttgcaggtctgagtagcttgggtttgaatactaccaacttctctgaactacagagtcagatgcagcgacaacttttgtctaaccctgaaatgatggtccagatcatggaaaatccctttgttcagagcatgctctcaaatcctgacctgatgagacagttaattatggccaatccacaaatgcagcagttgatacagagaaatccagaaattagtcatatgttgaataatccagatataatgagacaaacgttggaacttgccaggaatccagcaatgatgcaggagatgatgaggaaccaggaccgagctttgagcaacctagaaagcatcccagggggatataatgctttaaggcgcatgtacacagatattcaggaaccaatgctgagtgctgcacaagagcagtttggtggtaatccatttgcttccttggtgagcaatacatcctctggtgaaggtagtcaaccttcccgtacagaaaatagagatccactacccaatccatgggctccacagacttcccagagttcatcagcttccagcggcactgccagcactgtgggtggcactactggtagtactgccagtggcacttctgggcagagtactactgcgccaaatttggtgcctggagtaggagctagtatgttcaacacaccaggaatgcagagcttgttgcaacaaataactgaaaacccacaacttatgcaaaacatgttgtctgccccctacatgagaagcatgatgcagtcactaagccagaatcctgaccttgctgcacagatgatgctgaataatcccctatttgctggaaatcctcagcttcaagaacaaatgagacaacagctcccaactttcctccaacaaatgcagaatcctgatacactatcagcaatgtcaaaccctagagcaatgcaggccttgttacagattcagcagggtttacagacattagcaacggaagccccgggcctcatcccagggtttactcctggcttgggggcattaggaagcactggaggctcttcgggaactaatggatctaacgccacacctagtgaaaacacaagtcccacagcaggaaccactgaacctggacatcagcagtttattcagcagatgctgcaggctcttgctggagtaaatcctcagctacagaatccagaagtcagatttcagcaacaactggaacaactcagtgcaatgggatttttgaaccgtgaagcaaacttgcaagctctaatagcaacaggaggtgatatcaatgcagctattgaaaggttactgggctcccagccatcatagcagcatttctctagtatgttcaacacaccaggaatgcagagcttgttgcaacaaataactgaaaacccacaacttatgcaaaacatgttgtctgccccctacatgagaagcatgatgcagtcactaagccagaatcctgaccttgctgcacagattatgctga

SEQ ID NO: 310042 - DNA, 1247 bp, Homo sapiens
gggatgactcggcgacgccgccaggcgcgttacccggcgtgctccgcgcggcgccggcgaagggacgtgggggaaggggcagggaggaggaagcggtggctgctgcggatgtcggtgtgagcgagcggcgcctgaacacacggcggctgccgagcgcctgacccgggcctgcgccagagcctgcaccgagctccggggccccacacccgctacggtggccctgcgcccgttgctactgaggcggcgtgctctgcattcttcgctgtccaggcctgccggctctggtgtctgctggctcctccttgctcgcctgctccctcctgcttgcctgagtcaccgccgccgccgccgccacagccatggccgagagtggtgaaagcggcggtcctccgggctcccaggatagcgccgccggagccgaaggtgctggcgcccccgcggccgctgcctccgcggagcccaaaatcatgaaagtcaccgtgaagaccccgaaggaaaaggaggaattcgccgtgcccgagaatagctccgtccagcagtttaaggaagaaatctctaaacgttttaaatcacatactgaccaacttgtgttgatatttgctggaaaaattttgaaagatcaagataccttgagtcagcatggaattcatgatggacttactgttcaccttgtcattaaaacacaaaacaggcctcaggatcattcagctcagcaaacaaatacagctggaagcaatgttactacatcatcaatcccaaactgttggggtggtacattcctttaggaccaattaaaacataattgagggtcagtgatacatttggctgactctggttcagtattctcttaggtgattatattctctcatgtacagttacaggaaattaaaatgttaaagtaacctaaaatgaattcagaccaataaaatcaagggaaatacaagttgattgcattacttctgtatgttgcttgctattaaaaaggttaagaggccaggttacccaccagtccttgcactgttctgacactttccccaggaggaaaacaagtacaaaggttacggtggaggcataagtagaagagattgttaagaagggtattcatgtgtctttgctctttctgctttatgcctcagtttggtttaaaaacttctgtactggcaaatggtggtattcagtgtgggatagtgtcataactaatttgacaatttattaatcataaaataacaataaatctctagctttta

SEQ ID NO: 310043 - DNA, 1868 bp, Homo sapiens
gggatgactcggcgacgccgccaggcgcgttacccggcgtgctccgcgcggcgccggcgaagggacgtgggggaaggggcagggaggaggaagcggtggctgctgcggatgtcggtgtgagcgagcggcgcctgaacacacggcggctgccgagcgcctgacccgggcctgcgccagagcctgcaccgagctccggggccccacacccgctacggtggccctgcgcccgttgctactgaggcggcgtgctctgcattcttcgctgtccaggcctgccggctctggtgtctgctggctcctccttgctcgcctgctccctcctgcttgcctgagtcaccgccgccgccgccgccacagccatggccgagagtggtgaaagcggcggtcctccgggctcccaggatagcgccgccggagccgaaggtgctggcgcccccgcggccgctgcctccgcggagcccaaaatcatgaaagtcaccgtgaagaccccgaaggaaaaggaggaattcgccgtgcccgagaatagctccgtccagcagtttaaggaagaaatctctaaacgttttaaatcacatactgaccaacttgtgttgatatttgctggaaaaattttgaaagatcaagataccttgagtcagcatggaattcatgatggacttactgttcaccttgtcattaaaacacaaaacaggcctcaggatcattcagctcagcaaacaaatacagctggaagcaatgttactacatcatcaactcctaatagtaactctacatctggttctgctactagcaacccttttggtttaggtggccttgggggacttgcaggtctgagtagcttgggtttgaatactaccaacttctctgaactacagagtcagatgcagcgacaacttttgtctaaccctgaaatgatggtccagatcatggaaaatccctttgttcagagcatgctctcaaatcctgacctgatgagacagttaattatggccaatccacaaatgcagcagttgatacagagaaatccagaaattagtcatatgttgaataatccagatataatgagacaaacgttggaacttgccaggaatccagcaatgatgcaggagatgatgaggaaccaggaccgagctttgagcaacctagaaagcatcccagggggatataatgctttaaggcgcatgtacacagatattcaggaaccaatgctgagtgctgcacaagagcagtttggtggtaatccatttgcttccttggtgagcaatacatcctctggtgaaggtagtcaaccttcccgtacagaaaatagagatccactacccaatccatgggctccacagacttcccagagttcatcagcttccagcggcactgccagcactgtgggtggcactactggtagtactgccagtggcacttctgggcagagtactactgcgccaaatttggtgcctggagtaggagctagtatgttcaacacaccaggaatgcagagcttgttgcaacaaataactgaaaacccacaacttatgcaaaacatgttgtctgccccctacatgagaagcatgatgcagtcactaagccagaatcctgaccttgctgcacagatgatgctgaataatcccctatttgctggaaatcctcagcttcaagaacaaatgagacaacagctcccaactttcctccaacaaatgcagaatcctgatacactatcagcaatgtcaaaccctagagcaatgcaggccttgttacagattcagcagggtttacagacattagcaacggaagccccgggcctcatcccaggtgtactcctggctgggggcattaggaagattgctaggggtaaggaagctactagggtaagg

SEQ ID NO: 310044 - DNA, 1135 bp, Homo sapiens
  misc_feature (1133)..(1133): n is a, c, g, or t
gggatgactcggcgacgccgccaggcgcgttacccggcgtgctccgcgcggcgccggcgaagggacgtgggggaaggggcagggaggaggaagcggtggctgctgcggatgtcggtgtgagcgagcggcgcctgaacacacggcggctgccgagcgcctgacccgggcctgcgccagagcctgcaccgagctccggggccccacacccgctacggtggccctgcgcccgttgctactgaggcggcgtgctctgcattcttcgctgtccaggcctgccggctctggtgtctgctggctcctccttgctcgcctgctccctcctgcttgcctgagtcaccgccgccgccgccgccacagccatggccgagagtggtgaaagcggcggtcctccgggctcccaggatagcgccgccggagccgaaggtgctggcgcccccgcggccgctgcctccgcggagcccaaaatcatgaaagtcaccgtgaagaccccgaaggaaaaggaggaattcgccgtgcccgagaatagctccgtccagcagtttaaggaagaaatctctaaacgttttaaatcacatactgaccaacttgtgttgatatttgctggaaaaattttgaaagatcaagataccttgagtcagcatggaattcatgatggacttactgttcaccttgtcattaaaacacaaaacaggcctcaggatcattcagctcagcaaacaaatacagctggaagcaatgttactacatcatcaactcctaatagtaactctacatctggttctgctactagcaacccttttggtttaggtggccttgggggacttgcaggtctgagtagcttgggtttgaatactaccaacttctctgaactacagagtcagatgcagcgacaacttttgtctaaccctgaaatgatggtccagatcatggaaaatccctttgttcagagcatgctctcaaatcctgacctgatgagacagttaattatggccaatccacaaatgcagcagttgatacagagaaatccagaaattagtcatatgttgaataatccagatataatgagacaaacaacgttttggaactttgcccagaatcccaccaatgatgccgaaaatgaagaaaggaacccnga

SEQ ID NO: 310045 - DNA, 2515 bp, Homo sapiens
tcggacgagagcgccccggggagctcggagcgcgtgcacgcgtggcagacggagaaggccagtgcccaggttagtgagcagtgcccggcgcccgcttccctcacctccttttccagcctttgcacagcttgaaggttctgtcaccttttgcagtggtccaaatgagaaaaaagtggaaaatgggaggcatgaaatacatcttttcgttgttgttctttcttttgctagaaggaggcaaaacagagcaagtaaaacattcagagacatattgcatgtttcaagacaagaagtacagagtgggtgagagatggcatccttacctggaaccttatgggttggtttactgcgtgaactgcatctgctcagagaatgggaatgtgctttgcagccgagtcagatgtccaaatgttcattgcctttctcctgtgcatattcctcatctgtgctgccctcgctgcccagaagactccttacccccagtgaacaataaggtgaccagcaagtcttgcgagtacaatgggacaacttaccaacatggagagctgttcgtagctgaagggctctttcagaatcggcaacccaatcaatgcacccagtgcagctgttcggagggaaacgtgtattgtggtctcaagacttgccccaaattaacctgtgccttcccagtctctgttccagattcctgctgccgggtatgcagaggagatggagaactgtcatgggaacattctgatggtgatatcttccggcaacctgccaacagagaagcaagacattcttaccaccgctctcactatgatcctccaccaagccgacaggctggaggtctgtcccgctttcctggggccagaagtcaccggggagctcttatggattcccagcaagcatcaggaaccattgtgcaaattgtcatcaataacaaacacaagcatggacaagtgtgtgtttccaatggaaagacctattctcatggcgagtcctggcacccaaacctccgggcatttggcattgtggagtgtgtgctatgtacttgtaatgtcaccaagcaagagtgtaagaaaatccactgccccaatcgatacccctgcaagtatcctcaaaaaatagacggaaaatgctgcaaggtgtgtccaggtaaaaaagcaaaagaagaacttccaggccaaagctttgacaataaaggctacttctgcggggaagaaacgatgcctgtgtatgagtctgtattcatggaggatggggagacaaccagaaaaatagcactggagactgagagaccacctcaggtagaggtccacgtttggactattcgaaagggcattctccagcacttccatattgagaagatctccaagaggatgtttgaggagcttcctcacttcaagctggtgaccagaacaaccctgagccagtggaagatcttcaccgaaggagaagctcagatcagccagatgtgttcaagtcgtgtatgcagaacagagcttgaagatttagtcaaggttttgtacctggagagatctgaaaagggccactgttaggcaagacagacagtattggatagggtaaagcaagaaaactcaagctgcagctggactgcaggcttattttgcttaagtcaacagtgccctaaaactccaaactcaaatgcagtcaattattcacgccatgcacagcataatttgctcctttgtgtggagtggtgtgtcagcccttgaacatctcctccaaagagactagaagagtcttaaattatatgtgggaggaggagggatagaacatcacaacactgctctagtttcttggagaatcacatttctttacaggttaaagacaaacaagaccccagggtttttatctagaaagttattcaagtgaaagaaagagaagggaattgcttagtaggagttctgcagtatagaacaattacttgtatgaaattatacctttgaattttagaatgtcatgtgttcttttaaaaaaattagctccccatcctccctcctcactccctccctccctccttctctctctctctctctctccctctctcacagacacacacacacacacacacacacgcacacgcacgtccacactcacattaaactaaagctttatttgaagcaaagctagccaaaattctacgttacttttcccttgactggatcccaagtagcttggaagtttttgtgcccaggagagtaaataactgtgaacaagaggctctgcccttaggtctttgtggctgtttaagtcaccaacaatagagtcagggtaaagaataaaaacactttcatagcctcattcattcacttagaagtggtaataatttttccctaatgataccacttttcttttccccctgtacctatgggacttccagaaagaagttaaattgagtaaaatcatcagaaactgaatccatgtaagaaaaaataattgttgaagaaagaagttgatagaattcaaaaaggccatctttttgctttcacatcaataaaatttaccaagtaat

SEQ ID NO: 310046 - DNA, 3845 bp, Homo sapiens
tcggacgagagcgccccggggagctcggagcgcgtgcacgcgtggcagacggagaaggccagtgcccagcttgaaggttctgtcaccttttgcagtggtccaaatgagaaaaaagtggaaaatgggaggcatgaaatacatcttttcgttgttgttctttcttttgctagaaggaggcaaaacagagcaagtaaaacattcagagacatattgcatgtttcaagacaagaagtacagagtgggtgagagatggcatccttacctggaaccttatgggttggtttactgcgtgaactgcatctgctcagagaatgggaatgtgctttgcagccgagtcagatgtccaaatgttcattgcctttctcctgtgcatattcctcatctgtgctgccctcgctgcccagaagactccttacccccagtgaacaataaggtgaccagcaagtcttgcgagtacaatgggacaacttaccaacatggagagctgttcgtagctgaagggctctttcagaatcggcaacccaatcaatgcacccagtgcagctgttcggagggaaacgtgtattgtggtctcaagacttgccccaaattaacctgtgccttcccagtctctgttccagattcctgctgccgggtatgcagaggagatggagaactgtcatgggaacattctgatggtgatatcttccggcaacctgccaacagagaagcaagacattcttaccaccgctctcactatgatcctccaccaagccgacaggctggaggtctgtcccgctttcctggggccagaagtcaccggggagctcttatggattcccagcaagcatcaggaaccattgtgcaaattgtcatcaataacaaacacaagcatggacaagtgtgtgtttccaatggaaagacctattctcatggcgagtcctggcacccaaacctccgggcatttggcattgtggagtgtgtgctatgtacttgtaatgtcaccaagcaagagtgtaagaaaatccactgccccaatcgatacccctgcaagtatcctcaaaaaatagacggaaaatgctgcaaggtgtgtccaggtaaaaaagcaaaagaagaacttccaggccaaagctttgacaataaaggctacttctgcggggaagaaacgatgcctgtgtatgagtctgtattcatggaggatggggagacaaccagaaaaatagcactggagactgagagaccacctcaggtagaggtccacgtttggactattcgaaagggcattctccagcacttccatattgagaagatctccaagaggatgtttgaggagcttcctcacttcaagctggtgaccagaacaaccctgagccagtggaagatcttcaccgaaggagaagctcagatcagccagatgtgttcaagtcgtgtatgcagaacagagcttgaagatttagtcaaggttttgtacctggagagatctgaaaagggccactgttaggcaagacagacagtattggatagggtaaagcaagaaaactcaagctgcagctggactgcaggcttattttgcttaagtcaacagtgccctaaaactccaaactcaaatgcagtcaattattcacgccatgcacagcataatttgctcctttgtgtggagtggtgtgtcagcccttgaacatctcctccaaagagactagaagagtcttaaattatatgtgggaggaggagggatagaacatcacaacactgctctagtttcttggagaatcacatttctttacaggttaaagacaaacaagaccccagggtttttatctagaaagttattcaagtgaaagaaagagaagggaattgcttagtaggagttctgcagtatagaacaattacttgtatgaaattatacctttgaattttagaatgtcatgtgttcttttaaaaaaattagctccccatcctccctcctcactccctccctccctccttctctctctctctctctctccctctctcacagacacacacacacacacacacacacgcacacgcacgtccacactcacattaaactaaagctttatttgaagcaaagctagccaaaattctacgttacttttcccttgactggatcccaagtagcttggaagtttttgtgcccaggagagtaaataactgtgaacaagaggctctgcccttaggtctttgtggctgtttaagtcaccaacaatagagtcagggtaaagaataaaaacactttcatagcctcattcattcacttagaagtggtaataatttttccctaatgataccacttttcttttccccctgtacctatgggacttccagaaagaagttaaattgagtaaaatcatcagaaactgaatccatgtaagaaaaaataattgttgaagaaagaagttgatagaattcaaaaaggccatctttttgctttcacatcaataaaatttaccaagtaatagatcagtactcactaatatttttgagaccatagttgtctggtcagaaaaattatattaaattagtaaattctagaagctctttaaaagggaagttttccttcttctccaattataggagttgatttttactttgcaaagtggctcggtcctcatgagcatctgcatgttgactcttcagttaagaaaattgttgttcatttagggaggtggatattctgatgaagatctttatcctaaaccttcctactatccttgtcttattcatcaagcagatattttagtcaagaattccagagaaggctgctcctaaaatgtctacttgcagcccaataccagagcataaactatccattctggggtctggctttagaaatcatctttgtgggaagacctaattcttcacagcaaggatctcaggcatgccttctagatttgttccctctgaggggcaggaatgaactgtagaaatgttttaaggacccagaaaccccatatgtctcattccatgactataggtgagagaattctttcctaagagggtttgataccaataggggaaaatgtaaaatgttcagtctttatgacaacctggcataaaggagtcaattcttatgaaagagacacaagggccttatggccagggtttcttgggacaagactctcaccagcacatcacacacgttctccttggaagagagaagcagtacatcccggttgagaggtcacaaagcattagtttgtgtgtgtgtgtgtgtgtgtgtgtgtgtgtgtgtgtgtgtgtgtggtaaaggggggaaggtgttatgcggctgctccctccgtcccagaggtggcagtgattccataatgtggagactagtaactagatcctaaggcaaagaggtgtttctccttctggatgattcatcccaaagccttcccacccaggtgttctctgaaagcttagccttaagagaacacgcagagagtttccctagatatactcctgcctccaggtgctgggacacacctttgcaaaatgctgtgggaagcaggagctggggagctgtgttaagtcaaagtagaaaccctccagtgtttggtgttgtgtagagaataggacatagggtaaagaggccaagctgcctgtagttagtagagaagaatggatgtggttcttcttgtgtatttatttgtatcataaacacttggaacaacaaagaccataagcatcatttagcagttgtagccattttctagttaactcatgtaaacaagtaagagtaacataacagtattaccctttcactgttctcacaggacatgtacctaattatggtacttatttatgtagtcactgtatttctggatttttaaattaataaaaaagttaattttgaaaaatca

SEQ ID NO: 310047 - DNA, 3903 bp, Homo sapiens
tcggacgagagcgccccggggagctcggagcgcgtgcacgcgtggcagacggagaaggccagtgcccaggttagtgagcagtgcccggcgcccgcttccctcacctccttttccagcctttgcacagcttgaaggttctgtcaccttttgcagtggtccaaatgagaaaaaagtggaaaatgggaggcatgaaatacatcttttcgttgttgttctttcttttgctagaaggaggcaaaacagagcaagtaaaacattcagagacatattgcatgtttcaagacaagaagtacagagtgggtgagagatggcatccttacctggaaccttatgggttggtttactgcgtgaactgcatctgctcagagaatgggaatgtgctttgcagccgagtcagatgtccaaatgttcattgcctttctcctgtgcatattcctcatctgtgctgccctcgctgcccagaagactccttacccccagtgaacaataaggtgaccagcaagtcttgcgagtacaatgggacaacttaccaacatggagagctgttcgtagctgaagggctctttcagaatcggcaacccaatcaatgcacccagtgcagctgttcggagggaaacgtgtattgtggtctcaagacttgccccaaattaacctgtgccttcccagtctctgttccagattcctgctgccgggtatgcagaggagatggagaactgtcatgggaacattctgatggtgatatcttccggcaacctgccaacagagaagcaagacattcttaccaccgctctcactatgatcctccaccaagccgacaggctggaggtctgtcccgctttcctggggccagaagtcaccggggagctcttatggattcccagcaagcatcaggaaccattgtgcaaattgtcatcaataacaaacacaagcatggacaagtgtgtgtttccaatggaaagacctattctcatggcgagtcctggcacccaaacctccgggcatttggcattgtggagtgtgtgctatgtacttgtaatgtcaccaagcaagagtgtaagaaaatccactgccccaatcgatacccctgcaagtatcctcaaaaaatagacggaaaatgctgcaaggtgtgtccaggtaaaaaagcaaaagaagaacttccaggccaaagctttgacaataaaggctacttctgcggggaagaaacgatgcctgtgtatgagtctgtattcatggaggatggggagacaaccagaaaaatagcactggagactgagagaccacctcaggtagaggtccacgtttggactattcgaaagggcattctccagcacttccatattgagaagatctccaagaggatgtttgaggagcttcctcacttcaagctggtgaccagaacaaccctgagccagtggaagatcttcaccgaaggagaagctcagatcagccagatgtgttcaagtcgtgtatgcagaacagagcttgaagatttagtcaaggttttgtacctggagagatctgaaaagggccactgttaggcaagacagacagtattggatagggtaaagcaagaaaactcaagctgcagctggactgcaggcttattttgcttaagtcaacagtgccctaaaactccaaactcaaatgcagtcaattattcacgccatgcacagcataatttgctcctttgtgtggagtggtgtgtcagcccttgaacatctcctccaaagagactagaagagtcttaaattatatgtgggaggaggagggatagaacatcacaacactgctctagtttcttggagaatcacatttctttacaggttaaagacaaacaagaccccagggtttttatctagaaagttattcaagtgaaagaaagagaagggaattgcttagtaggagttctgcagtatagaacaattacttgtatgaaattatacctttgaattttagaatgtcatgtgttcttttaaaaaaattagctccccatcctccctcctcactccctccctccctccttctctctctctctctctctccctctctcacagacacacacacacacacacacacacgcacacgcacgtccacactcacattaaactaaagctttatttgaagcaaagctagccaaaattctacgttacttttcccttgactggatcccaagtagcttggaagtttttgtgcccaggagagtaaataactgtgaacaagaggctctgcccttaggtctttgtggctgtttaagtcaccaacaatagagtcagggtaaagaataaaaacactttcatagcctcattcattcacttagaagtggtaataatttttccctaatgataccacttttcttttccccctgtacctatgggacttccagaaagaagttaaattgagtaaaatcatcagaaactgaatccatgtaagaaaaaataattgttgaagaaagaagttgatagaattcaaaaaggccatctttttgctttcacatcaataaaatttaccaagtaatagatcagtactcactaatatttttgagaccatagttgtctggtcagaaaaattatattaaattagtaaattctagaagctctttaaaagggaagttttccttcttctccaattataggagttgatttttactttgcaaagtggctcggtcctcatgagcatctgcatgttgactcttcagttaagaaaattgttgttcatttagggaggtggatattctgatgaagatctttatcctaaaccttcctactatccttgtcttattcatcaagcagatattttagtcaagaattccagagaaggctgctcctaaaatgtctacttgcagcccaataccagagcataaactatccattctggggtctggctttagaaatcatctttgtgggaagacctaattcttcacagcaaggatctcaggcatgccttctagatttgttccctctgaggggcaggaatgaactgtagaaatgttttaaggacccagaaaccccatatgtctcattccatgactataggtgagagaattctttcctaagagggtttgataccaataggggaaaatgtaaaatgttcagtctttatgacaacctggcataaaggagtcaattcttatgaaagagacacaagggccttatggccagggtttcttgggacaagactctcaccagcacatcacacacgttctccttggaagagagaagcagtacatcccggttgagaggtcacaaagcattagtttgtgtgtgtgtgtgtgtgtgtgtgtgtgtgtgtgtgtgtgtgtgtggtaaaggggggaaggtgttatgcggctgctccctccgtcccagaggtggcagtgattccataatgtggagactagtaactagatcctaaggcaaagaggtgtttctccttctggatgattcatcccaaagccttcccacccaggtgttctctgaaagcttagccttaagagaacacgcagagagtttccctagatatactcctgcctccaggtgctgggacacacctttgcaaaatgctgtgggaagcaggagctggggagctgtgttaagtcaaagtagaaaccctccagtgtttggtgttgtgtagagaataggacatagggtaaagaggccaagctgcctgtagttagtagagaagaatggatgtggttcttcttgtgtatttatttgtatcataaacacttggaacaacaaagaccataagcatcatttagcagttgtagccattttctagttaactcatgtaaacaagtaagagtaacataacagtattaccctttcactgttctcacaggacatgtacctaattatggtacttatttatgtagtcactgtatttctggatttttaaattaataaaaaagttaattttgaaaaatca

SEQ ID NO: 310048 - DNA, 2720 bp, Homo sapiens
aagagagagatgtacaagagaagagacgatctgtgccctgtcccagtcctggcccccttggttttgaccattaaggtgtgtggagactgagagaccacctcaggtagaggtccacgtttggactattcgaaagggcattctccagcacttccatattgagaagatctccaagaggatgtttgaggagcttcctcacttcaagctggtgaccagaacaaccctgagccagtggaagatcttcaccgaaggagaagctcagatcagccagatgtgttcaagtcgtgtatgcagaacagagcttgaagatttagtcaaggttttgtacctggagagatctgaaaagggccactgttaggcaagacagacagtattggatagggtaaagcaagaaaactcaagctgcagctggactgcaggcttattttgcttaagtcaacagtgccctaaaactccaaactcaaatgcagtcaattattcacgccatgcacagcataatttgctcctttgtgtggagtggtgtgtcagcccttgaacatctcctccaaagagactagaagagtcttaaattatatgtgggaggaggagggatagaacatcacaacactgctctagtttcttggagaatcacatttctttacaggttaaagacaaacaagaccccagggtttttatctagaaagttattcaagtgaaagaaagagaagggaattgcttagtaggagttctgcagtatagaacaattacttgtatgaaattatacctttgaattttagaatgtcatgtgttcttttaaaaaaattagctccccatcctccctcctcactccctccctccctccttctctctctctctctctctccctctctcacagacacacacacacacacacacacacgcacacgcacgtccacactcacattaaactaaagctttatttgaagcaaagctagccaaaattctacgttacttttcccttgactggatcccaagtagcttggaagtttttgtgcccaggagagtaaataactgtgaacaagaggctctgcccttaggtctttgtggctgtttaagtcaccaacaatagagtcagggtaaagaataaaaacactttcatagcctcattcattcacttagaagtggtaataatttttccctaatgataccacttttcttttccccctgtacctatgggacttccagaaagaagttaaattgagtaaaatcatcagaaactgaatccatgtaagaaaaaataattgttgaagaaagaagttgatagaattcaaaaaggccatctttttgctttcacatcaataaaatttaccaagtaatagatcagtactcactaatatttttgagaccatagttgtctggtcagaaaaattatattaaattagtaaattctagaagctctttaaaagggaagttttccttcttctccaattataggagttgatttttactttgcaaagtggctcggtcctcatgagcatctgcatgttgactcttcagttaagaaaattgttgttcatttagggaggtggatattctgatgaagatctttatcctaaaccttcctactatccttgtcttattcatcaagcagatattttagtcaagaattccagagaaggctgctcctaaaatgtctacttgcagcccaataccagagcataaactatccattctggggtctggctttagaaatcatctttgtgggaagacctaattcttcacagcaaggatctcaggcatgccttctagatttgttccctctgaggggcaggaatgaactgtagaaatgttttaaggacccagaaaccccatatgtctcattccatgactataggtgagagaattctttcctaagagggtttgataccaataggggaaaatgtaaaatgttcagtctttatgacaacctggcataaaggagtcaattcttatgaaagagacacaagggccttatggccagggtttcttgggacaagactctcaccagcacatcacacacgttctccttggaagagagaagcagtacatcccggttgagaggtcacaaagcattagtttgtgtgtgtgtgtgtgtgtgtgtgtgtgtgtgtgtgtgtgtgtgtggtaaaggggggaaggtgttatgcggctgctccctccgtcccagaggtggcagtgattccataatgtggagactagtaactagatcctaaggcaaagaggtgtttctccttctggatgattcatcccaaagccttcccacccaggtgttctctgaaagcttagccttaagagaacacgcagagagtttccctagatatactcctgcctccaggtgctgggacacacctttgcaaaatgctgtgggaagcaggagctggggagctgtgttaagtcaaagtagaaaccctccagtgtttggtgttgtgtagagaataggacatagggtaaagaggccaagctgcctgtagttagtagagaagaatggatgtggttcttcttgtgtatttatttgtatcataaacacttggaacaacaaagaccataagcatcatttagcagttgtagccattttctagttaactcatgtaaacaagtaagagtaacataacagtattaccctttcactgttctcacaggacatgtacctaattatggtacttatttatgtagtcactgtatttctggatttttaaattaataaaaaagttaattttgaaaaatca

SEQ ID NO: 310049 - DNA, 2266 bp, Homo sapiens
tcggacgagagcgccccggggagctcggagcgcgtgcacgcgtggcagacggagaaggccagtgcccagcttgaaggttctgtcaccttttgcagtggtccaaatgagaaaaaagtggaaaatgggaggcatgaaatacatcttttcgttgttgttctttcttttgctagaaggaggcaaaacagagcaagtaaaacattcagagacatattgcatgtttcaagacaagaagtacagagtgggtgagagatggcatccttacctggaaccttatgggttggtttactgcgtgaactgcatctgctcagagaatgggaatgtgctttgcagccgagtcagatgtccaaatgttcattgcctttctcctgtgcatattcctcatctgtgctgccctcgctgcccagaagactccttacccccagtgaacaataaggtgaccagcaagtcttgcgagtacaatgggacaacttaccaacatggagagctgttcgtagctgaagggctctttcagaatcggcaacccaatcaatgcacccagtgcagctgttcggagggaaacgtgtattgtggtctcaagacttgccccaaattaacctgtgccttcccagtctctgttccagattcctgctgccgggtatgcagaggagatggagaactgtcatgggaacattctgatggtgatatcttccggcaacctgccaacagagaagcaagacattcttaccaccgctctcactatgatcctccaccaagccgacaggctggaggtctgtcccgctttcctggggccagaagtcaccggggagctcttatggattcccagcaagcatcaggaaccattgtgcaaattgtcatcaataacaaacacaagcatggacaagtgtgtgtttccaatggaaagacctattctcatggcgagtcctggcacccaaacctccgggcatttggcattgtggagtgtgtgctatgtacttgtaatgtcaccaagcaagagtgtaagaaaatccactgccccaatcgatacccctgcaagtatcctcaaaaaatagacggaaaatgctgcaaggtgtgtccaggtaaaaaagcaaaagaagaacttccaggccaaagctttgacaataaaggctacttctgcggggaagaaacgatgcctgtgtatgagtctgtattcatggaggatggggagacaaccagaaaaatagcactggagactgagagaccacctcaggtagaggtccacgtttggactattcgaaagggcattctccagcacttccatattgagaagatctccaagaggatgtttgaggagcttcctcacttcaagctggtgaccagaacaaccctgagccagtggaagatcttcaccgaaggagaagctcagatcagccagatgtgttcaagtcgtgtatgcagaacagagcttgaagatttagtcaaggttttgtacctggagagatctgaaaagggccactgttaggcaagacagacagtattggatagggtaaagcaagaaaactcaagctgcagctggactgcaggcttattttgcttaagtcaacagtgccctaaaactccaaactcaaatgcagtcaattattcacgccatgcacagcataatttgctcctttgtgtgtgtgtgtgtgtgtgtgtgtgtgtgtgtggtaaaggggggaaggtgttatgcggctgctccctccgtcccagaggtggcagtgattccataatgtggagactagtaactagatcctaaggcaaagaggtgtttctccttctggatgattcatcccaaagccttcccacccaggtgttctctgaaagcttagccttaagagaacacgcagagagtttccctagatatactcctgcctccaggtgctgggacacacctttgcaaaatgctgtgggaagcaggagctggggagctgtgttaagtcaaagtagaaaccctccagtgtttggtgttgtgtagagaataggacatagggtaaagaggccaagctgcctgtagttagtagagaagaatggatgtggttcttcttgtgtatttatttgtatcataaacacttggaacaacaaagaccataagcatcatttagcagttgtagccattttctagttaactcatgtaaacaagtaagagtaacataacagtattaccctttcactgttctcacaggacatgtacctaattatggtacttatttatgtagtcactgtatttctggatttttaaattaataaaaaagttaattttgaaaaatca

SEQ ID NO: 310050 - DNA, 3271 bp, Homo sapiens
tcggacgagagcgccccggggagctcggagcgcgtgcacgcgtggcagacggagaaggccagtgcccagcttgaaggttctgtcaccttttgcagtggtccaaatgagaaaaaagtggaaaatgggaggcatgaaatacatcttttcgttgttgttctttcttttgctagaaggaggcaaaacagagcaagtaaaacattcagagacatattgcatgtttcaagacaagaagtacagagtgggtgagagatggcatccttacctggaaccttatgggttggtttactgcgtgaactgcatctgctcagagaatgggaatgtgctttgcagccgagtcagatgtccaaatgttcattgcctttctcctgtgcatattcctcatctgtgctgccctcgctgcccagaagactccttacccccagtgaacaataaggtgaccagcaagtcttgcgagtacaatgggacaacttaccaacatggagagctgttcgtagctgaagggctctttcagaatcggcaacccaatcaatgcacccagtgcagctgttcggagggaaacgtgtattgtggtctcaagacttgccccaaattaacctgtgccttcccagtctctgttccagattcctgctgccgggtatgcagaggagatggagaactgtcatgggaacattctgatggtgatatcttccggcaacctgccaacagagaagcaagacattcttaccaccgctctcactatgatcctccaccaagccgacaggctggaggtctgtcccgctttcctggggccagaagtcaccggggagctcttatggattcccagcaagcatcaggaaccattgtgcaaattgtcatcaataacaaacacaagcatggacaagtgtgtgtttccaatggaaagacctattctcatggcgagtcctggcacccaaacctccgggcatttggcattgtggagtgtgtgctatgtacttgtaatgtcaccaagcaagagtgtaagaaaatccactgccccaatcgatacccctgcaagtatcctcaaaaaatagacggaaaatgctgcaaggtgtgtccaggtaaaaaagcaaaagaagaacttccaggccaaagctttgacaataaaggctacttctgcggggaagaaacgatgcctgtgtatgagtctgtattcatggaggatggggagacaaccagaaaaatagcactggagactgagagaccacctcaggtagaggtccacgtttggactattcgaaagggcattctccagcacttccatattgagaagatctccaagaggatgtttgaggagcttcctcacttcaagctggtgaccagaacaaccctgagccagtggaagatcttcaccgaaggagaagctcagatcagccagatgtgttcaagtcgtgtatgcagaacagagcttgaagatttagtcaaggttttgtacctggagagatctgaaaagggccactgttaggcaagacagacagtattggatagggtaaagcaagaaaactcaagctgcagctggactgcaggcttattttgcttaagtcaacagtgccctaaaactccaaactcaaatgcagtcaattattcacgccatgcacagcataatttgctcctttgtgtggagtggtgtgtcagcccttgaacatctcctccaaagagactagaagagtcttaaattatatgtgggaggaggagggatagaacatcacaacactgctctagtttcttggagaatcacatttctttacaggttaaagacaaacaagaccccagggtttttatctagaaagttattcaagtgaaagaaagagaagggaattgcttagtaggagttctgcagtatagaacaattacttgtatgaaattatacctttgaattttagaatgtcatgtgttcttttaaaaaaattagctccccatcctccctcctcactccctccctccctccttctctctctctctctctctccctctctcacagacacacacacacacacacacacacgcacacgcacgtccacactcacattaaactaaagctttatttgaagcaaagctagccaaaattctacgttacttttcccttgactggatcccaagtagcttggaagtttttgtgcccaggagagtaaataactgtgaacaagaggctctgcccttaggtctttgtggctgtttaagtcaccaacaatagagtcagggtaaagaataaaaacactttcatagcctcattcattcacttagaagtggtaataatttttccctaatgataccacttttcttttccccctgtacctatgggacttccagaaagaagttaaattgagtaaaatcatcagaaactgaatccatgtaagaaaaaataattgttgaagaaagaagttgatagaattcaaaaaggccatctttttgctttcacatcaataaaatttaccaagtaatagatcagtactcactaatatttttgagaccatagttgtctggtcagaaaaattatattaaattagtaaattctagaagctctttaaaagggaagttttccttcttctccaattataggagttgatttttactttgcaaagtggctcggtcctcatgagcatctgcatgttgactcttcagttaagaaaattgttgttcatttagggaggtggatattctgatgaagatctttatcctaaaccttcctactatccttgtcttattcatcaagcagatattttagtcaagaattccagagaaggctgctcctaaaatgtctacttgcagcccaataccagagcataaactatccattctggggtctggctttagaaatcatctttgtgggaagacctaattcttcacagcaaggatctcaggcatgccttctagatttgttccctctgaggggcaggaatgaactgtagaaatgttttaaggacccagaaaccccatatgtctcattccatgactataggtgagagaattctttcctaagagggtttgataccaataggggaaaatgtaaaatgttcagtctttatgacaacctggcataaaggagtcaattcttatgaaagagacacaagggccttatggccagggtttcttgggacaagactctcaccagcacatcacacacacacacacacgcacgtccacactcacattaaacgaaagctttatttgaagcaagctagccagattctacgttacttttcccttgactggatcccagtagcttggaagttttgtacccacgagtgtctgtctt

SEQ ID NO: 310051 - DNA, 1708 bp, Homo sapiens
tcggacgagagcgccccggggagctcggagcgcgtgcacgcgtggcagacggagaaggccagtgcccagcttgaaggttctgtcaccttttgcagtggtccaaatgagaaaaaagtggaaaatgggaggcatgaaatacatcttttcgttgttgttctttcttttgctagaaggaggcaaaacagagcaagtaaaacattcagagacatattgcatgtttcaagacaagaagtacagagtgggtgagagatggcatccttacctggaaccttatgggttggtttactgcgtgaactgcatctgctcagagaatgggaatgtgctttgcagccgagtcagatgtccaaatgttcattgcctttctcctgtgcatattcctcatctgtgctgccctcgctgcccagaagactccttacccccagtgaacaataaggtgaccagcaagtcttgcgagtacaatgggacaacttaccaacatggagagctgttcgtagctgaagggctctttcagaatcggcaacccaatcaatgcacccagtgcagctgttcggagggaaacgtgtattgtggtctcaagacttgccccaaattaacctgtgccttcccagtctctgttccagattcctgctgccgggtatgcagaggagatggagaactgtcatgggaacattctgatggtgatatcttccggcaacctgccaacagagaagcaagacattcttaccaccgctctcactatgatcctccaccaagccgacaggctggaggtctgtcccgctttcctggggccagaagtcaccggggagctcttatggattcccagcaagcatcaggaaccattgtgcaaattgtcatcaataacaaacacaagcatggacaagtgtgtgtttccaatggaaagacctattctcatggcgagtcctggcacccaaacctccgggcatttggcattgtggagtgtgtgctatgtacttgtaatgtcaccaagcaagagtgtaagaaaatccactgccccaatcgatacccctgcaagtatcctcaaaaaatagacggaaaatgctgcaaggtgtgtccaggtaaaaaagcaaaagaagaacttccaggccaaagctttgacaataaaggctacttctgcggggaagaaacgatgcctgtgtatgagtctgtattcatggaggatggggagacaaccagaaaaatagcactggagactgagagaccacctcaggtagaggtccacgtttggactattcgaaagggcattctccagcacttccatattgagaagatctccaagaggatgtttgaggagcttcctcacttcaagctggtgaccagaacaaccctgagccagtggaagatcttcaccgaaggagaagctcagatcagccagatgtgttcaagtcgtgtatgcagaataggacatagggtaaagaggccaagctgcctgtagttagtagagaagaatggatgtggttcttcttgtgtatttatttgtatcataaacacttggaacaacaaagaccataagcatcatttagcagttgtagccattttctagttaactcatgtaaacaagtaagagtaacataacagtattaccctttcactgttctcacaggacatgtacctaattatggtacttatttatgtagtcactgtatttctggatttttaaattaataaaaaagttaattttgaaaaatca

SEQ ID NO: 310052 - DNA, 944 bp, Homo sapiens
gtcttgaaactatattattcattctttaaagtctgatacatatgtgtagtgcaccttaaacacagttggaatgctgtatcaggtgtaaatataatccatagcacttacaatatcttgccagctactttattcagtccaaaaggaaaatatctgttgagacaagcaataagatatctctatgtaggacacagagactccatttactggtagacaaagggcctggtttgttgaaaaaagactccagagcttggagctagcagaacttaattggatacttttgttattcttgcctagcaaaatataattctgattctctctgctataatagttctgtttattcttaatcttttaaaaatcattatctctgatatttattagaaggaaataaaatgcaatattgataaaaatgactaatgtgctgttttttacgataactctaaaatatttgaatcattcattgctaatcataaaacgtattagacaatccaaaaacctccaagattgagtgctctatgttgactgtgatggtaaccttattttcatgcctacttgcttaaagtttgtctccttttcactgctatcctgcctactatcgatactttgggtaaattttaagtgaaaagtaaaagaaaatttgtgaccacacgggaaaataagcatgtaaaatagtgatttgtgctcagattgcattattttgtgaaacaaataaataagtggaaacaattggcactttgcaggtggctcagcgagcagcccagctgcaggaggccttgctgcactgtgggaggttccaggatgccctggagtccctgctcagctggatggtggacactgaggagcttgtggccaatcagaagcccccgtcggctgagttcaaagtggtaaaggcccagatacaagaacaaaaggtaagttagtcatgcttttgtattgcgtttcatatt

SEQ ID NO: 310053 - DNA, 943 bp, Homo sapiens
tttattactactaaattcgcggccgcgtcgactaccattctttttaaaagtcttattacatatttatttttccttttttctttctattctatcattatacccataagagagtttgttacacctgaaaagtgaaacaaactaaattaaaataaaataaaagaataaataaagaacattggtcaagtctacaaaagttaaaaatttaaaaatcacatggctttgcttatattgaaataaatgttttgtgtatggttaatacaaacttctctatttcctggcatttattcaatgagtaatgaatagcgtaatgttactttttacataaatgccatttctgtaaactcactgtctaaatatttactactctaggtaattgccagatcttttatatattaaaggtcatcaagaatgaattaatcatttagcattagtaatacaactggaaggctcaagaagttcaagtatgtaaaaatgctttggaaagtcttctgaaaactattggactagtcctatcataaatgggatatttagatactgtaccatttgcatgtgtgcttgtgtgtgtgtgaatgtgtgtattggtgtatacgtgtgtgtttgtgtctttctgcaggcacatctcattttaactgttagagttgaatcagtcaaataatcacttttgtgataggctcacttttgtgaatgatctgagtatcagaatagaaacctatagatatggccaaatggtaatattcatttatgatgatttttttaaaaacacattaattttattgtgacagaatgttggttattaatgtttgaaagatctagttgcatacacagactcttggatcaaaaataaagagctctgggctcacttcttagatcagtctgtggccaaaataaatgaatttaattcctggcacatcagtttgtcaaaattaggcaggaaaaaaaaaaa

SEQ ID NO: 310054 - DNA, 2867 bp, Homo sapiens
aagtctcaatgtttaaggaaaaaagatttagaaatagtggtttttaaaagtttgatggaaaaacacatgagttcctgctggtgcattttacatgctttctaggtccttctgagttttaggatcctgagggatttggttggtattgtttttgggttttcttcttgaaactcagtattaaaacactgaaaagtagcagatttttttctacctagagttttctgtttatccatcatgagcccaaataaagtcacaattgtatgttacctgctttacaaagaagccatttatgtttaattgactgttcattttgctttcttgtctgctgggatgacaaccgtgaaattcagtctggtagtttttatgagttggacatgaacctattagaaatgatttaaagtataaaatcatttctcacaggctttcaaaacataaacctgtgatcagaaacctggaatctagaaatttattcaggacttgcagaatttgtagcatatctacattattggagatctattgaaagggcaagaaaaagatgattgcccgttagtatcaacagttatggtacagacaactatgagagaaaccttttagatttggcagctgtatcattaataatgtgtcattggctattctaatattacagtaatctaaaatggcatattaatccagcctttaacaaattggtttaccagatcattagggatgcagaaattttagttgactgtgaaatttatatgagtcatactcatttactttattctttttaagtgaaaactgcccttacagaaaagaaaatgagtttataaagatttctcacagagttcagtggaaaacggttttactgtaagagagagtttaatgaagaagaatcaaagcttattaaatttttcttagaatcattttattttggataagccctgggcaagtgggccagtgcttactttcatggctatgtttaattcctagaaacattttaaaattactgccttactaatattgtttctgtcataagaaagaaaaataatttttagaccaaagctttggtagtatacttgataacctttgtaatcttttttttttcaaactgtttcctttgggctaaatcagcatgcagccgtctaacacaaatcattacaaacccccttttctgagattttactaatcgctatgaactaagcaagaaattaaagtcggttgctttagctactgcaaattgcacatcatcctgtagtttagaattattattgacaactagaggttctttctttcttcctgggaaatcagtttggagactcccagcaactgcgactggtccggatcctgcggagtactgtgatggttcgtgttggaggtggatggatggcacttgatgagttcttagtgaaaaatgatccttgcagggccaaaggaaggacaaacatggaactgcgtgagaagttcattttagcagatggtgccagccagggtatggctgctttccgaccccgaggccgaagatcccggccatcatcacgaggcgcttcacccaacagatccacttctgtgtccagtcaggctgcgcaggcggcctccccacaggtccctgccaccaccacacccaagattctccatcctttaacacgcaattatggtaaaccatggttgacaaacagcaaaatgtcaactccttgtaaagcagcagagtgctcagactttcccgtgccatctgcagagggaacgccaatacaaggaagcaagcttcgacttccaggatatttatcagggaaaggcttccactctggggaggacagtggcttgataacaactgcagctgccagagtccgaacacagtttgctgattccaagaagactcccagccgaccaggaagtcgagctggaagcaaagctggcagcagggccagcagccgccgaggcagtgatgcatcagactttgacatttcagaaatccagtccgtgtgctcagatgtggaaactgtcccccagacacacagacctacaccccgagcaggttctcggccatccacagcgaagccttcaaaaatccccacgccccagaggaaatcacctgccagcaaattggacaagtcctcaaagagatagtgcaattggttctaccaaggcccttccttgagcatttattatttaagtttgaacgatgtaaaatatggtgtagaaattcttgtgaaatattgcaagaggcgagtttaaaattctgcagatggccttatttgtgtatttgtctttttattttatctgtataattttttttgtcagatattctggggttaaagtcacatcatatgtgaggaggaaaagtttaacatgaactaacatttctgcactgtaacgtgccgggcacacactaaactcagttactgtacctacaggtaagtctacatcctctctgacagccacagcactacatcaatccctgacgttagggatacctcatgacattttcctgtttttatggaaactctgagaagctgaatgatacatgcaggggatattttttgagatgatttaaatgtaaaccaaaagatggaagacaaaaagacaaacacacccacacgcagtctttgcagtatctgacagagaactcacaggaagttacttcaagcacttgccagtactatgatattcaagtaccttgcagcatttctctgccattgctttcaatgaggccagaggcatcctggatattagacctattatactgtaagaatataagtataaagtgcgttcatatacatgtgaggttttcttttgcttgagtggacagtagcacctgtatcattgaactcattttgtatcagagcaattttgcttgcagaaagctatgaaataaaacacgtcccttaactgca

SEQ ID NO: 310055 - DNA, 904 bp, Homo sapiens
ttctttatcatctgactctcctattactatctcctcctcccattagttctttctttctcatctattctctcactttctatatttctttcccactataccttcttttaccttgcctggatgctcatcttcattcccacgtcacttatgttcgtatctctcaccaacctatacgtgaactattgtttctgcctccgaagccctcctgtcctttcttcgctcgccctctctgctcgtatatttagtctctcgacttcgccgattggctcgttctggtatgcacataattgtgtctgttcctttttctcttcctcttccctctctcttctatttctctcgcccctccccctccgcttcctttctctttcttccttcctccctccttttcttcctctctccttttttttccttctctcttctcctttctttttctcttttctttttctttttttttttttttttttttttttttttcctttcttttttttttttttttttttttgttttctttttttttttaggtttgagggggaatgtgtgtattggtgtatacgtgtgtgtttgtgtctttctgcaggcacatctcattttaactgttagagttgaatcagtcaaataatcacttttgtgataggctcacttttgtgaatgatctgagtatcagaatagaaacctatagatatggccaaatggtaatattcatttatgatgatttttttaaaaacacattaattttattgtgacagaatgttggttattaatgtttgaaagatctagttgcatacacagactcttggatcaaaaataaagagctctgggctcacttcttagatcagtctgtggccaaaataaatgaatttaattcctggcacatcagtttgtcaaaattaggcaggaaaaaaaaaaa

SEQ ID NO: 310056 - DNA, 408 bp, Homo sapiens
tgtgtctgtctctgcctggctccataaaagcaatggaggcagcagaatatccagacacagtttttctctgctccatgccccctctatgcatgcagtcaccatctttttagcaatacaccattaactctggaatattcactgacagtctgaaagatactaacatactcaccatttatttctccttgccatcacttttatgctcagttttgggggtctccattttgttttctcttcaaccatgaattcatattgtttagaaagtttctttgaattctgagagagaatgagaaattagaagagaaaatcaagtgagaaccccatgccttatttaattgaagagtttctcccccttcacctcctaaagaggaatagtagagagtttccacccatatgtaaagaagtggtgtt

SEQ ID NO: 310057 - DNA, 4158 bp, Homo sapiens
caaccttcagaacaagctagaggttttaaatcaacgctggcaaaatgttttggaaaaaacagaacaaaggaagcagcagctggatggtgccttgcgccaggccaaagggttccatggcgaaattgaggatttgcagcagtggctgactgacacggagcgtcatctgttggcatctaaaccgctgggaggtttaccggaaacagccaaggagcagcttaatgtccatatggaagtctgtgctgcctttgaagctaaagaagaaacatataagagtctgatgcagaaaggccagcagatgcttgcaagatgcccaaaatctgcagagacaaatattgaccaagacataaataacttgaaagaaaaatgggaatcggtggaaaccaaactcaatgaaaggaaaactaaactggaagaggctctcaacttggcaatggagttccacaattctctccaagacttcatcaactggcttactcaggctgaacagaccctaaatgtagcttctcggccaagtctcatcttggacacagtcttatttcaaattgacgaacacaaggtttttgccaatgaagtaaattctcatcgtgagcagataatagagctggacaaaactggaacccacctaaaatattttagtcagaaacaagatgttgttctaatcaagaatctacttatcagtgtacaaagtcgatgggaaaaagtggttcaacggttggtagagagaggaagatctttggatgatgcaaggaagagagccaagcagttccatgaagcttggagtaaacttatggagtggctagaagagtcagaaaagtctttggattctgaactggaaatcgcaaatgatccagacaaaataaaaacacaacttgcacaacataaggagtttcagaaatcactcggagccaagcattctgtctacgacaccaccaacaggactggacgttctctgaaggagaaaacctccctggctgatgacaacctgaaactggatgacatgctgagtgaactcagagacaaatgggataccatatgtggaaaatctgtggaaagacaaaacaaattggaggaagccctgttattttctggacaattcacagatgccctacaggctctcattgattggttatatagagttgaaccccagctggcagaagaccagcctgttcatggagacattgatttggtgatgaatctgatcgataatcacaaggccttccaaaaagagttggggaagaggaccagcagtgtgcaggccctgaagcgctcagcccgagaactcatagaaggcagtcgggatgactcctcctgggtcaaggtccagatgcaggaattaagcacacgctgggagaccgtgtgtgcactttctatatcaaagcaaacacggttagaagcagccctgcgtcaggcagaggaattccactcggtggtacatgccctcttggagtggctggctgaggcggagcaaaccctgcgtttccatggtgtcctcccagatgatgaggatgctctccggactctcattgatcagcataaagaattcatgaagaaactggaagaaaagagagctgaactaaataaagccaccactatgggcgacaccgttttggctatctgccaccccgactccatcactaccattaagcactggataacaatcatccgggcgaggtttgaggaggtgctggcctgggcaaagcaacatcagcagagattagcaagtgctctggctgggcttattgccaaacaggaattgttggaagctttgctggcttggttgcaatgggctgaaactacacttactgataaggataaagaagtcatcccccaggagatcgaagaggtgaaagcactcattgcagaacaccagaccttcatggaggaaatgaccagaaaacagcctgatgttgataaagtaacgaagacctataagaggagagctgctgatccttcctcattacaatcccatattccagtcttggataagggacgagcaggaagaaaacgctttccagcatcaagcttgtatccctctgggtcacagacacaaattgaaaccaaaaatcctagggtaaacttactggtgagcaaatggcagcaagtctggctcctggcgttggaaagaaggaggaaactcaatgatgccttggacagactagaggagctgagggaatttgctaactttgattttgatatctggcgcaaaaaatacatgcgatggatgaatcacaagaaatctcgagtgatggacttcttcaggagaattgataaagaccaggatgggaaaataacgcggcaggaatttattgatggaattctttcctcaaagtttccaaccagtcgcttggagatgagcgcagttgcagacatctttgacagagatggcgatggatatattgactactatgaatttgtagcagcccttcacccaaataaagatgcatataaacctatcacagatgccgacaaaatcgaagatgaggtgacaaggcaggtagctaagtgtaaatgtgcaaagcgatttcaagttgagcagattggtgataataaatacaggttcttcctgggaaatcagtttggagactcccagcaactgcgactggtccggatcctgcggagtactgtgatggttcgtgttggaggtggatggatggcacttgatgagttcttagtgaaaaatgatccttgcagggccaaaggaaggacaaacatggaactgcgtgagaagttcattttagcagatggtgccagccagggtatggctgctttccgaccccgaggccgaagatcccggccatcatcacgaggcgcttcacccaacagatccacttctgtgtccagtcaggctgcgcaggcggcctccccacaggtccctgccaccaccacacccaagattctccatcctttaacacgcaattatggtaaaccatggttgacaaacagcaaaatgtcaactccttgtaaagcagcagagtgctcagactttcccgtgccatctgcagagggaacgccaatacaaggaagcaagcttcgacttccaggatatttatcagggaaaggcttccactctggggaggacagtggcttgataacaactgcagctgccagagtccgaacacagtttgctgattccaagaagactcccagccgaccaggaagtcgagctggaagcaaagctggcagcagggccagcagccgccgaggcagtgatgcatcagactttgacatttcagaaatccagtccgtgtgctcagatgtggaaactgtcccccagacacacagacctacaccccgagcaggttctcggccatccacagcgaagccttcaaaaatccccacgccccagaggaaatcacctgccagcaaattggacaagtcctcaaagagatagtgcaattggttctaccaaggcccttccttgagcatttattatttaagtttgaacgatgtaaaatatggtgtagaaattcttgtgaaatattgcaagaggcgagtttaaaattctgcagatggccttatttgtgtatttgtctttttattttatctgtataattttttttgtcagatattctggggttaaagtcacatcatatgtgaggaggaaaagtttaacatgaactaacatttctgcactgtaacgtgccgggcacacactaaactcagttactgtacctacaggtaagtctacatcctctctgacagccacagcactacatcaatccctgacgttagggatacctcatgacattttcctgtttttatggaaactctgagaagctgaatgatacatgcaggggatattttttgagatgatttaaatgtaaaccaaaagatggaagacaaaaagacaaacacacccacacgcagtctttgcagtatctgacagagaactcacaggaagttacttcaagcacttgccagtactatgatattcaagtaccttgcagcatttctctgccattgctttcaatgaggccagaggcatcctggatattagacctattatactgtaagaatataagtataaagtgcgttcatatacatgtgaggttttcttttgcttgagtggacagtagcacctgtatcattgaactcattttgtatcagagcaattttgcttgcagaaagctatgaaataaaacacgtcccttaactgca

SEQ ID NO: 310058 - DNA, 4412 bp, Homo sapiens
caaccttcagaacaagctagaggttttaaatcaacgctggcaaaatgttttggaaaaaacagaacaaaggaagcagcagctggatggtgccttgcgccaggccaaagggttccatggcgaaattgaggatttgcagcagtggctgactgacacggagcgtcatctgttggcatctaaaccgctgggaggtttaccggaaacagccaaggagcagcttaatgtccatatggaagtctgtgctgcctttgaagctaaagaagaaacatataagagtctgatgcagaaaggccagcagatgcttgcaagatgcccaaaatctgcagagacaaatattgaccaagacataaataacttgaaagaaaaatgggaatcggtggaaaccaaactcaatgaaaggaaaactaaactggaagaggctctcaacttggcaatggagttccacaattctctccaagacttcatcaactggcttactcaggctgaacagaccctaaatgtagcttctcggccaagtctcatcttggacacagtcttatttcaaattgacgaacacaaggtttttgccaatgaagtaaattctcatcgtgagcagataatagagctggacaaaactggaacccacctaaaatattttagtcagaaacaagatgttgttctaatcaagaatctacttatcagtgtacaaagtcgatgggaaaaagtggttcaacggttggtagagagaggaagatctttggatgatgcaaggaagagagccaagcagttccatgaagcttggagtaaacttatggagtggctagaagagtcagaaaagtctttggattctgaactggaaatcgcaaatgatccagacaaaataaaaacacaacttgcacaacataaggagtttcagaaatcactcggagccaagcattctgtctacgacaccaccaacaggactggacgttctctgaaggagaaaacctccctggctgatgacaacctgaaactggatgacatgctgagtgaactcagagacaaatgggataccatatgtggaaaatctgtggaaagacaaaacaaattggaggaagccctgttattttctggacaattcacagatgccctacaggctctcattgattggttatatagagttgaaccccagctggcagaagaccagcctgttcatggagacattgatttggtgatgaatctgatcgataatcacaaggccttccaaaaagagttggggaagaggaccagcagtgtgcaggccctgaagcgctcagcccgagaactcatagaaggcagtcgggatgactcctcctgggtcaaggtccagatgcaggaattaagcacacgctgggagaccgtgtgtgcactttctatatcaaagcaaacacggttagaagcagccctgcgtcaggcagaggaattccactcggtggtacatgccctcttggagtggctggctgaggcggagcaaaccctgcgtttccatggtgtcctcccagatgatgaggatgctctccggactctcattgatcagcataaagaattcatgaagaaactggaagaaaagagagctgaactaaataaagccaccactatgggcgacaccgttttggctatctgccaccccgactccatcactaccattaagcactggataacaatcatccgggcgaggtttgaggaggtgctggcctgggcaaagcaacatcagcagagattagcaagtgctctggctgggcttattgccaaacaggaattgttggaagctttgctggcttggttgcaatgggctgaaactacacttactgataaggataaagaagtcatcccccaggagatcgaagaggtgaaagcactcattgcagaacaccagaccttcatggaggaaatgaccagaaaacagcctgatgttgataaagtaacgaagacctataagaggagagctgctgatccttcctcattacaatcccatattccagtcttggataagggacgagcaggaagaaaacgctttccagcatcaagcttgtatccctctgggtcacagacacaaattgaaaccaaaaatcctagggtaaacttactggtgagcaaatggcagcaagtctggctcctggcgttggaaagaaggaggaaactcaatgatgccttggacagactagaggagctgagggaatttgctaactttgattttgatatctggcgcaaaaaatacatgcgatggatgaatcacaagaaatctcgagtgatggacttcttcaggagaattgataaagaccaggatgggaaaataacgcggcaggaatttattgatggaattctttcctcaaagtttccaaccagtcgcttggagatgagcgcagttgcagacatctttgacagagatggcgatggatatattgactactatgaatttgtagcagcccttcacccaaataaagatgcatataaacctatcacagatgccgacaaaatcgaagatgaggtgacaaggcaggtagctaagtgtaaatgtgcaaagcgatttcaagttgagcagattggtgataataaatacaggttcttcctgggaaatcagtttggagactcccagcaactgcgactggtccggatcctgcggagtactgtgatggttcgtgttggaggtggatggatggcacttgatgagttcttagtgaaaaatgatccttgcagggccaaaggaaggacaaacatggaactgcgtgagaagttcattttagcagatggtgccagccagggtatggctgctttccgaccccgaggccgaagatcccggccatcatcacgaggcgcttcacccaacagatccacttctgtgtccagtcaggctgcgcaggcggcctccccacaggtccctgccaccaccacacccaagattctccatcctttaacacgcaattatggtaaaccatggttgacaaacagcaaaatgtcaactccttgtaaagcagcagagtgctcagactttcccgtgccatctgcagagggaacgccaatacaaggaagcaagcttcgacttccaggatatttatcagggaaaggcttccactctggggaggacagtggcttgataacaactgcagctgccagagtccgaacacagtttgctgattccaagaagactcccagccgaccaggaagtcgagctggaagcaaagctggcagcagggccagcagccgccgaggcagtgatgcatcagactttgacatttcagaaatccagtccgtgtgctcagatgtggaaactgtcccccagacacacagacctacaccccgagcaggttctcggccatccacagcgaagccttcaaaaatccccacgccccagaggaaatcacctgccagcaaattggacaagtcctcaaagagatagtgcaattggttctaccaaggcccttccttgagcatttattatttaagtttgaacgatgtaaaatatggtgtagaaattcttgtgaaatattgcaagaggcgagtttaaaattctgcagatggccttatttgtgtatttgtctttttattttatctgtataattttttttgtcagatattctggggttaaagtcacatcatatgtgaggaggaaaagtttaacatgaactaacatttctgcactgtaacgtgccgggcacacactaaactcagttactgtacctacaggtaagtctacatcctctctgacagccacagcactacatcaatccctgacgttagggatacctcatgacattttcctgtttttatggaaactctgagaagctgaatgatacatgcaggggatattttttgagatgatttaaatgtaaaccaaaagatggaagacaaaaagacaaacacacccacacgcagtctttgcagtatctgacagagaactcacaggaagttacttcaagcacttgccagtactatgatattcaagtaccttgcagcatttctctgccattgctttcaatgaggccagaggcatcctggatattagacctattatactgtaagaatataagtataaagtgcgttcatatacatgtgaggttttcttttgcttgagtggacagtagcacctgtatcattgaactcattttgtatcagagcaattttgcttgcagaaagctatgaaataaaacacgtcccttaactgcattgctatggaattaattttttttccccagggaaaactagtgtatttttttatgagcaatatcaatttggagtgaccaaaagatacttaaaaatgggtttattttgatttctcatctgaaataatcatgttctggtattatatctatctatatttaataaatatatacattttaatttattatgtgtactcacatactatagaaagatattagtatgcatttaataaaacatattcacttgaatatatggaatac

SEQ ID NO: 310059 - DNA, 4353 bp, Homo sapiens
cacgtcaccggcacgggagcgagctgttctgctctcccgctctggactggagcaaagcttcccccaccctggagtgcccacagtagccaacacattgctttgcctgctacagatgctcaagtgatagttgtggagtgaaattatataagctcctcgcatgcagggcctgaggcattgctgagtccttcgtttgaacacactgcaggctcagaagaaaacctttccatgctttacatattgcacagccatgaccaacccctgcacatgctccagcctcacatgttctgccacagacaaggtagagccgagctcggctctaccttgtctaatgaatagagaaaactaaactggaagaggctctcaacttggcaatggagttccacaattctctccaagacttcatcaactggcttactcaggctgaacagaccctaaatgtagcttctcggccaagtctcatcttggacacagtcttatttcaaattgacgaacacaaggtttttgccaatgaagtaaattctcatcgtgagcagataatagagctggacaaaactggaacccacctaaaatattttagtcagaaacaagatgttgttctaatcaagaatctacttatcagtgtacaaagtcgatgggaaaaagtggttcaacggttggtagagagaggaagatctttggatgatgcaaggaagagagccaagcagttccatgaagcttggagtaaacttatggagtggctagaagagtcagaaaagtctttggattctgaactggaaatcgcaaatgatccagacaaaataaaaacacaacttgcacaacataaggagtttcagaaatcactcggagccaagcattctgtctacgacaccaccaacaggactggacgttctctgaaggagaaaacctccctggctgatgacaacctgaaactggatgacatgctgagtgaactcagagacaaatgggataccatatgtggaaaatctgtggaaagacaaaacaaattggaggaagccctgttattttctggacaattcacagatgccctacaggctctcattgattggttatatagagttgaaccccagctggcagaagaccagcctgttcatggagacattgatttggtgatgaatctgatcgataatcacaaggccttccaaaaagagttggggaagaggaccagcagtgtgcaggccctgaagcgctcagcccgagaactcatagaaggcagtcgggatgactcctcctgggtcaaggtccagatgcaggaattaagcacacgctgggagaccgtgtgtgcactttctatatcaaagcaaacacggttagaagcagccctgcgtcaggcagaggaattccactcggtggtacatgccctcttggagtggctggctgaggcggagcaaaccctgcgtttccatggtgtcctcccagatgatgaggatgctctccggactctcattgatcagcataaagaattcatgaagaaactggaagaaaagagagctgaactaaataaagccaccactatgggcgacaccgttttggctatctgccaccccgactccatcactaccattaagcactggataacaatcatccgggcgaggtttgaggaggtgctggcctgggcaaagcaacatcagcagagattagcaagtgctctggctgggcttattgccaaacaggaattgttggaagctttgctggcttggttgcaatgggctgaaactacacttactgataaggataaagaagtcatcccccaggagatcgaagaggtgaaagcactcattgcagaacaccagaccttcatggaggaaatgaccagaaaacagcctgatgttgataaagtaacgaagacctataagaggagagctgctgatccttcctcattacaatcccatattccagtcttggataagggacgagcaggaagaaaacgctttccagcatcaagcttgtatccctctgggtcacagacacaaattgaaaccaaaaatcctagggtaaacttactggtgagcaaatggcagcaagtctggctcctggcgttggaaagaaggaggaaactcaatgatgccttggacagactagaggagctgagggaatttgctaactttgattttgatatctggcgcaaaaaatacatgcgatggatgaatcacaagaaatctcgagtgatggacttcttcaggagaattgataaagaccaggatgggaaaataacgcggcaggaatttattgatggaattctttcctcaaagtttccaaccagtcgcttggagatgagcgcagttgcagacatctttgacagagatggcgatggatatattgactactatgaatttgtagcagcccttcacccaaataaagatgcatataaacctatcacagatgccgacaaaatcgaagatgaggtgacaaggcaggtagctaagtgtaaatgtgcaaagcgatttcaagttgagcagattggtgataataaatacaggttcttcctgggaaatcagtttggagactcccagcaactgcgactggtccggatcctgcggagtactgtgatggttcgtgttggaggtggatggatggcacttgatgagttcttagtgaaaaatgatccttgcagggccaaaggaaggacaaacatggaactgcgtgagaagttcattttagcagatggtgccagccagggtatggctgctttccgaccccgaggccgaagatcccggccatcatcacgaggcgcttcacccaacagatccacttctgtgtccagtcaggctgcgcaggcggcctccccacaggtccctgccaccaccacacccaagattctccatcctttaacacgcaattatggtaaaccatggttgacaaacagcaaaatgtcaactccttgtaaagcagcagagtgctcagactttcccgtgccatctgcagagggaacgccaatacaaggaagcaagcttcgacttccaggatatttatcagggaaaggcttccactctggggaggacagtggcttgataacaactgcagctgccagagtccgaacacagtttgctgattccaagaagactcccagccgaccaggaagtcgagctggaagcaaagctggcagcagggccagcagccgccgaggcagtgatgcatcagactttgacatttcagaaatccagtccgtgtgctcagatgtggaaactgtcccccagacacacagacctacaccccgagcaggttctcggccatccacagcgaagccttcaaaaatccccacgccccagaggaaatcacctgccagcaaattggacaagtcctcaaagagatagtgcaattggttctaccaaggcccttccttgagcatttattatttaagtttgaacgatgtaaaatatggtgtagaaattcttgtgaaatattgcaagaggcgagtttaaaattctgcagatggccttatttgtgtatttgtctttttattttatctgtataattttttttgtcagatattctggggttaaagtcacatcatatgtgaggaggaaaagtttaacatgaactaacatttctgcactgtaacgtgccgggcacacactaaactcagttactgtacctacaggtaagtctacatcctctctgacagccacagcactacatcaatccctgacgttagggatacctcatgacattttcctgtttttatggaaactctgagaagctgaatgatacatgcaggggatattttttgagatgatttaaatgtaaaccaaaagatggaagacaaaaagacaaacacacccacacgcagtctttgcagtatctgacagagaactcacaggaagttacttcaagcacttgccagtactatgatattcaagtaccttgcagcatttctctgccattgctttcaatgaggccagaggcatcctggatattagacctattatactgtaagaatataagtataaagtgcgttcatatacatgtgaggttttcttttgcttgagtggacagtagcacctgtatcattgaactcattttgtatcagagcaattttgcttgcagaaagctatgaaataaaacacgtcccttaactgcattgctatggaattaattttttttccccagggaaaactagtgtatttttttatgagcaatatcaatttggagtgaccaaaagatacttaaaaatgggtttattttgatttctcatctgaaataatcatgttctggtattatatctatctatatttaataaatatatacattttaatttattatgtgtactcacatactatagaaagatattagtatgcatttaataaaacatattcacttgaatatatggaatac

SEQ ID NO: 310060 - DNA, 4357 bp, Homo sapiens
caaccttcagaacaagctagaggttttaaatcaacgctggcaaaatgttttggaaaaaacagaacaaaggaagcagcagctggatggtgccttgcgccaggccaaagggttccatggcgaaattgaggatttgcagcagtggctgactgacacggagcgtcatctgttggcatctaaaccgctgggaggtttaccggaaacagccaaggagcagcttaatgtccatatggaagtctgtgctgcctttgaagctaaagaagaaacatataagagtctgatgcagaaaggccagcagatgcttgcaagatgcccaaaatctgcagagacaaatattgaccaagacataaataacttgaaagaaaaatgggaatcggtggaaaccaaactcaatgaaaggaaaacttcatcaactggcttactcaggctgaacagaccctaaatgtagcttctcggccaagtctcatcttggacacagtcttatttcaaattgacgaacacaaggtttttgccaatgaagtaaattctcatcgtgagcagataatagagctggacaaaactggaacccacctaaaatattttagtcagaaacaagatgttgttctaatcaagaatctacttatcagtgtacaaagtcgatgggaaaaagtggttcaacggttggtagagagaggaagatctttggatgatgcaaggaagagagccaagcagttccatgaagcttggagtaaacttatggagtggctagaagagtcagaaaagtctttggattctgaactggaaatcgcaaatgatccagacaaaataaaaacacaacttgcacaacataaggagtttcagaaatcactcggagccaagcattctgtctacgacaccaccaacaggactggacgttctctgaaggagaaaacctccctggctgatgacaacctgaaactggatgacatgctgagtgaactcagagacaaatgggataccatatgtggaaaatctgtggaaagacaaaacaaattggaggaagccctgttattttctggacaattcacagatgccctacaggctctcattgattggttatatagagttgaaccccagctggcagaagaccagcctgttcatggagacattgatttggtgatgaatctgatcgataatcacaaggccttccaaaaagagttggggaagaggaccagcagtgtgcaggccctgaagcgctcagcccgagaactcatagaaggcagtcgggatgactcctcctgggtcaaggtccagatgcaggaattaagcacacgctgggagaccgtgtgtgcactttctatatcaaagcaaacacggttagaagcagccctgcgtcaggcagaggaattccactcggtggtacatgccctcttggagtggctggctgaggcggagcaaaccctgcgtttccatggtgtcctcccagatgatgaggatgctctccggactctcattgatcagcataaagaattcatgaagaaactggaagaaaagagagctgaactaaataaagccaccactatgggcgacaccgttttggctatctgccaccccgactccatcactaccattaagcactggataacaatcatccgggcgaggtttgaggaggtgctggcctgggcaaagcaacatcagcagagattagcaagtgctctggctgggcttattgccaaacaggaattgttggaagctttgctggcttggttgcaatgggctgaaactacacttactgataaggataaagaagtcatcccccaggagatcgaagaggtgaaagcactcattgcagaacaccagaccttcatggaggaaatgaccagaaaacagcctgatgttgataaagtaacgaagacctataagaggagagctgctgatccttcctcattacaatcccatattccagtcttggataagggacgagcaggaagaaaacgctttccagcatcaagcttgtatccctctgggtcacagacacaaattgaaaccaaaaatcctagggtaaacttactggtgagcaaatggcagcaagtctggctcctggcgttggaaagaaggaggaaactcaatgatgccttggacagactagaggagctgagggaatttgctaactttgattttgatatctggcgcaaaaaatacatgcgatggatgaatcacaagaaatctcgagtgatggacttcttcaggagaattgataaagaccaggatgggaaaataacgcggcaggaatttattgatggaattctttcctcaaagtttccaaccagtcgcttggagatgagcgcagttgcagacatctttgacagagatggcgatggatatattgactactatgaatttgtagcagcccttcacccaaataaagatgcatataaacctatcacagatgccgacaaaatcgaagatgaggtgacaaggcaggtagctaagtgtaaatgtgcaaagcgatttcaagttgagcagattggtgataataaatacaggttcttcctgggaaatcagtttggagactcccagcaactgcgactggtccggatcctgcggagtactgtgatggttcgtgttggaggtggatggatggcacttgatgagttcttagtgaaaaatgatccttgcagggccaaaggaaggacaaacatggaactgcgtgagaagttcattttagcagatggtgccagccagggtatggctgctttccgaccccgaggccgaagatcccggccatcatcacgaggcgcttcacccaacagatccacttctgtgtccagtcaggctgcgcaggcggcctccccacaggtccctgccaccaccacacccaagattctccatcctttaacacgcaattatggtaaaccatggttgacaaacagcaaaatgtcaactccttgtaaagcagcagagtgctcagactttcccgtgccatctgcagagggaacgccaatacaaggaagcaagcttcgacttccaggatatttatcagggaaaggcttccactctggggaggacagtggcttgataacaactgcagctgccagagtccgaacacagtttgctgattccaagaagactcccagccgaccaggaagtcgagctggaagcaaagctggcagcagggccagcagccgccgaggcagtgatgcatcagactttgacatttcagaaatccagtccgtgtgctcagatgtggaaactgtcccccagacacacagacctacaccccgagcaggttctcggccatccacagcgaagccttcaaaaatccccacgccccagaggaaatcacctgccagcaaattggacaagtcctcaaagagatagtgcaattggttctaccaaggcccttccttgagcatttattatttaagtttgaacgatgtaaaatatggtgtagaaattcttgtgaaatattgcaagaggcgagtttaaaattctgcagatggccttatttgtgtatttgtctttttattttatctgtataattttttttgtcagatattctggggttaaagtcacatcatatgtgaggaggaaaagtttaacatgaactaacatttctgcactgtaacgtgccgggcacacactaaactcagttactgtacctacaggtaagtctacatcctctctgacagccacagcactacatcaatccctgacgttagggatacctcatgacattttcctgtttttatggaaactctgagaagctgaatgatacatgcaggggatattttttgagatgatttaaatgtaaaccaaaagatggaagacaaaaagacaaacacacccacacgcagtctttgcagtatctgacagagaactcacaggaagttacttcaagcacttgccagtactatgatattcaagtaccttgcagcatttctctgccattgctttcaatgaggccagaggcatcctggatattagacctattatactgtaagaatataagtataaagtgcgttcatatacatgtgaggttttcttttgcttgagtggacagtagcacctgtatcattgaactcattttgtatcagagcaattttgcttgcagaaagctatgaaataaaacacgtcccttaactgcattgctatggaattaattttttttccccagggaaaactagtgtatttttttatgagcaatatcaatttggagtgaccaaaagatacttaaaaatgggtttattttgatttctcatctgaaataatcatgttctggtattatatctatctatatttaataaatatatacattttaatttattatgtgtactcacatactatagaaagatattagtatgcatttaataaaacatattcacttgaatatatggaatac

SEQ ID NO: 310061 - DNA, 3709 bp, Homo sapiens
  misc_feature (23)..(23): n is a, c, g, or t
ctaacacaggatacctacctggngcaatttcctgacataaagaatcgcatcgccaagcagttccatgaagcttggagtaaacttatggagtggctagaagagtcagaaaagtctttggattctgaactggaaatcgcaaatgatccagacaaaataaaaacacaacttgcacaacataaggagtttcagaaatcactcggagccaagcattctgtctacgacaccaccaacaggactggacgttctctgaaggagaaaacctccctggctgatgacaacctgaaactggatgacatgctgagtgaactcagagacaaatgggataccatatgtggaaaatctgtggaaagacaaaacaaattggaggaagccctgttattttctggacaattcacagatgccctacaggctctcattgattggttatatagagttgaaccccagctggcagaagaccagcctgttcatggagacattgatttggtgatgaatctgatcgataatcacaaggccttccaaaaagagttggggaagaggaccagcagtgtgcaggccctgaagcgctcagcccgagaactcatagaaggcagtcgggatgactcctcctgggtcaaggtccagatgcaggaattaagcacacgctgggagaccgtgtgtgcactttctatatcaaagcaaacacggttagaagcagccctgcgtcaggcagaggaattccactcggtggtacatgccctcttggagtggctggctgaggcggagcaaaccctgcgtttccatggtgtcctcccagatgatgaggatgctctccggactctcattgatcagcataaagaattcatgaagaaactggaagaaaagagagctgaactaaataaagccaccactatgggcgacaccgttttggctatctgccaccccgactccatcactaccattaagcactggataacaatcatccgggcgaggtttgaggaggtgctggcctgggcaaagcaacatcagcagagattagcaagtgctctggctgggcttattgccaaacaggaattgttggaagctttgctggcttggttgcaatgggctgaaactacacttactgataaggataaagaagtcatcccccaggagatcgaagaggtgaaagcactcattgcagaacaccagaccttcatggaggaaatgaccagaaaacagcctgatgttgataaagtaacgaagacctataagaggagagctgctgatccttcctcattacaatcccatattccagtcttggataagggacgagcaggaagaaaacgctttccagcatcaagcttgtatccctctgggtcacagacacaaattgaaaccaaaaatcctagggtaaacttactggtgagcaaatggcagcaagtctggctcctggcgttggaaagaaggaggaaactcaatgatgccttggacagactagaggagctgagggaatttgctaactttgattttgatatctggcgcaaaaaatacatgcgatggatgaatcacaagaaatctcgagtgatggacttcttcaggagaattgataaagaccaggatgggaaaataacgcggcaggaatttattgatggaattctttcctcaaagtttccaaccagtcgcttggagatgagcgcagttgcagacatctttgacagagatggcgatggatatattgactactatgaatttgtagcagcccttcacccaaataaagatgcatataaacctatcacagatgccgacaaaatcgaagatgaggtgacaaggcaggtagctaagtgtaaatgtgcaaagcgatttcaagttgagcagattggtgataataaatacaggttcttcctgggaaatcagtttggagactcccagcaactgcgactggtccggatcctgcggagtactgtgatggttcgtgttggaggtggatggatggcacttgatgagttcttagtgaaaaatgatccttgcagggccaaaggaaggacaaacatggaactgcgtgagaagttcattttagcagatggtgccagccagggtatggctgctttccgaccccgaggccgaagatcccggccatcatcacgaggcgcttcacccaacagatccacttctgtgtccagtcaggctgcgcaggcggcctccccacaggtccctgccaccaccacacccaagattctccatcctttaacacgcaattatggtaaaccatggttgacaaacagcaaaatgtcaactccttgtaaagcagcagagtgctcagactttcccgtgccatctgcagagggaacgccaatacaaggaagcaagcttcgacttccaggatatttatcagggaaaggcttccactctggggaggacagtggcttgataacaactgcagctgccagagtccgaacacagtttgctgattccaagaagactcccagccgaccaggaagtcgagctggaagcaaagctggcagcagggccagcagccgccgaggcagtgatgcatcagactttgacatttcagaaatccagtccgtgtgctcagatgtggaaactgtcccccagacacacagacctacaccccgagcaggttctcggccatccacagcgaagccttcaaaaatccccacgccccagaggaaatcacctgccagcaaattggacaagtcctcaaagagatagtgcaattggttctaccaaggcccttccttgagcatttattatttaagtttgaacgatgtaaaatatggtgtagaaattcttgtgaaatattgcaagaggcgagtttaaaattctgcagatggccttatttgtgtatttgtctttttattttatctgtataattttttttgtcagatattctggggttaaagtcacatcatatgtgaggaggaaaagtttaacatgaactaacatttctgcactgtaacgtgccgggcacacactaaactcagttactgtacctacaggtaagtctacatcctctctgacagccacagcactacatcaatccctgacgttagggatacctcatgacattttcctgtttttatggaaactctgagaagctgaatgatacatgcaggggatattttttgagatgatttaaatgtaaaccaaaagatggaagacaaaaagacaaacacacccacacgcagtctttgcagtatctgacagagaactcacaggaagttacttcaagcacttgccagtactatgatattcaagtaccttgcagcatttctctgccattgctttcaatgaggccagaggcatcctggatattagacctattatactgtaagaatataagtataaagtgcgttcatatacatgtgaggttttcttttgcttgagtggacagtagcacctgtatcattgaactcattttgtatcagagcaattttgcttgcagaaagctatgaaataaaacacgtcccttaactgcattgctatggaattaattttttttccccagggaaaactagtgtatttttttatgagcaatatcaatttggagtgaccaaaagatacttaaaaatgggtttattttgatttctcatctgaaataatcatgttctggtattatatctatctatatttaataaatatatacattttaatttattatgtgtactcacatactatagaaagatattagtatgcatttaataaaacatattcacttgaatatatggaatac

SEQ ID NO: 310062 - DNA, 3646 bp, Homo sapiens
gaatcgtcagttggaaggtatctcggtggtagcacagcaatttcatgaaaccttagaaccactgaacgagtggcttacaaccatagaaaagaggctggtgaattgtgaacccataggaacccaagcatctaaacttgaggaacaaattgcacagcacaaagccttagaagatgacatcatcaatcacaataaacatttacaccaggtgatgacaacctgaaactggatgacatgctgagtgaactcagagacaaatgggataccatatgtggaaaatctgtggaaagacaaaacaaattggaggaagccctgttattttctggacaattcacagatgccctacaggctctcattgattggttatatagagttgaaccccagctggcagaagaccagcctgttcatggagacattgatttggtgatgaatctgatcgataatcacaaggccttccaaaaagagttggggaagaggaccagcagtgtgcaggccctgaagcgctcagcccgagaactcatagaaggcagtcgggatgactcctcctgggtcaaggtccagatgcaggaattaagcacacgctgggagaccgtgtgtgcactttctatatcaaagcaaacacggttagaagcagccctgcgtcaggcagaggaattccactcggtggtacatgccctcttggagtggctggctgaggcggagcaaaccctgcgtttccatggtgtcctcccagatgatgaggatgctctccggactctcattgatcagcataaagaattcatgaagaaactggaagaaaagagagctgaactaaataaagccaccactatgggcgacaccgttttggctatctgccaccccgactccatcactaccattaagcactggataacaatcatccgggcgaggtttgaggaggtgctggcctgggcaaagcaacatcagcagagattagcaagtgctctggctgggcttattgccaaacaggaattgttggaagctttgctggcttggttgcaatgggctgaaactacacttactgataaggataaagaagtcatcccccaggagatcgaagaggtgaaagcactcattgcagaacaccagaccttcatggaggaaatgaccagaaaacagcctgatgttgataaagtaacgaagacctataagaggagagctgctgatccttcctcattacaatcccatattccagtcttggataagggacgagcaggaagaaaacgctttccagcatcaagcttgtatccctctgggtcacagacacaaattgaaaccaaaaatcctagggtaaacttactggtgagcaaatggcagcaagtctggctcctggcgttggaaagaaggaggaaactcaatgatgccttggacagactagaggagctgagggaatttgctaactttgattttgatatctggcgcaaaaaatacatgcgatggatgaatcacaagaaatctcgagtgatggacttcttcaggagaattgataaagaccaggatgggaaaataacgcggcaggaatttattgatggaattctttcctcaaagtttccaaccagtcgcttggagatgagcgcagttgcagacatctttgacagagatggcgatggatatattgactactatgaatttgtagcagcccttcacccaaataaagatgcatataaacctatcacagatgccgacaaaatcgaagatgaggtgacaaggcaggtagctaagtgtaaatgtgcaaagcgatttcaagttgagcagattggtgataataaatacaggttcttcctgggaaatcagtttggagactcccagcaactgcgactggtccggatcctgcggagtactgtgatggttcgtgttggaggtggatggatggcacttgatgagttcttagtgaaaaatgatccttgcagggccaaaggaaggacaaacatggaactgcgtgagaagttcattttagcagatggtgccagccagggtatggctgctttccgaccccgaggccgaagatcccggccatcatcacgaggcgcttcacccaacagatccacttctgtgtccagtcaggctgcgcaggcggcctccccacaggtccctgccaccaccacacccaagattctccatcctttaacacgcaattatggtaaaccatggttgacaaacagcaaaatgtcaactccttgtaaagcagcagagtgctcagactttcccgtgccatctgcagagggaacgccaatacaaggaagcaagcttcgacttccaggatatttatcagggaaaggcttccactctggggaggacagtggcttgataacaactgcagctgccagagtccgaacacagtttgctgattccaagaagactcccagccgaccaggaagtcgagctggaagcaaagctggcagcagggccagcagccgccgaggcagtgatgcatcagactttgacatttcagaaatccagtccgtgtgctcagatgtggaaactgtcccccagacacacagacctacaccccgagcaggttctcggccatccacagcgaagccttcaaaaatccccacgccccagaggaaatcacctgccagcaaattggacaagtcctcaaagagatagtgcaattggttctaccaaggcccttccttgagcatttattatttaagtttgaacgatgtaaaatatggtgtagaaattcttgtgaaatattgcaagaggcgagtttaaaattctgcagatggccttatttgtgtatttgtctttttattttatctgtataattttttttgtcagatattctggggttaaagtcacatcatatgtgaggaggaaaagtttaacatgaactaacatttctgcactgtaacgtgccgggcacacactaaactcagttactgtacctacaggtaagtctacatcctctctgacagccacagcactacatcaatccctgacgttagggatacctcatgacattttcctgtttttatggaaactctgagaagctgaatgatacatgcaggggatattttttgagatgatttaaatgtaaaccaaaagatggaagacaaaaagacaaacacacccacacgcagtctttgcagtatctgacagagaactcacaggaagttacttcaagcacttgccagtactatgatattcaagtaccttgcagcatttctctgccattgctttcaatgaggccagaggcatcctggatattagacctattatactgtaagaatataagtataaagtgcgttcatatacatgtgaggttttcttttgcttgagtggacagtagcacctgtatcattgaactcattttgtatcagagcaattttgcttgcagaaagctatgaaataaaacacgtcccttaactgcattgctatggaattaattttttttccccagggaaaactagtgtatttttttatgagcaatatcaatttggagtgaccaaaagatacttaaaaatgggtttattttgatttctcatctgaaataatcatgttctggtattatatctatctatatttaataaatatatacattttaatttattatgtgtactcacatactatagaaagatattagtatgcatttaataaaacatattcacttgaatatatggaatac

SEQ ID NO: 310063 - DNA, 4358 bp, Homo sapiens
caaccttcagaacaagctagaggttttaaatcaacgctggcaaaatgttttggaaaaaacagaacaaaggaagcagcagctggatggtgccttgcgccaggccaaagggttccatggcgaaattgaggatttgcagcagtggctgactgacacggagcgtcatctgttggcatctaaaccgctgggaggtttaccggaaacagccaaggagcagcttaatgtccatatggaagtctgtgctgcctttgaagctaaagaagaaacatataagagtctgatgcagaaaggccagcagatgcttgcaagatgcccaaaatctgcagagacaaatattgaccaagacataaataacttgaaagaaaaatgggaatcggtggaaaccaaactcaatgaaaggaaaactaaactggaagaggctctcaacttggcaatggagttccacaattctctccaagacttcatcaactggcttactcaggctgaacagaccctaaatgtagcttctcggccaagtctcatcttggacacagtcttatttcaaattgacgaacacaaggtttttgccaatgaagtaaattctcatcgtgagcagataatagagctggacaaaactggaacccacctaaaatattttagtcagaaacaagatgttgttctaatcaagaatctacttatcagtgtacaaagtcgatgggaaaaagtggttcaacggttggtagagagaggaagatctttggatgatgcaaggaagagagccaagcagttccatgaagcttggagtaaacttatggagtggctagaagagtcagaaaagtctttggattctgaactggaaatcgcaaatgatccagacaaaataaaaacacaacttgcacaacataaggagtttcagaaatcactcggagccaagcattctgtctacgacaccaccaacaggactggacgttctctgaaggagaaaacctccctggctgatgacaacctgaaactggatgacatgctgagtgaactcagagacaaatgggataccatatgtggaaaatctgtggaaagacaaaacaaattggaggaagccctgttattttctggacaattcacagatgccctacaggctctcattgattggttatatagagttgaaccccagctggcagaagaccagcctgttcatggagacattgatttggtgatgaatctgatcgataatcacaaggccttccaaaaagagttggggaagaggaccagcagtgtgcaggccctgaagcgctcagcccgagaactcatagaaggcagtcgggatgactcctcctgggtcaaggtccagatgcaggaattaagcacacgctgggagaccgtgtgtgcactttctatatcaaagcaaacacggttagaagcagccctgcgtcaggcagaggaattccactcggtggtacatgccctcttggagtggctggctgaggcggagcaaaccctgcgtttccatggtgtcctcccagatgatgaggatgctctccggactctcattgatcagcataaagaattcatgaagaaactggaagaaaagagagctgaactaaataaagccaccactatgggcgacaccgttttggctatctgccaccccgactccatcactaccattaagcactggataacaatcatccgggcgaggtttgaggaggtgctggcctgggcaaagcaacatcagcagagattagcaagtgctctggctgggcttattgccaaacaggaattgttggaagctttgctggcttggttgcaatgggctgaaactacacttactgataaggataaagaagtcatcccccaggagatcgaagaggtgaaagcactcattgcagaacaccagaccttcatggaggaaatgaccagaaaacagcctgatgttgataaagtaacgaagacctataagaggagagctgctgatccttcctcattacaatcccatattccagtcttggataagggacgagcaggaagaaaacgctttccagcatcaagcttgtatccctctgggtcacagacacaaattgaaaccaaaaatcctagggtaaacttactggtgagcaaatggcagcaagtctggctcctggcgttggaaagaaggaggaaactcaatgatgccttggacagactagaggagctgagggaatttgctaactttgattttgatatctggcgcaaaaaatacatgcgatggatgaatcacaagaaatctcgagtgatggacttcttcaggagaattgataaagaccaggatgggaaaataacgcggcaggaatttattgatggaattctttcctcaaagtttccaaccagtcgcttggagatgagcgcagttgcagacatctttgacagagatggcgatggatatattgactactatgaatttgtagcagcccttcacccaaataaagatgcatataaacctatcacagatgccgaatttcaagttgagcagattggtgataataaatacaggttcttcctgggaaatcagtttggagactcccagcaactgcgactggtccggatcctgcggagtactgtgatggttcgtgttggaggtggatggatggcacttgatgagttcttagtgaaaaatgatccttgcagggccaaaggaaggacaaacatggaactgcgtgagaagttcattttagcagatggtgccagccagggtatggctgctttccgaccccgaggccgaagatcccggccatcatcacgaggcgcttcacccaacagatccacttctgtgtccagtcaggctgcgcaggcggcctccccacaggtccctgccaccaccacacccaagattctccatcctttaacacgcaattatggtaaaccatggttgacaaacagcaaaatgtcaactccttgtaaagcagcagagtgctcagactttcccgtgccatctgcagagggaacgccaatacaaggaagcaagcttcgacttccaggatatttatcagggaaaggcttccactctggggaggacagtggcttgataacaactgcagctgccagagtccgaacacagtttgctgattccaagaagactcccagccgaccaggaagtcgagctggaagcaaagctggcagcagggccagcagccgccgaggcagtgatgcatcagactttgacatttcagaaatccagtccgtgtgctcagatgtggaaactgtcccccagacacacagacctacaccccgagcaggttctcggccatccacagcgaagccttcaaaaatccccacgccccagaggaaatcacctgccagcaaattggacaagtcctcaaagagatagtgcaattggttctaccaaggcccttccttgagcatttattatttaagtttgaacgatgtaaaatatggtgtagaaattcttgtgaaatattgcaagaggcgagtttaaaattctgcagatggccttatttgtgtatttgtctttttattttatctgtataattttttttgtcagatattctggggttaaagtcacatcatatgtgaggaggaaaagtttaacatgaactaacatttctgcactgtaacgtgccgggcacacactaaactcagttactgtacctacaggtaagtctacatcctctctgacagccacagcactacatcaatccctgacgttagggatacctcatgacattttcctgtttttatggaaactctgagaagctgaatgatacatgcaggggatattttttgagatgatttaaatgtaaaccaaaagatggaagacaaaaagacaaacacacccacacgcagtctttgcagtatctgacagagaactcacaggaagttacttcaagcacttgccagtactatgatattcaagtaccttgcagcatttctctgccattgctttcaatgaggccagaggcatcctggatattagacctattatactgtaagaatataagtataaagtgcgttcatatacatgtgaggttttcttttgcttgagtggacagtagcacctgtatcattgaactcattttgtatcagagcaattttgcttgcagaaagctatgaaataaaacacgtcccttaactgcattgctatggaattaattttttttccccagggaaaactagtgtatttttttatgagcaatatcaatttggagtgaccaaaagatacttaaaaatgggtttattttgatttctcatctgaaataatcatgttctggtattatatctatctatatttaataaatatatacattttaatttattatgtgtactcacatactatagaaagatattagtatgcatttaataaaacatattcacttgaatatatggaatac

SEQ ID NO: 310064 - DNA, 5404 bp, Homo sapiens
caaccttcagaacaagctagaggttttaaatcaacgctggcaaaatgttttggaaaaaacagaacaaaggaagcagcagctggatggtgccttgcgccaggccaaagggttccatggcgaaattgaggatttgcagcagtggctgactgacacggagcgtcatctgttggcatctaaaccgctgggaggtttaccggaaacagccaaggagcagcttaatgtccatatggaagtctgtgctgcctttgaagctaaagaagaaacatataagagtctgatgcagaaaggccagcagatgcttgcaagatgcccaaaatctgcagagacaaatattgaccaagacataaataacttgaaagaaaaatgggaatcggtggaaaccaaactcaatgaaaggaaaactaaactggaagaggctctcaacttggcaatggagttccacaattctctccaagacttcatcaactggcttactcaggctgaacagaccctaaatgtagcttctcggccaagtctcatcttggacacagtcttatttcaaattgacgaacacaaggtttttgccaatgaagtaaattctcatcgtgagcagataatagagctggacaaaactggaacccacctaaaatattttagtcagaaacaagatgttgttctaatcaagaatctacttatcagtgtacaaagtcgatgggaaaaagtggttcaacggttggtagagagaggaagatctttggatgatgcaaggaagagagccaagcagttccatgaagcttggagtaaacttatggagtggctagaagagtcagaaaagtctttggattctgaactggaaatcgcaaatgatccagacaaaataaaaacacaacttgcacaacataaggagtttcagaaatcactcggagccaagcattctgtctacgacaccaccaacaggactggacgttctctgaaggagaaaacctccctggctgatgacaacctgaaactggatgacatgctgagtgaactcagagacaaatgggataccatatgtggaaaatctgtggaaagacaaaacaaattggaggaagccctgttattttctggacaattcacagatgccctacaggctctcattgattggttatatagagttgaaccccagctggcagaagaccagcctgttcatggagacattgatttggtgatgaatctgatcgataatcacaaggccttccaaaaagagttggggaagaggaccagcagtgtgcaggccctgaagcgctcagcccgagaactcatagaaggcagtcgggatgactcctcctgggtcaaggtccagatgcaggaattaagcacacgctgggagaccgtgtgtgcactttctatatcaaagcaaacacggttagaagcagccctgcgtcaggcagaggaattccactcggtggtacatgccctcttggagtggctggctgaggcggagcaaaccctgcgtttccatggtgtcctcccagatgatgaggatgctctccggactctcattgatcagcataaagaattcatgaagaaactggaagaaaagagagctgaactaaataaagccaccactatgggcgacaccgttttggctatctgccaccccgactccatcactaccattaagcactggataacaatcatccgggcgaggtttgaggaggtgctggcctgggcaaagcaacatcagcagagattagcaagtgctctggctgggcttattgccaaacaggaattgttggaagctttgctggcttggttgcaatgggctgaaactacacttactgataaggataaagaagtcatcccccaggagatcgaagaggtgaaagcactcattgcagaacaccagaccttcatggaggaaatgaccagaaaacagcctgatgttgataaagtaacgaagacctataagaggagagctgctgatccttcctcattacaatcccatattccagtcttggataagggacgagcaggaagaaaacgctttccagcatcaagcttgtatccctctgggtcacagacacaaattgaaaccaaaaatcctagggtaaacttactggtgagcaaatggcagcaagtctggctcctggcgttggaaagaaggaggaaactcaatgatgccttggacagactagaggagctgagggaatttgctaactttgattttgatatctggcgcaaaaaatacatgcgatggatgaatcacaagaaatctcgagtgatggacttcttcaggagaattgataaagaccaggatgggaaaataacgcggcaggaatttattgatggaattctttcctcaaagtttccaaccagtcgcttggagatgagcgcagttgcagacatctttgacagagatggcgatggatatattgactactatgaatttgtagcagcccttcacccaaataaagatgcatataaacctatcacagatgccgacaaaatcgaagatgaggtgacaaggcaggtagctaagtgtaaatgtgcaaagcgatttcaagttgagcagattggtgataataaatacaggttcttcctgggaaatcagtttggagactcccagcaactgcgactggtccggatcctgcggagtactgtgatggttcgtgttggaggtggatggatggcacttgatgagttcttagtgaaaaatgatccttgcagggttcatcatcatgggagtaaaatgttacgttcggaatcaaactcttcaattactactactcagcctactataggttggcaacctctctctttgcctctcccctctttccttttctctttcctacttttccattcttgcttcagtcatttgttttaaaataacatgcttcatccatcgcgtatggcttaactcatatccagctgagctggtgcttccaaatttaaattctgaaaatttgatgactttggttgtgttacacatgcaggtgttataagtgatcaaacacatgctaacacgttgctcaccgggttcttgtggagtgttctccgtgtgcgtatgtgtttgtatgagtgctgcatcactgactacctcacagatccttgggtctggtgtttgttattgcatgttggtaaaacagtttttcaaggcataaaataaaaatactagctgcctcatttaagtgaaaaatccagaagtttatatgttgtcatcatgactaacaagccatcaatcattgtgtgtaattatattctttaatttatccccatgttgaaatactggcattctctttacctcaatagtacatgcaaaagacacagtccctgccttactggtctgtcttctcagtgtgatgagagggtaatgaaaccatgtgggcatctgtagctggtggattaatgatattttagcatgagctttccattttcatgctgacactttctttaatagtggttattcttgctggtgtctagtgttagaataagcacactttattttttcctccccgaactcacctgtatccaaaaggaatgcattgtaaaggaatgcatttaactttttgttatgctgagttggagttggcatggcaaaaagatgttcttgaaattctcaacgtgatctctggtgccaggtggccgttcttcccattaacgattgagcgcctcttcttttccgtcttttctttgtgtgcattgttgtgtgtgtataacccagccaaaggaaggacaaacatggaactgcgtgagaagttcattttagcagatggtgccagccagggtatggctgctttccgaccccgaggccgaagatcccggccatcatcacgaggcgcttcacccaacagatccacttctgtgtccagtcaggctgcgcaggcggcctccccacaggtccctgccaccaccacacccaagattctccatcctttaacacgcaattatggtaaaccatggttgacaaacagcaaaatgtcaactccttgtaaagcagcagagtgctcagactttcccgtgccatctgcagagggaacgccaatacaaggaagcaagcttcgacttccaggatatttatcagggaaaggcttccactctggggaggacagtggcttgataacaactgcagctgccagagtccgaacacagtttgctgattccaagaagactcccagccgaccaggaagtcgagctggaagcaaagctggcagcagggccagcagccgccgaggcagtgatgcatcagactttgacatttcagaaatccagtccgtgtgctcagatgtggaaactgtcccccagacacacagacctacaccccgagcaggttctcggccatccacagcgaagccttcaaaaatccccacgccccagaggaaatcacctgccagcaaattggacaagtcctcaaagagatagtgcaattggttctaccaaggcccttccttgagcatttattatttaagtttgaacgatgtaaaatatggtgtagaaattcttgtgaaatattgcaagaggcgagtttaaaattctgcagatggccttatttgtgtatttgtctttttattttatctgtataattttttttgtcagatattctggggttaaagtcacatcatatgtgaggaggaaaagtttaacatgaactaacatttctgcactgtaacgtgccgggcacacactaaactcagttactgtacctacaggtaagtctacatcctctctgacagccacagcactacatcaatccctgacgttagggatacctcatgacattttcctgtttttatggaaactctgagaagctgaatgatacatgcaggggatattttttgagatgatttaaatgtaaaccaaaagatggaagacaaaaagacaaacacacccacacgcagtctttgcagtatctgacagagaactcacaggaagttacttcaagcacttgccagtactatgatattcaagtaccttgcagcatttctctgccattgctttcaatgaggccagaggcatcctggatattagacctattatactgtaagaatataagtataaagtgcgttcatatacatgtgaggttttcttttgcttgagtggacagtagcacctgtatcattgaactcattttgtatcagagcaattttgcttgcagaaagctatgaaataaaacacgtcccttaactgcattgctatggaattaattttttttccccagggaaaactagtgtatttttttatgagcaatatcaatttggagtgaccaaaagatacttaaaaatgggtttattttgatttctcatctgaaataatcatgttctggtattatatctatctatatttaataaatatatacattttaatttattatgtgtactcacatactatagaaagatattagtatgcatttaataaaacatattcacttgaatatatggaatac

SEQ ID NO: 310065 - DNA, 2906 bp, Homo sapiens
gactacaggcgtgcaccaccatgcctggttaatttttgtaattttagtagaaatggggtttcaccatattggtcaggctggtctcaaactcctgacctcaggtgatccacctgccttggcctcccaaagtgctgggattacaggcatgagccactgcacctggccacattttatattctttagaaattagtaaatgcctgcagtatgatggtttagattttttttaccctaaagataaagcatatgatttattcttcttcagaaataataacatggttcttttatccttctgcttttagttcatttctaaagacggttttctgtagtaactcttatttgattgacatcatttctttcatttcagaccttcatggaggaaatgaccagaaaacagcctgatgttgataaagtaacgaagacctataagaggagagctgctgatccttcctcattacaatcccatattccagtcttggataagggacgagcaggaagaaaacgctttccagcatcaagcttgtatccctctgggtcacagacacaaattgaaaccaaaaatcctagggtaaacttactggtgagcaaatggcagcaagtctggctcctggcgttggaaagaaggaggaaactcaatgatgccttggacagactagaggagctgagggaatttgctaactttgattttgatatctggcgcaaaaaatacatgcgatggatgaatcacaagaaatctcgagtgatggacttcttcaggagaattgataaagaccaggatgggaaaataacgcggcaggaatttattgatggaattctttcctcaaagtttccaaccagtcgcttggagatgagcgcagttgcagacatctttgacagagatggcgatggatatattgactactatgaatttgtagcagcccttcacccaaataaagatgcatataaacctatcacagatgccgacaaaatcgaagatgaggtgacaaggcaggtagctaagtgtaaatgtgcaaagcgatttcaagttgagcagattggtgataataaatacaggttcttcctgggaaatcagtttggagactcccagcaactgcgactggtccggatcctgcggagtactgtgatggttcgtgttggaggtggatggatggcacttgatgagttcttagtgaaaaatgatccttgcagggccaaaggaaggacaaacatggaactgcgtgagaagttcattttagcagatggtgccagccagggtatggctgctttccgaccccgaggccgaagatcccggccatcatcacgaggcgcttcacccaacagatccacttctgtgtccagtcaggctgcgcaggcggcctccccacaggtccctgccaccaccacacccaagattctccatcctttaacacgcaattatggtaaaccatggttgacaaacagcaaaatgtcaactccttgtaaagcagcagagtgctcagactttcccgtgccatctgcagagggaacgccaatacaaggaagcaagcttcgacttccaggatatttatcagggaaaggcttccactctggggaggacagtggcttgataacaactgcagctgccagagtccgaacacagtttgctgattccaagaagactcccagccgaccaggaagtcgagctggaagcaaagctggcagcagggccagcagccgccgaggcagtgatgcatcagactttgacatttcagaaatccagtccgtgtgctcagatgtggaaactgtcccccagacacacagacctacaccccgagcaggttctcggccatccacagcgaagccttcaaaaatccccacgccccagaggaaatcacctgccagcaaattggacaagtcctcaaagagatagtgcaattggttctaccaaggcccttccttgagcatttattatttaagtttgaacgatgtaaaatatggtgtagaaattcttgtgaaatattgcaagaggcgagtttaaaattctgcagatggccttatttgtgtatttgtctttttattttatctgtataattttttttgtcagatattctggggttaaagtcacatcatatgtgaggaggaaaagtttaacatgaactaacatttctgcactgtaacgtgccgggcacacactaaactcagttactgtacctacaggtaagtctacatcctctctgacagccacagcactacatcaatccctgacgttagggatacctcatgacattttcctgtttttatggaaactctgagaagctgaatgatacatgcaggggatattttttgagatgatttaaatgtaaaccaaaagatggaagacaaaaagacaaacacacccacacgcagtctttgcagtatctgacagagaactcacaggaagttacttcaagcacttgccagtactatgatattcaagtaccttgcagcatttctctgccattgctttcaatgaggccagaggcatcctggatattagacctattatactgtaagaatataagtataaagtgcgttcatatacatgtgaggttttcttttgcttgagtggacagtagcacctgtatcattgaactcattttgtatcagagcaattttgcttgcagaaagctatgaaataaaacacgtcccttaactgcattgctatggaattaattttttttccccagggaaaactagtgtatttttttatgagcaatatcaatttggagtgaccaaaagatacttaaaaatgggtttattttgatttctcatctgaaataatcatgttctggtattatatctatctatatttaataaatatatacattttaatttattatgtgtactcacatactatagaaagatattagtatgcatttaataaaacatattcacttgaatatatggaatac

SEQ ID NO: 310066 - DNA, 4484 bp, Homo sapiens
caaccttcagaacaagctagaggttttaaatcaacgctggcaaaatgttttggaaaaaacagaacaaaggaagcagcagctggatggtgccttgcgccaggccaaagggttccatggcgaaattgaggatttgcagcagtggctgactgacacggagcgtcatctgttggcatctaaaccgctgggaggtttaccggaaacagccaaggagcagcttaatgtccatatggaagtctgtgctgcctttgaagctaaagaagaaacatataagagtctgatgcagaaaggccagcagatgcttgcaagatgcccaaaatctgcagagacaaatattgaccaagacataaataacttgaaagaaaaatgggaatcggtggaaaccaaactcaatgaaaggaaaactaaactggaagaggctctcaacttggcaatggagttccacaattctctccaagacttcatcaactggcttactcaggctgaacagaccctaaatgtagcttctcggccaagtctcatcttggacacagtcttatttcaaattgacgaacacaaggtttttgccaatgaagtaaattctcatcgtgagcagataatagagctggacaaaactggaacccacctaaaatattttagtcagaaacaagatgttgttctaatcaagaatctacttatcagtgtacaaagtcgatgggaaaaagtggttcaacggttggtagagagaggaagatctttggatgatgcaaggaagagagccaagcagttccatgaagcttggagtaaacttatggagtggctagaagagtcagaaaagtctttggattctgaactggaaatcgcaaatgatccagacaaaataaaaacacaacttgcacaacataaggagtttcagaaatcactcggagccaagcattctgtctacgacaccaccaacaggactggacgttctctgaaggagaaaacctccctggctgatgacaacctgaaactggatgacatgctgagtgaactcagagacaaatgggataccatatgtggaaaatctgtggaaagacaaaacaaattggaggaagccctgttattttctggacaattcacagatgccctacaggctctcattgattggttatatagagttgaaccccagctggcagaagaccagcctgttcatggagacattgatttggtgatgaatctgatcgataatcacaaggccttccaaaaagagttggggaagaggaccagcagtgtgcaggccctgaagcgctcagcccgagaactcatagaaggcagtcgggatgactcctcctgggtcaaggtccagatgcaggaattaagcacacgctgggagaccgtgtgtgcactttctatatcaaagcaaacacggttagaagcagccctgcgtcaggcagaggaattccactcggtggtacatgccctcttggagtggctggctgaggcggagcaaaccctgcgtttccatggtgtcctcccagatgatgaggatgctctccggactctcattgatcagcataaagaattcatgaagaaactggaagaaaagagagctgaactaaataaagccaccactatgggcgacaccgttttggctatctgccaccccgactccatcactaccattaagcactggataacaatcatccgggcgaggtttgaggaggtgctggcctgggcaaagcaacatcagcagagattagcaagtgctctggctgggcttattgccaaacaggaattgttggaagctttgctggcttggttgcaatgggctgaaactacacttactgataaggataaagaagtcatcccccaggagatcgaagaggtgaaagcactcattgcagaacaccagaccttcatggaggaaatgaccagaaaacagcctgatgttgataaagtaacgaagacctataagaggagagctgctgatccttcctcattacaatcccatattccagtcttggataagggacgagcaggaagaaaacgctttccagcatcaagcttgtatccctctgggtcacagacacaaattgaaaccaaaaatcctagggtaaacttactggtgagcaaatggcagcaagtctggctcctggcgttggaaagaaggaggaaactcaatgatgccttggacagactagaggagctgagggaatttgctaactttgattttgatatctggcgcaaaaaatacatgcgatggatgaatcacaagaaatctcgagtgatggacttcttcaggagaattgataaagaccaggatgggaaaataacgcggcaggaatttattgatggaattctttcctcaaagtttccaaccagtcgcttggagatgagcgcagttgcagacatctttgacagagatggcgatggatatattgactactatgaatttgtagcagcccttcacccaaataaagatgcatataaacctatcacagatgccgacaaaatcgaagatgaggtgacaaggcaggtagctaagtgtaaatgtgcaaagcgatttcaagttgagcagattggtgataataaatacaggttcttcctgggaaatcagtttggagactcccagcaactgcgactggtccggatcctgcggagtactgtgatggttcgtgttggaggtggatggatggcacttgatgagttcttagtgaaaaatgatccttgcagggttcatcatcatgggagtaaaatgttacgttcggaatcaaactcttcaattactactactcagcctactatagccaaaggaaggacaaacatggaactgcgtgagaagttcattttagcagatggtgccagccagggtatggctgctttccgaccccgaggccgaagatcccggccatcatcacgaggcgcttcacccaacagatccacttctgtgtccagtcaggctgcgcaggcggcctccccacaggtccctgccaccaccacacccaagattctccatcctttaacacgcaattatggtaaaccatggttgacaaacagcaaaatgtcaactccttgtaaagcagcagagtgctcagactttcccgtgccatctgcagagggaacgccaatacaaggaagcaagcttcgacttccaggatatttatcagggaaaggcttccactctggggaggacagtggcttgataacaactgcagctgccagagtccgaacacagtttgctgattccaagaagactcccagccgaccaggaagtcgagctggaagcaaagctggcagcagggccagcagccgccgaggcagtgatgcatcagactttgacatttcagaaatccagtccgtgtgctcagatgtggaaactgtcccccagacacacagacctacaccccgagcaggttctcggccatccacagcgaagccttcaaaaatccccacgccccagaggaaatcacctgccagcaaattggacaagtcctcaaagagatagtgcaattggttctaccaaggcccttccttgagcatttattatttaagtttgaacgatgtaaaatatggtgtagaaattcttgtgaaatattgcaagaggcgagtttaaaattctgcagatggccttatttgtgtatttgtctttttattttatctgtataattttttttgtcagatattctggggttaaagtcacatcatatgtgaggaggaaaagtttaacatgaactaacatttctgcactgtaacgtgccgggcacacactaaactcagttactgtacctacaggtaagtctacatcctctctgacagccacagcactacatcaatccctgacgttagggatacctcatgacattttcctgtttttatggaaactctgagaagctgaatgatacatgcaggggatattttttgagatgatttaaatgtaaaccaaaagatggaagacaaaaagacaaacacacccacacgcagtctttgcagtatctgacagagaactcacaggaagttacttcaagcacttgccagtactatgatattcaagtaccttgcagcatttctctgccattgctttcaatgaggccagaggcatcctggatattagacctattatactgtaagaatataagtataaagtgcgttcatatacatgtgaggttttcttttgcttgagtggacagtagcacctgtatcattgaactcattttgtatcagagcaattttgcttgcagaaagctatgaaataaaacacgtcccttaactgcattgctatggaattaattttttttccccagggaaaactagtgtatttttttatgagcaatatcaatttggagtgaccaaaagatacttaaaaatgggtttattttgatttctcatctgaaataatcatgttctggtattatatctatctatatttaataaatatatacattttaatttattatgtgtactcacatactatagaaagatattagtatgcatttaataaaacatattcacttgaatatatggaatac

SEQ ID NO: 310067 - DNA, 4363 bp, Homo sapiens
caaccttcagaacaagctagaggttttaaatcaacgctggcaaaatgttttggaaaaaacagaacaaaggaagcagcagctggatggtgccttgcgccaggccaaagggttccatggcgaaattgaggatttgcagcagtggctgactgacacggagcgtcatctgttggcatctaaaccgctgggaggtttaccggaaacagccaaggagcagcttaatgtccatatggaagtctgtgctgcctttgaagctaaagaagaaacatataagagtctgatgcagaaaggccagcagatgcttgcaagatgcccaaaatctgcagagacaaatattgaccaagacataaataacttgaaagaaaaatgggaatcggtggaaaccaaactcaatgaaaggaaaactaaactggaagaggctctcaacttggcaatggagttccacaattctctccaagacttcatcaactggcttactcaggctgaacagaccctaaatgtagcttctcggccaagtctcatcttggacacagtcttatttcaaattgacgaacacaaggtttttgccaatgaagtaaattctcatcgtgagcagataatagagctggacaaaactggaacccacctaaaatattttagtcagaaacaagatgttgttctaatcaagaatctacttatcagtgtacaaagtcgatgggaaaaagtggttcaacggttggtagagagaggaagatctttggatgatgcaaggaagagagccaagcagttccatgaagcttggagtaaacttatggagtggctagaagagtcagaaaagtctttggattctgaactggaaatcgcaaatgatccagacaaaataaaaacacaacttgcacaacataaggagtttcagaaatcactcggagccaagcattctgtctacgacaccaccaacaggactggacgttctctgaaggagaaaacctccctggctgatgacaacctgaaactggatgacatgctgagtgaactcagagacaaatgggataccatatgtggaaaatctgtggaaagacaaaacaaattggaggaagccctgttattttctggacaattcacagatgccctacaggctctcattgattggttatatagagttgaaccccagctggcagaagaccagcctgttcatggagacattgatttggtgatgaatctgatcgataatcacaaggccttccaaaaagagttggggaagaggaccagcagtgtgcaggccctgaagcgctcagcccgagaactcatagaaggcagtcgggatgactcctcctgggtcaaggtccagatgcaggaattaagcacacgctgggagaccgtgtgtgcactttctatatcaaagcaaacacggttagaagcagccctgcgtcaggcagaggaattccactcggtggtacatgccctcttggagtggctggctgaggcggagcaaaccctgcgtttccatggtgtcctcccagatgatgaggatgctctccggactctcattgatcagcataaagaattcatgaagaaactggaagaaaagagagctgaactaaataaagccaccactatgggcgacaccgttttggctatctgccaccccgactccatcactaccattaagcactggataacaatcatccgggcgaggtttgaggaggtgctggcctgggcaaagcaacatcagcagagattagcaagtgctctggctgggcttattgccaaacaggaattgttggaagctttgctggcttggttgcaatgggctgaaactacacttactgataaggataaagaagtcatcccccaggagatcgaagaggtgaaagcactcattgcagaacaccagaccttcatggaggaaatgaccagaaaacagcctgatgttgataaagtaacgaagacctataagaggagagctgctgatccttcctcattacaatcccatattccagtcttggataagggacgagcaggaagaaaacgctttccagcatcaagcttgtatccctctgggtcacagacacaaattgaaaccaaaaatcctagggtaaacttactggtgagcaaatggcagcaagtctggctcctggcgttggaaagaaggaggaaactcaatgatgccttggacagactagaggagctgagggaatttgctaactttgattttgatatctggcgcaaaaaatacatgcgatggatgaatcacaagaaatctcgagtgatggacttcttcaggagaattgataaagaccaggatgggaaaataacgcggcaggaatttattgatggaattctttcctcaaagtttccaaccagtcgcttggagatgagcgcagttgcagacatctttgacagagatggcgatggatatattgactactatgaatttgtagcagcccttcacccaaataaagatgcatataaacctatcacagatgccgacaaaatcgaagatgaggtgacaaggcaggtagctaagtgtaaatgtgcaaagcgatttcaagttgagcagattggtgataataaatacaggttcttcctgggaaatcagtttggagactcccagcaactgcgactggtccggatcctgcggagtactgtgatggttcgtgttggaggtggatggatggcacttgatgagttcttagtgaaaaatgatccttgcagggccaaaggaaggacaaacatggaactgcgtgagaagttcattttagcagatggtgccagccagggtatggctgctttccgaccccgaggccgaagatcccggccatcatcacgaggcgcttcacccaacagatccacttctgtgtccagtcaggctgcgcaggcggcctccccacaggtccctgccaccaccacacccaagattctccatcctttaacacgcaattatggtaaaccatggttgacaaacagcaaaatgtcaactccttgtaaagcagcagagtgctcagactttcccgtgccatctgcagagggaacgccaatacaaggaagcaagcttcgacttccaggatatttatcagggaaaggcttccactctggggaggacagtggcttgataacaactgcagctgccagagtccgaacacagtttgctgattccaagaagactcccagccgaccaggaagtcgagctggaagcaaagctggcagcagggccagcagccgccgaggcagtgatgcatcagactttgacatttcagaaatccagtccgtgtgctcagatgtggaaactgtcccccagacacacagacctacaccccgagcaggttctcggccatccacagcgaagccttcaaaaatccccacgccccagaggaaatcacctgccagcaaattggacaagtcctcaaagagatagtgcaattggttctaccaaggcccttccttgagcatttattatttaagtttgaacgatgtaaaatatggtgtagaaattcttgtgaaatattgcaagaggcgagtttaaaattctgcagatggccttatttgtgtatttgtctttttattttatctgtataattttttttgtcagatattctggggttaaagtcacatcatatgtgaggaggaaaagtttaacatgaactaacatttctgcactgtaacgtgccgggcacacactaaactcagttactgtacctacaggtaagtctacatcctctctgacagccacagcactacatcaatccctgacgttagggatacctcatgacattttcctgtttttatggaaactctgagaagctgaatgatacatgcaggggatattttttgagatgatttaaatgtaaaccaaaagatggaagacaaaaaaggaagttacttcaagcacttgccagtactatgatattcaagtaccttgcagcatttctctgccattgctttcaatgaggccagaggcatcctggatattagacctattatactgtaagaatataagtataaagtgcgttcatatacatgtgaggttttcttttgcttgagtggacagtagcacctgtatcattgaactcattttgtatcagagcaattttgcttgcagaaagctatgaaataaaacacgtcccttaactgcattgctatggaattaattttttttccccagggaaaactagtgtatttttttatgagcaatatcaatttggagtgaccaaaagatacttaaaaatgggtttattttgatttctcatctgaaataatcatgttctggtattatatctatctatatttaataaatatatacattttaatttattatgtgtactcacatactatagaaagatattagtatgcatttaataaaacatattcacttgaatatatggaatac

SEQ ID NO: 310068 - DNA, 4374 bp, Homo sapiens
caaccttcagaacaagctagaggttttaaatcaacgctggcaaaatgttttggaaaaaacagaacaaaggaagcagcagctggatggtgccttgcgccaggccaaagggttccatggcgaaattgaggatttgcagcagtggctgactgacacggagcgtcatctgttggcatctaaaccgctgggaggtttaccggaaacagccaaggagcagcttaatgtccatatggaagtctgtgctgcctttgaagctaaagaagaaacatataagagtctgatgcagaaaggccagcagatgcttgcaagatgcccaaaatctgcagagacaaatattgaccaagacataaataacttgaaagaaaaatgggaatcggtggaaaccaaactcaatgaaaggaaaactaaactggaagaggctctcaacttggcaatggagttccacaattctctccaagacttcatcaactggcttactcaggctgaacagaccctaaatgtagcttctcggccaagtctcatcttggacacagtcttatttcaaattgacgaacacaaggtttttgccaatgaagtaaattctcatcgtgagcagataatagagctggacaaaactggaacccacctaaaatattttagtcagaaacaagatgttgttctaatcaagaatctacttatcagtgtacaaagtcgatgggaaaaagtggttcaacggttggtagagagaggaagatctttggatgatgcaaggaagagagccaagcagttccatgaagcttggagtaaacttatggagtggctagaagagtcagaaaagtctttggattctgaactggaaatcgcaaatgatccagacaaaataaaaacacaacttgcacaacataaggagtttcagaaatcactcggagccaagcattctgtctacgacaccaccaacaggactggacgttctctgaaggagaaaacctccctggctgatgacaacctgaaactggatgacatgctgagtgaactcagagacaaatgggataccatatgtggaaaatctgtggaaagacaaaacaaattggaggaagccctgttattttctggacaattcacagatgccctacaggctctcattgattggttatatagagttgaaccccagctggcagaagaccagcctgttcatggagacattgatttggtgatgaatctgatcgataatcacaaggccttccaaaaagagttggggaagaggaccagcagtgtgcaggccctgaagcgctcagcccgagaactcatagaaggcagtcgggatgactcctcctgggtcaaggtccagatgcaggaattaagcacacgctgggagaccgtgtgtgcactttctatatcaaagcaaacacggttagaagcagccctgcgtcaggcagaggaattccactcggtggtacatgccctcttggagtggctggctgaggcggagcaaaccctgcgtttccatggtgtcctcccagatgatgaggatgctctccggactctcattgatcagcataaagaattcatgaagaaactggaagaaaagagagctgaactaaataaagccaccactatgggcgacaccgttttggctatctgccaccccgactccatcactaccattaagcactggataacaatcatccgggcgaggtttgaggaggtgctggcctgggcaaagcaacatcagcagagattagcaagtgctctggctgggcttattgccaaacaggaattgttggaagctttgctggcttggttgcaatgggctgaaactacacttactgataaggataaagaagtcatcccccaggagatcgaagaggtgaaagcactcattgcagaacaccagaccttcatggaggaaatgaccagaaaacagcctgatgttgataaagtaacgaagacctataagaggagagctgctgatccttcctcattacaatcccatattccagtcttggataagggacgagcaggaagaaaacgctttccagcatcaagcttgtatccctctgggtcacagacacaaattgaaaccaaaaatcctagggtaaacttactggtgagcaaatggcagcaagtctggctcctggcgttggaaagaaggaggaaactcaatgatgccttggacagactagaggagctgagggaatttgctaactttgattttgatatctggcgcaaaaaatacatgcgatggatgaatcacaagaaatctcgagtgatggacttcttcaggagaattgataaagaccaggatgggaaaataacgcggcaggaatttattgatggaattctttcctcaaagtttccaaccagtcgcttggagatgagcgcagttgcagacatctttgacagagatggcgatggatatattgactactatgaatttgtagcagcccttcacccaaataaagatgcatataaacctatcacagatgccgacaaaatcgaagatgaggtgacaaggcaggtagctaagtgtaaatgtgcaaagcgatttcaagttgagcagattggtgataataaatacaggttcttcctgggaaatcagtttggagactcccagcaactgcgactggtccggatcctgcggagtactgtgatggttcgtgttggaggtggatggatggcacttgatgagttcttagtgaaaaatgatccttgcagggccaaaggaaggacaaacatggaactgcgtgagaagttcattttagcagatggtgccagccagggtatggctgctttccgaccccgaggccgaagatcccggccatcatcacgaggcgcttcacccaacagatccacttctgtgtccagtcaggctgcgcaggcggcctccccacaggtccctgccaccaccacacccaagattctccatcctttaacacgcaattatggtaaaccatggttgacaaacagcaaaatgtcaactccttgtaaagcagcagagtgctcagactttcccgtgccatctgcagagggaacgccaatacaaggaagcaagcttcgacttccaggatatttatcagggaaaggcttccactctggggaggacagtggcttgataacaactgcagctgccagagtccgaacacagtttgctgattccaagaagactcccagccgaccaggaagtcgagctggaagcaaagctggcagcagggccagcagccgccgaggcagtgatgcatcagactttgacatttcagaaatccagtccgtgtgctcagatgtggaaactgtcccccagacacacagacctacaccccgagcaggttctcggccatccacagcgaagccttcaaaaatccccacgccccagaggaaatcacctgccagcaaattggacaagtcctcaaagagatagtgcaattggttctaccaaggcccttccttgagcatttattatttaagtttgaacgatgtaaaatatggtgtagaaattcttgtgaaatattgcaagaggcgagtttaaaattctgcagatggccttatttgtgtatttgtctttttattttatctgtataattttttttgtcagatattctggggttaaagtcacatcatatgtgaggaggaaaagggcacacactaaactcagttactgtacctacaggtaagtctacatcctctctgacagccacagcactacatcaatccctgacgttagggatacctcatgacattttcctgtttttatggaaactctgagaagctgaatgatacatgcaggggatattttttgagatgatttaaatgtaaaccaaaagatggaagacaaaaagacaaacacacccacacgcagtctttgcagtatctgacagagaactcacaggaagttacttcaagcacttgccagtactatgatattcaagtaccttgcagcatttctctgccattgctttcaatgaggccagaggcatcctggatattagacctattatactgtaagaatataagtataaagtgcgttcatatacatgtgaggttttcttttgcttgagtggacagtagcacctgtatcattgaactcattttgtatcagagcaattttgcttgcagaaagctatgaaataaaacacgtcccttaactgcattgctatggaattaattttttttccccagggaaaactagtgtatttttttatgagcaatatcaatttggagtgaccaaaagatacttaaaaatgggtttattttgatttctcatctgaaataatcatgttctggtattatatctatctatatttaataaatatatacattttaatttattatgtgtactcacatactatagaaagatattagtatgcatttaataaaacatattcacttgaatatatggaatac

SEQ ID NO: 310069 - DNA, 4335 bp, Homo sapiens
caaccttcagaacaagctagaggttttaaatcaacgctggcaaaatgttttggaaaaaacagaacaaaggaagcagcagctggatggtgccttgcgccaggccaaagggttccatggcgaaattgaggatttgcagcagtggctgactgacacggagcgtcatctgttggcatctaaaccgctgggaggtttaccggaaacagccaaggagcagcttaatgtccatatggaagtctgtgctgcctttgaagctaaagaagaaacatataagagtctgatgcagaaaggccagcagatgcttgcaagatgcccaaaatctgcagagacaaatattgaccaagacataaataacttgaaagaaaaatgggaatcggtggaaaccaaactcaatgaaaggaaaactaaactggaagaggctctcaacttggcaatggagttccacaattctctccaagacttcatcaactggcttactcaggctgaacagaccctaaatgtagcttctcggccaagtctcatcttggacacagtcttatttcaaattgacgaacacaaggtttttgccaatgaagtaaattctcatcgtgagcagataatagagctggacaaaactggaacccacctaaaatattttagtcagaaacaagatgttgttctaatcaagaatctacttatcagtgtacaaagtcgatgggaaaaagtggttcaacggttggtagagagaggaagatctttggatgatgcaaggaagagagccaagcagttccatgaagcttggagtaaacttatggagtggctagaagagtcagaaaagtctttggattctgaactggaaatcgcaaatgatccagacaaaataaaaacacaacttgcacaacataaggagtttcagaaatcactcggagccaagcattctgtctacgacaccaccaacaggactggacgttctctgaaggagaaaacctccctggctgatgacaacctgaaactggatgacatgctgagtgaactcagagacaaatgggataccatatgtggaaaatctgtggaaagacaaaacaaattggaggaagccctgttattttctggacaattcacagatgccctacaggctctcattgattggttatatagagttgaaccccagctggcagaagaccagcctgttcatggagacattgatttggtgatgaatctgatcgataatcacaaggccttccaaaaagagttggggaagaggaccagcagtgtgcaggccctgaagcgctcagcccgagaactcatagaaggcagtcgggatgactcctcctgggtcaaggtccagatgcaggaattaagcacacgctgggagaccgtgtgtgcactttctatatcaaagcaaacacggttagaagcagccctgcgtcaggcagaggaattccactcggtggtacatgccctcttggagtggctggctgaggcggagcaaaccctgcgtttccatggtgtcctcccagatgatgaggatgctctccggactctcattgatcagcataaagaattcatgaagaaactggaagaaaagagagctgaactaaataaagccaccactatgggcgacaccgttttggctatctgccaccccgactccatcactaccattaagcactggataacaatcatccgggcgaggtttgaggaggtgctggcctgggcaaagcaacatcagcagagattagcaagtgctctggctgggcttattgccaaacaggaattgttggaagctttgctggcttggttgcaatgggctgaaactacacttactgataaggataaagaagtcatcccccaggagatcgaagaggtgaaagcactcattgcagaacaccagaccttcatggaggaaatgaccagaaaacagcctgatgttgataaagtaacgaagacctataagaggagagctgctgatccttcctcattacaatcccatattccagtcttggataagggacgagcaggaagaaaacgctttccagcatcaagcttgtatccctctgggtcacagacacaaattgaaaccaaaaatcctagggtaaacttactggtgagcaaatggcagcaagtctggctcctggcgttggaaagaaggaggaaactcaatgatgccttggacagactagaggagctgagggaatttgctaactttgattttgatatctggcgcaaaaaatacatgcgatggatgaatcacaagaaatctcgagtgatggacttcttcaggagaattgataaagaccaggatgggaaaataacgcggcaggaatttattgatggaattctttcctcaaagtttccaaccagtcgcttggagatgagcgcagttgcagacatctttgacagagatggcgatggatatattgactactatgaatttgtagcagcccttcacccaaataaagatgcatataaacctatcacagatgccgacaaaatcgaagatgaggtgacaaggcaggtagctaagtgtaaatgtgcaaagcgatttcaagttgagcagattggtgataataaatacaggttcttcctgggaaatcagtttggagactcccagcaactgcgactggtccggatcctgcggagtactgtgatggttcgtgttggaggtggatggatggcacttgatgagttcttagtgaaaaatgatccttgcagggccaaaggaaggacaaacatggaactgcgtgagaagttcattttagcagatggtgccagccagggtatggctgctttccgaccccgaggccgaagatcccggccatcatcacgaggcgcttcacccaacagatccacttctgtgtccagtcaggctgcgcaggcggcctccccacaggtccctgccaccaccacacccaagattctccatcctttaacacgcaattatggtaaaccatggttgacaaacagcaaaatgtcaactccttgtaaagcagcagagtgctcagactttcccgtgccatctgcagagggaacgccaatacaaggaagcaagcttcgacttccaggatatttatcagggaaaggcttccactctggggaggacagtggcttgataacaactgcagctgccagagtccgaacacagtttgctgattccaagaagactcccagccgaccaggaagtcgagctggaagcaaagctggcagcagggccagcagccgccgaggcagtgatgcatcagactttgacatttcagaaatccagtccgtgtgctcagatgtggaaactgtcccccagacacacagacctacaccccgagcaggttctcggccatccacagcgaagccttcaaaaatccccacgccccagaggaaatcacctgccagcaaattggacaagtcctcaaagagatagtgcaattggttctaccaaggcccttccttgagcatttattatttaagtttgaacgatgtaaaatatggtgtagaaattcttgtgaaatattgcaagaggcgagtttaaaattctgcagatggccttatttgtgtatttgtctttttattttatctgtataattttttttgtcagatattctggggttaaagtcacatcatatgtgaggaggaaaagtttaacatgaactaacatttctgcactgtaacgtgccgggcacacactaaactcagttactgtacctacaggtaagtctacatcctctctgacagccacagcactacatcaatccctgacgttagggatacctcatgacattttcctgtttttatggaaactctgagaagctgaatgatacatgcaggggatattttttgagatgatttaaatgtaaaccaaaagatggaagacaaaaagacaaacacacccacacgcagtctttgcagtatctgacagagaactcacaggaagttacttcaagcacttgccagtactatgatattcaagtaccttgcagcatttctctgccattgctttcaatgaggccagaggcatcctggatattagacctattatactgtaagaatataagtataaagtgcgttcatatacatgtgaggttttcttttgcttgagtggacagtagcacctgtatcattgaactcattttgtatcagagcaattttgcttgcagaaagctatgaaataaaacacgtcccttaactgcattgctatggaattaattttttttccccagggaaaactagtgtatttttttatgagcaatatcaatttggagtgaccaaaagatacttaaaaatgggtttattttgatttctcatctgaaataatcatgttctggtattatatctatctatatttaataaatatatacattttaattt

SEQ ID NO: 310070 - DNA, 4301 bp, Homo sapiens
caaccttcagaacaagctagaggttttaaatcaacgctggcaaaatgttttggaaaaaacagaacaaaggaagcagcagctggatggtgccttgcgccaggccaaagggttccatggcgaaattgaggatttgcagcagtggctgactgacacggagcgtcatctgttggcatctaaaccgctgggaggtttaccggaaacagccaaggagcagcttaatgtccatatggaagtctgtgctgcctttgaagctaaagaagaaacatataagagtctgatgcagaaaggccagcagatgcttgcaagatgcccaaaatctgcagagacaaatattgaccaagacataaataacttgaaagaaaaatgggaatcggtggaaaccaaactcaatgaaaggaaaactaaactggaagaggctctcaacttggcaatggagttccacaattctctccaagacttcatcaactggcttactcaggctgaacagaccctaaatgtagcttctcggccaagtctcatcttggacacagtcttatttcaaattgacgaacacaaggtttttgccaatgaagtaaattctcatcgtgagcagataatagagctggacaaaactggaacccacctaaaatattttagtcagaaacaagatgttgttctaatcaagaatctacttatcagtgtacaaagtcgatgggaaaaagtggttcaacggttggtagagagaggaagatctttggatgatgcaaggaagagagccaagcagttccatgaagcttggagtaaacttatggagtggctagaagagtcagaaaagtctttggattctgaactggaaatcgcaaatgatccagacaaaataaaaacacaacttgcacaacataaggagtttcagaaatcactcggagccaagcattctgtctacgacaccaccaacaggactggacgttctctgaaggagaaaacctccctggctgatgacaacctgaaactggatgacatgctgagtgaactcagagacaaatgggataccatatgtggaaaatctgtggaaagacaaaacaaattggaggaagccctgttattttctggacaattcacagatgccctacaggctctcattgattggttatatagagttgaaccccagctggcagaagaccagcctgttcatggagacattgatttggtgatgaatctgatcgataatcacaaggccttccaaaaagagttggggaagaggaccagcagtgtgcaggccctgaagcgctcagcccgagaactcatagaaggcagtcgggatgactcctcctgggtcaaggtccagatgcaggaattaagcacacgctgggagaccgtgtgtgcactttctatatcaaagcaaacacggttagaagcagccctgcgtcaggcagaggaattccactcggtggtacatgccctcttggagtggctggctgaggcggagcaaaccctgcgtttccatggtgtcctcccagatgatgaggatgctctccggactctcattgatcagcataaagaattcatgaagaaactggaagaaaagagagctgaactaaataaagccaccactatgggcgacaccgttttggctatctgccaccccgactccatcactaccattaagcactggataacaatcatccgggcgaggtttgaggaggtgctggcctgggcaaagcaacatcagcagagattagcaagtgctctggctgggcttattgccaaacaggaattgttggaagctttgctggcttggttgcaatgggctgaaactacacttactgataaggataaagaagtcatcccccaggagatcgaagaggtgaaagcactcattgcagaacaccagaccttcatggaggaaatgaccagaaaacagcctgatgttgataaagtaacgaagacctataagaggagagctgctgatccttcctcattacaatcccatattccagtcttggataagggacgagcaggaagaaaacgctttccagcatcaagcttgtatccctctgggtcacagacacaaattgaaaccaaaaatcctagggtaaacttactggtgagcaaatggcagcaagtctggctcctggcgttggaaagaaggaggaaactcaatgatgccttggacagactagaggagctgagggaatttgctaactttgattttgatatctggcgcaaaaaatacatgcgatggatgaatcacaagaaatctcgagtgatggacttcttcaggagaattgataaagaccaggatgggaaaataacgcggcaggaatttattgatggaattctttcctcaaagtttccaaccagtcgcttggagatgagcgcagttgcagacatctttgacagagatggcgatggatatattgactactatgaatttgtagcagcccttcacccaaataaagatgcatataaacctatcacagatgccgacaaaatcgaagatgaggtgacaaggcaggtagctaagtgtaaatgtgcaaagcgatttcaagttgagcagattggtgataataaatacaggttcttcctgggaaatcagtttggagactcccagcaactgcgactggtccggatcctgcggagtactgtgatggttcgtgttggaggtggatggatggcacttgatgagttcttagtgaaaaatgatccttgcagggccaaaggaaggacaaacatggaactgcgtgagaagttcattttagcagatggtgccagccagggtatggctgctttccgaccccgaggccgaagatcccggccatcatcacgaggcgcttcacccaacagatccacttctgtgtccagtcaggctgcgcaggcggcctccccacaggtccctgccaccaccacacccaagggaacgccaatacaaggaagcaagcttcgacttccaggatatttatcagggaaaggcttccactctggggaggacagtggcttgataacaactgcagctgccagagtccgaacacagtttgctgattccaagaagactcccagccgaccaggaagtcgagctggaagcaaagctggcagcagggccagcagccgccgaggcagtgatgcatcagactttgacatttcagaaatccagtccgtgtgctcagatgtggaaactgtcccccagacacacagacctacaccccgagcaggttctcggccatccacagcgaagccttcaaaaatccccacgccccagaggaaatcacctgccagcaaattggacaagtcctcaaagagatagtgcaattggttctaccaaggcccttccttgagcatttattatttaagtttgaacgatgtaaaatatggtgtagaaattcttgtgaaatattgcaagaggcgagtttaaaattctgcagatggccttatttgtgtatttgtctttttattttatctgtataattttttttgtcagatattctggggttaaagtcacatcatatgtgaggaggaaaagtttaacatgaactaacatttctgcactgtaacgtgccgggcacacactaaactcagttactgtacctacaggtaagtctacatcctctctgacagccacagcactacatcaatccctgacgttagggatacctcatgacattttcctgtttttatggaaactctgagaagctgaatgatacatgcaggggatattttttgagatgatttaaatgtaaaccaaaagatggaagacaaaaagacaaacacacccacacgcagtctttgcagtatctgacagagaactcacaggaagttacttcaagcacttgccagtactatgatattcaagtaccttgcagcatttctctgccattgctttcaatgaggccagaggcatcctggatattagacctattatactgtaagaatataagtataaagtgcgttcatatacatgtgaggttttcttttgcttgagtggacagtagcacctgtatcattgaactcattttgtatcagagcaattttgcttgcagaaagctatgaaataaaacacgtcccttaactgcattgctatggaattaattttttttccccagggaaaactagtgtatttttttatgagcaatatcaatttggagtgaccaaaagatacttaaaaatgggtttattttgatttctcatctgaaataatcatgttctggtattatatctatctatatttaataaatatatacattttaatttattatgtgtactcacatactatagaaagatattagtatgcatttaataaaacatattcacttgaatatatggaatac

SEQ ID NO: 310071 - DNA, 3099 bp, Homo sapiens
acatgttatacagtagccctgctctctcctggccaaagacacacctgcgagagaagtaaaacaagaacaaaagctcctgtttgttttatattttgaaaataatgtagcctaaggtaaaatgcaactccatttatgaagaaatcagaatacatagtgttctgttgggttgcttaggaaggttagcatggctgtggcacagtcttccaaatacatttttcttattgagccaatcccttgagtgcttcttttcctgatgcaacttttcttctaaaatgtgtgctaaaggccagatgtgagcaccctttgcatattcaactactgtactttgtttcttcttctgctaacagtattctttaatgtgattggtatcctgtgtcattttttctagttcatcatcatgggagtaaaatgttacgttcggaatcaaactcttcaattactactactcagcctactataggttggcaacctctctctttgcctctcccctctttccttttctctttcctacttttccattcttgcttcagtcatttgttttaaaataacatgcttcatccatcgcgtatggcttaactcatatccagctgagctggtgcttccaaatttaaattctgaaaatttgatgactttggttgtgttacacatgcaggtgttataagtgatcaaacacatgctaacacgttgctcaccgggttcttgtggagtgttctccgtgtgcgtatgtgtttgtatgagtgctgcatcactgactacctcacagatccttgggtctggtgtttgttattgcatgttggtaaaacagtttttcaaggcataaaataaaaatactagctgcctcatttaagtgaaaaatccagaagtttatatgttgtcatcatgactaacaagccatcaatcattgtgtgtaattatattctttaatttatccccatgttgaaatactggcattctctttacctcaatagtacatgcaaaagacacagtccctgccttactggtctgtcttctcagtgtgatgagagggtaatgaaaccatgtgggcatctgtagctggtggattaatgatattttagcatgagctttccattttcatgctgacactttctttaatagtggttattcttgctggtgtctagtgttagaataagcacactttattttttcctccccgaactcacctgtatccaaaaggaatgcattgtaaaggaatgcatttaactttttgttatgctgagttggagttggcatggcaaaaagatgttcttgaaattctcaacgtgatctctggtgccaggtggccgttcttcccattaacgattgagcgcctcttcttttccgtcttttctttgtgtgcattgttgtgtgtgtataacccagccaaaggaaggacaaacatggaactgcgtgagaagttcattttagcagatggtgccagccagggtatggctgctttccgaccccgaggccgaagatcccggccatcatcacgaggcgcttcacccaacagatccacttctgtgtccagtcaggctgcgcaggcggcctccccacaggtccctgccaccaccacacccaagattctccatcctttaacacgcaattatggtaaaccatggttgacaaacagcaaaatgtcaactccttgtaaagcagcagagtgctcagactttcccgtgccatctgcagagggaacgccaatacaaggaagcaagcttcgacttccaggatatttatcagggaaaggcttccactctggggaggacagtggcttgataacaactgcagctgccagagtccgaacacagtttgctgattccaagaagactcccagccgaccaggaagtcgagctggaagcaaagctggcagcagggccagcagccgccgaggcagtgatgcatcagactttgacatttcagaaatccagtccgtgtgctcagatgtggaaactgtcccccagacacacagacctacaccccgagcaggttctcggccatccacagcgaagccttcaaaaatccccacgccccagaggaaatcacctgccagcaaattggacaagtcctcaaagagatagtgcaattggttctaccaaggcccttccttgagcatttattatttaagtttgaacgatgtaaaatatggtgtagaaattcttgtgaaatattgcaagaggcgagtttaaaattctgcagatggccttatttgtgtatttgtctttttattttatctgtataattttttttgtcagatattctggggttaaagtcacatcatatgtgaggaggaaaagtttaacatgaactaacatttctgcactgtaacgtgccgggcacacactaaactcagttactgtacctacaggtaagtctacatcctctctgacagccacagcactacatcaatccctgacgttagggatacctcatgacattttcctgtttttatggaaactctgagaagctgaatgatacatgcaggggatattttttgagatgatttaaatgtaaaccaaaagatggaagacaaaaagacaaacacacccacacgcagtctttgcagtatctgacagagaactcacaggaagttacttcaagcacttgccagtactatgatattcaagtaccttgcagcatttctctgccattgctttcaatgaggccagaggcatcctggatattagacctattatactgtaagaatataagtataaagtgcgttcatatacatgtgaggttttcttttgcttgagtggacagtagcacctgtatcattgaactcattttgtatcagagcaattttgcttgcagaaagctatgaaataaaacacgtcccttaactgcattgctatggaattaattttttttccccagggaaaactagtgtatttttttatgagcaatatcaatttggagtgaccaaaagatacttaaaaatgggtttattttgatttctcatctgaaataatcatgttctggtattatatctatctatatttaataaatatatacattttaatttattatgtgtactcacatactatagaaagatattagtatgcatttaataaaacatattcacttgaatatatggaatac

SEQ ID NO: 310072 - DNA, 4357 bp, Homo sapiens
caaccttcagaacaagctagaggttttaaatcaacgctggcaaaatgttttggaaaaaacagaacaaaggaagcagcagctggatggtgccttgcgccaggccaaagggttccatggcgaaattgaggatttgcagcagtggctgactgacacggagcgtcatctgttggcatctaaaccgctgggaggtttaccggaaacagccaaggagcagcttaatgtccatatggaagtctgtgctgcctttgaagctaaagaagaaacatataagagtctgatgcagaaaggccagcagatgcttgcaagatgcccaaaatctgcagagacaaatattgaccaagacataaataacttgaaagaaaaatgggaatcggtggaaaccaaactcaatgaaaggaaaactaaactggaagaggctctcaacttggcaatggagttccacaattctctccaagacttcatcaactggcttactcaggctgaacagaccctaaatgtagcttctcggccaagtctcatcttggacacagtcttatttcaaattgacgaacacaaggtttttgccaatgaagtaaattctcatcgtgagcagataatagagctggacaaaactggaacccacctaaaatattttagtcagaaacaagatgttgttctaatcaagaatctacttatcagtgtacaaagtcgatgggaaaaagtggttcaacggttggtagagagaggaagatctttggatgatgcaaggaagagagccaagcagttccatgaagcttggagtaaacttatggagtggctagaagagtcagaaaagtctttggattctgaactggaaatcgcaaatgatccagacaaaataaaaacacaacttgcacaacataaggagtttcagaaatcactcggagccaagcattctgtctacgacaccaccaacaggactggacgttctctgaaggagaaaacctccctggctgatgacaacctgaaactggatgacatgctgagtgaactcagagacaaatgggataccatatgtggaaaatctgtggaaagacaaaacaaattggaggaagccctgttattttctggacaattcacagatgccctacaggctctcattgattggttatatagagttgaaccccagctggcagaagaccagcctgttcatggagacattgatttggtgatgaatctgatcgataatcacaaggccttccaaaaagagttggggaagaggaccagcagtgtgcaggccctgaagcgctcagcccgagaactcatagaaggcagtcgggatgactcctcctgggtcaaggtccagatgcaggaattaagcacacgctgggagaccgtgtgtgcactttctatatcaaagcaaacacggttagaagcagccctgcgtcaggcagaggaattccactcggtggtacatgccctcttggagtggctggctgaggcggagcaaaccctgcgtttccatggtgtcctcccagatgatgaggatgctctccggactctcattgatcagcataaagaattcatgaagaaactggaagaaaagagagctgaactaaataaagccaccactatgggcgacaccgttttggctatctgccaccccgactccatcactaccattaagcactggataacaatcatccgggcgaggtttgaggaggtgctggcctgggcaaagcaacatcagcagagattagcaagtgctctggctgggcttattgccaaacaggaattgttggaagctttgctggcttggttgcaatgggctgaaactacacttactgataaggataaagaagtcatcccccaggagatcgaagaggtgaaagcactcattgcagaacaccagaccttcatggaggaaatgaccagaaaacagcctgatgttgataaagtaacgaagacctataagaggagagctgctgatccttcctcattacaatcccatattccagtcttggataagggacgagcaggaagaaaacgctttccagcatcaagcttgtatccctctgggtcacagacacaaattgaaaccaaaaatcctagggtaaacttactggtgagcaaatggcagcaagtctggctcctggcgttggaaagaaggaggaaactcaatgatgccttggacagactagaggagctgagggaatttgctaactttgattttgatatctggcgcaaaaaatacatgcgatggatgaatcacaagaaatctcgagtgatggacttcttcaggagaattgataaagaccaggatgggaaaataacgcggcaggaatttattgatggaattctttcctcaaagtttccaaccagtcgcttggagatgagcgcagttgcagacatctttgacagagatggcgatggatatattgactactatgaatttgtagcagcccttcacccaaataaagatgcatataaacctatcacagatgccgacaaaatcgaagatgaggtgacaaggcaggtagctaagtgtaaatgtgcaaagcgatttcaagttgagcagattggtgataataaatacaggttcttcctgggaaatcagtttggagactcccagcaactgcgactggtccggatcctgcggagtactgtgatggttcgtgttggaggtggatggatggcacttgatgagttcttagtgaaaaatgatccttgcagggccaaaggaaggacaaacatggaactgcgtgagaagttcattttagcagatggtgccagccagggtatggctgctttccgaccccgaggccgaagatcccggccatcatcacgaggcgcttcacccaacagatccacttctgtgtccagtcaggctgcgcaggcggcctccccacaggtccctgccaccaccacacccaagattctccatcctttaacacgcaattatggtaaaccatggttgacaaacagcaaaatggaacgccaatacaaggaagcaagcttcgacttccaggatatttatcagggaaaggcttccactctggggaggacagtggcttgataacaactgcagctgccagagtccgaacacagtttgctgattccaagaagactcccagccgaccaggaagtcgagctggaagcaaagctggcagcagggccagcagccgccgaggcagtgatgcatcagactttgacatttcagaaatccagtccgtgtgctcagatgtggaaactgtcccccagacacacagacctacaccccgagcaggttctcggccatccacagcgaagccttcaaaaatccccacgccccagaggaaatcacctgccagcaaattggacaagtcctcaaagagatagtgcaattggttctaccaaggcccttccttgagcatttattatttaagtttgaacgatgtaaaatatggtgtagaaattcttgtgaaatattgcaagaggcgagtttaaaattctgcagatggccttatttgtgtatttgtctttttattttatctgtataattttttttgtcagatattctggggttaaagtcacatcatatgtgaggaggaaaagtttaacatgaactaacatttctgcactgtaacgtgccgggcacacactaaactcagttactgtacctacaggtaagtctacatcctctctgacagccacagcactacatcaatccctgacgttagggatacctcatgacattttcctgtttttatggaaactctgagaagctgaatgatacatgcaggggatattttttgagatgatttaaatgtaaaccaaaagatggaagacaaaaagacaaacacacccacacgcagtctttgcagtatctgacagagaactcacaggaagttacttcaagcacttgccagtactatgatattcaagtaccttgcagcatttctctgccattgctttcaatgaggccagaggcatcctggatattagacctattatactgtaagaatataagtataaagtgcgttcatatacatgtgaggttttcttttgcttgagtggacagtagcacctgtatcattgaactcattttgtatcagagcaattttgcttgcagaaagctatgaaataaaacacgtcccttaactgcattgctatggaattaattttttttccccagggaaaactagtgtatttttttatgagcaatatcaatttggagtgaccaaaagatacttaaaaatgggtttattttgatttctcatctgaaataatcatgttctggtattatatctatctatatttaataaatatatacattttaatttattatgtgtactcacatactatagaaagatattagtatgcatttaataaaacatattcacttgaatatatggaatac

SEQ ID NO: 310073 - DNA, 4224 bp, Homo sapiens
caaccttcagaacaagctagaggttttaaatcaacgctggcaaaatgttttggaaaaaacagaacaaaggaagcagcagctggatggtgccttgcgccaggccaaagggttccatggcgaaattgaggatttgcagcagtggctgactgacacggagcgtcatctgttggcatctaaaccgctgggaggtttaccggaaacagccaaggagcagcttaatgtccatatggaagtctgtgctgcctttgaagctaaagaagaaacatataagagtctgatgcagaaaggccagcagatgcttgcaagatgcccaaaatctgcagagacaaatattgaccaagacataaataacttgaaagaaaaatgggaatcggtggaaaccaaactcaatgaaaggaaaactaaactggaagaggctctcaacttggcaatggagttccacaattctctccaagacttcatcaactggcttactcaggctgaacagaccctaaatgtagcttctcggccaagtctcatcttggacacagtcttatttcaaattgacgaacacaaggtttttgccaatgaagtaaattctcatcgtgagcagataatagagctggacaaaactggaacccacctaaaatattttagtcagaaacaagatgttgttctaatcaagaatctacttatcagtgtacaaagtcgatgggaaaaagtggttcaacggttggtagagagaggaagatctttggatgatgcaaggaagagagccaagcagttccatgaagcttggagtaaacttatggagtggctagaagagtcagaaaagtctttggattctgaactggaaatcgcaaatgatccagacaaaataaaaacacaacttgcacaacataaggagtttcagaaatcactcggagccaagcattctgtctacgacaccaccaacaggactggacgttctctgaaggagaaaacctccctggctgatgacaacctgaaactggatgacatgctgagtgaactcagagacaaatgggataccatatgtggaaaatctgtggaaagacaaaacaaattggaggaagccctgttattttctggacaattcacagatgccctacaggctctcattgattggttatatagagttgaaccccagctggcagaagaccagcctgttcatggagacattgatttggtgatgaatctgatcgataatcacaaggccttccaaaaagagttggggaagaggaccagcagtgtgcaggccctgaagcgctcagcccgagaactcatagaaggcagtcgggatgactcctcctgggtcaaggtccagatgcaggaattaagcacacgctgggagaccgtgtgtgcactttctatatcaaagcaaacacggttagaagcagccctgcgtcaggcagaggaattccactcggtggtacatgccctcttggagtggctggctgaggcggagcaaaccctgcgtttccatggtgtcctcccagatgatgaggatgctctccggactctcattgatcagcataaagaattcatgaagaaactggaagaaaagagagctgaactaaataaagccaccactatgggcgacaccgttttggctatctgccaccccgactccatcactaccattaagcactggataacaatcatccgggcgaggtttgaggaggtgctggcctgggcaaagcaacatcagcagagattagcaagtgctctggctgggcttattgccaaacaggaattgttggaagctttgctggcttggttgcaatgggctgaaactacacttactgataaggataaagaagtcatcccccaggagatcgaagaggtgaaagcactcattgcagaacaccagaccttcatggaggaaatgaccagaaaacagcctgatgttgataaagtaacgaagacctataagaggagagctgctgatccttcctcattacaatcccatattccagtcttggataagggacgagcaggaagaaaacgctttccagcatcaagcttgtatccctctgggtcacagacacaaattgaaaccaaaaatcctagggtaaacttactggtgagcaaatggcagcaagtctggctcctggcgttggaaagaaggaggaaactcaatgatgccttggacagactagaggagctgagggaatttgctaactttgattttgatatctggcgcaaaaaatacatgcgatggatgaatcacaagaaatctcgagtgatggacttcttcaggagaattgataaagaccaggatgggaaaataacgcggcaggaatttattgatggaattctttcctcaaagtttccaaccagtcgcttggagatgagcgcagttgcagacatctttgacagagatggcgatggatatattgactactatgaatttgtagcagcccttcacccaaataaagatgcatataaacctatcacagatgccgacaaaatcgaagatgaggtgacaaggcaggtagctaagtgtaaatgtgcaaagcgatttcaagttgagcagattggtgataataaatacaggttcttcctgggaaatcagtttggagactcccagcaactgcgactggtccggatcctgcggagtactgtgatggttcgtgttggaggtggatggatggcacttgatgagttcttagtgaaaaatgatccttgcagggccaaaggaaggacaaacatggaactgcgtgagaagttcattttagcagatggtgccagccagggtatggctgctttccgaccccgaggccgaagatcccggccatcatcacgaggcgcttcacccaacagatccacttctgtgtccagtcaggctgcgcaggcggcctccccacaggtccctgccaccaccacacccaagggaacgccaatacaaggaagcaagcttcgacttccaggatatttatcagggaaaggcttccactctggggaggacagtggcttgataacaactgcagctgccagagtccgaacacagtttgctgattccaagaagactcccagccgaccaggaagtcgagctggaagcaaagctggcagcagggccagcagccgccgaggcagtgatgcatcagactttgacatttcagaaatccagtccgtgtgctcagatgtggaaactgtcccccagacacacagacctacaccccgagcaggttctcggccatccacagcgaagccttcaaaaatccccacgccccagaggaaatcacctgccagcaaattggacaagtcctcaaagagatagtgcaattggttctaccaaggcccttccttgagcatttattatttaagtttgaacgatgtaaaatatggtgtagaaattcttgtgaaatattgcaagaggcgagtttaaaattctgcagatggccttatttgtgtatttgtctttttattttatctgtataattttttttgtcagatattctggggttaaagtcacatcatatgtgaggaggaaaagtttaacatgaactaacatttctgcactgtaacgtgccgggcacacactaaactcagttactgtacctacaggtaagtctacatcctctctgacagccacagcactacatcaatccctgacgttagggatacctcatgacattttcctgtttttatggaaactctgagaagctgaatgatacatgcaggggatattttttgagatgatttaaatgtaaaccaaaagatggaagacaaaaagacaaacacacccacacgcagtctttgcagtatctgacagagaactcacaggaagttacttcaagcacttgccagtactatgatattcaagtaccttgcagcatttctctgccattgctttcaatgaggccagaggcatcctggatattagacctattatactgtaagaatataagtataaagtgcgttcatatacatgtgaggttttcttttgcttgagtggacagtagcacctgtatcattgaactcattttgtatcagagcaattttgcttgcagaaagctatgaaataaaacacgtcccttaactgcattgctatggaattaattttttttccccagggaaaactagtgtatttttttatgagcaatatcaatttggagtgaccaaaagatacttaaaaatgggtttattttgatttctcatctgaaataatcatgttctggtattatatctatctatatttaataaatatatacattttaattt

SEQ ID NO: 310074 - DNA, 4356 bp, Homo sapiens
caaccttcagaacaagctagaggttttaaatcaacgctggcaaaatgttttggaaaaaacagaacaaaggaagcagcagctggatggtgccttgcgccaggccaaagggttccatggcgaaattgaggatttgcagcagtggctgactgacacggagcgtcatctgttggcatctaaaccgctgggaggtttaccggaaacagccaaggagcagcttaatgtccatatggaagtctgtgctgcctttgaagctaaagaagaaacatataagagtctgatgcagaaaggccagcagatgcttgcaagatgcccaaaatctgcagagacaaatattgaccaagacataaataacttgaaagaaaaatgggaatcggtggaaaccaaactcaatgaaaggaaaactaaactggaagaggctctcaacttggcaatggagttccacaattctctccaagacttcatcaactggcttactcaggctgaacagaccctaaatgtagcttctcggccaagtctcatcttggacacagtcttatttcaaattgacgaacacaaggtttttgccaatgaagtaaattctcatcgtgagcagataatagagctggacaaaactggaacccacctaaaatattttagtcagaaacaagatgttgttctaatcaagaatctacttatcagtgtacaaagtcgatgggaaaaagtggttcaacggttggtagagagaggaagatctttggatgatgcaaggaagagagccaagcagttccatgaagcttggagtaaacttatggagtggctagaagagtcagaaaagtctttggattctgaactggaaatcgcaaatgatccagacaaaataaaaacacaacttgcacaacataaggagtttcagaaatcactcggagccaagcattctgtctacgacaccaccaacaggactggacgttctctgaaggagaaaacctccctggctgatgacaacctgaaactggatgacatgctgagtgaactcagagacaaatgggataccatatgtggaaaatctgtggaaagacaaaacaaattggaggaagccctgttattttctggacaattcacagatgccctacaggctctcattgattggttatatagagttgaaccccagctggcagaagaccagcctgttcatggagacattgatttggtgatgaatctgatcgataatcacaaggccttccaaaaagagttggggaagaggaccagcagtgtgcaggccctgaagcgctcagcccgagaactcatagaaggcagtcgggatgactcctcctgggtcaaggtccagatgcaggaattaagcacacgctgggagaccgtgtgtgcactttctatatcaaagcaaacacggttagaagcagccctgcgtcaggcagaggaattccactcggtggtacatgccctcttggagtggctggctgaggcggagcaaaccctgcgtttccatggtgtcctcccagatgatgaggatgctctccggactctcattgatcagcataaagaattcatgaagaaactggaagaaaagagagctgaactaaataaagccaccactatgggcgacaccgttttggctatctgccaccccgactccatcactaccattaagcactggataacaatcatccgggcgaggtttgaggaggtgctggcctgggcaaagcaacatcagcagagattagcaagtgctctggctgggcttattgccaaacaggaattgttggaagctttgctggcttggttgcaatgggctgaaactacacttactgataaggataaagaagtcatcccccaggagatcgaagaggtgaaagcactcattgcagaacaccagaccttcatggaggaaatgaccagaaaacagcctgatgttgataaagtaacgaagacctataagaggagagctgctgatccttcctcattacaatcccatattccagtcttggataagggacgagcaggaagaaaacgctttccagcatcaagcttgtatccctctgggtcacagacacaaattgaaaccaaaaatcctagggtaaacttactggtgagcaaatggcagcaagtctggctcctggcgttggaaagaaggaggaaactcaatgatgccttggacagactagaggagctgagggaatttgctaactttgattttgatatctggcgcaaaaaatacatgcgatggatgaatcacaagaaatctcgagtgatggacttcttcaggagaattgataaagaccaggatgggaaaataacgcggcaggaatttattgatggaattctttcctcaaagtttccaaccagtcgcttggagatgagcgcagttgcagacatctttgacagagatggcgatggatatattgactactatgaatttgtagcagcccttcacccaaataaagatgcatataaacctatcacagatgccgacaaaatcgaagatgaggtgacaaggcaggtagctaagtgtaaatgtgcaaagcgatttcaagttgagcagattggtgataataaatacaggttcttcctgggaaatcagtttggagactcccagcaactgcgactggtccggatcctgcggagtactgtgatggttcgtgttggaggtggatggatggcacttgatgagttcttagtgaaaaatgatccttgcagggccaaaggaaggacaaacatggaactgcgtgagaagttcattttagcagatggtgccagccagggtatggctgctttccgaccccgaggccgaagatcccggccatcatcacgaggcgcttcacccaacagatccacttctgtgtccagtcaggctgcgcaggcggcctccccacaggtccctgccaccaccacacccaagattctccatcctttaacacgcaattatggtaaaccatggttgacaaacagcaaaatgtcaactccttgtaaagcagcagagtgctcagactttcccgtgccatctgcagagggaacgccaatacaaggaagcaagcttcgacttccaggatatttatcagggaaaggcttccactctggggaggacagtggcttgataacaactgcagctgccagagtccgaacacagtttgctgattccaagaagactcccagccgaccaggaagtcgagctggaagcaaagctggcagcagggccagcagccgccgaggcagtgatgcatcagactttgacatttcagaaatccagtccgtgtgctcagatgtggaaactgtcccccagacacacagacctacaccccgagcaggttctcggccatccacagcgaagccttcaaaaatccccacgccccagaggaaatcacctgccagcgagcatttattatttaagtttgaacgatgtaaaatatggtgtagaaattcttgtgaaatattgcaagaggcgagtttaaaattctgcagatggccttatttgtgtatttgtctttttattttatctgtataattttttttgtcagatattctggggttaaagtcacatcatatgtgaggaggaaaagtttaacatgaactaacatttctgcactgtaacgtgccgggcacacactaaactcagttactgtacctacaggtaagtctacatcctctctgacagccacagcactacatcaatccctgacgttagggatacctcatgacattttcctgtttttatggaaactctgagaagctgaatgatacatgcaggggatattttttgagatgatttaaatgtaaaccaaaagatggaagacaaaaagacaaacacacccacacgcagtctttgcagtatctgacagagaactcacaggaagttacttcaagcacttgccagtactatgatattcaagtaccttgcagcatttctctgccattgctttcaatgaggccagaggcatcctggatattagacctattatactgtaagaatataagtataaagtgcgttcatatacatgtgaggttttcttttgcttgagtggacagtagcacctgtatcattgaactcattttgtatcagagcaattttgcttgcagaaagctatgaaataaaacacgtcccttaactgcattgctatggaattaattttttttccccagggaaaactagtgtatttttttatgagcaatatcaatttggagtgaccaaaagatacttaaaaatgggtttattttgatttctcatctgaaataatcatgttctggtattatatctatctatatttaataaatatatacattttaatttattatgtgtactcacatactatagaaagatattagtatgcatttaataaaacatattcacttgaatatatggaatac

SEQ ID NO: 310075 - DNA, 1663 bp, Homo sapiens
ccgttctgcaggaattcggttcgagcttcaattactactactcagcctactatagccaaaggaaggacaaacatggaactgcgtgagaagttcattttagcagatggtgccagccagggtatggctgctttccgaccccgaggccgaagatcccggccatcatcacgaggcgcttcacccaacagatccacttctgtgtccagtcaggctgcgcaggcggcctccccacaggtccctgccaccaccacacccaagggaacgccaatacaaggaagcaagcttcgacttccaggatatttatcagggaaaggcttccactctggggaggacagtggcttgataacaactgcagctgccagagtccgaacacagtttgctgattccaagaagactcccagccgaccaggaagtcgagctggaagcaaagctggcagcagggccagcagccgccgaggcagtgatgcatcagactttgacatttcagaaatccagtccgtgtgctcagatgtggaaactgtcccccagacacacagacctacaccccgagcaggttctcggccatccacagcgaagccttcaaaaatccccacgccccagaggaaatcacctgccagcaaattggacaagtcctcaaagagatagtgcaattggttctaccaaggcccttccttgagcatttattatttaagtttgaacgatgtaaaatatggtgtagaaattcttgtgaaatattgcaagaggcgagtttaaaattctgcagatggccttatttgtgtatttgtctttttattttatctgtataattttttttgtcagatattctggggttaaagtcacatcatatgtgaggaggaaaagtttaacatgaactaacatttctgcactgtaacgtgccgggcacacactaaactcagttactgtacctacaggtaagtctacatcctctctgacagccacagcactacatcaatccctgacgttagggatacctcatgacattttcctgtttttatggaaactctgagaagctgaatgatacatgcaggggatattttttgagatgatttaaatgtaaaccaaaagatggaagacaaaaagacaaacacacccacacgcagtctttgcagtatctgacagagaactcacaggaagttacttcaagcacttgccagtactatgatattcaagtaccttgcagcatttctctgccattgctttcaatgaggccagaggcatcctggatattagacctattatactgtaagaatataagtataaagtgcgttcatatacatgtgaggttttcttttgcttgagtggacagtagcacctgtatcattgaactcattttgtatcagagcaattttgcttgcagaaagctatgaaataaaacacgtcccttaactgcattgctatggaattaattttttttccccagggaaaactagtgtatttttttatgagcaatatcaatttggagtgaccaaaagatacttaaaaatgggtttattttgatttctcatctgaaataatcatgttctggtattatatctatctatatttaataaatatatacattttaatttattatgtgtactcacatactatagaaagatattagtatgcatttaataaaacatattcacttgaatatatggaatac

SEQ ID NO: 310076 - DNA, 1609 bp, Homo sapiens
  misc_feature (35)..(35): n is a, c, g, or t
ggtgcctgtatctatgaatgacctcggccaggagncaacatgactctagagtatttacagtgtcaccaggttgctttccgaccccgaggccgaagatcccggccatcatcacgaggcgcttcacccaacagatccacttctgtgtccagtcaggctgcgcaggcggcctccccacaggtccctgccaccaccacacccaagggaacgccaatacaaggaagcaagcttcgacttccaggatatttatcagggaaaggcttccactctggggaggacagtggcttgataacaactgcagctgccagagtccgaacacagtttgctgattccaagaagactcccagccgaccaggaagtcgagctggaagcaaagctggcagcagggccagcagccgccgaggcagtgatgcatcagactttgacatttcagaaatccagtccgtgtgctcagatgtggaaactgtcccccagacacacagacctacaccccgagcaggttctcggccatccacagcgaagccttcaaaaatccccacgccccagaggaaatcacctgccagcaaattggacaagtcctcaaagagatagtgcaattggttctaccaaggcccttccttgagcatttattatttaagtttgaacgatgtaaaatatggtgtagaaattcttgtgaaatattgcaagaggcgagtttaaaattctgcagatggccttatttgtgtatttgtctttttattttatctgtataattttttttgtcagatattctggggttaaagtcacatcatatgtgaggaggaaaagtttaacatgaactaacatttctgcactgtaacgtgccgggcacacactaaactcagttactgtacctacaggtaagtctacatcctctctgacagccacagcactacatcaatccctgacgttagggatacctcatgacattttcctgtttttatggaaactctgagaagctgaatgatacatgcaggggatattttttgagatgatttaaatgtaaaccaaaagatggaagacaaaaagacaaacacacccacacgcagtctttgcagtatctgacagagaactcacaggaagttacttcaagcacttgccagtactatgatattcaagtaccttgcagcatttctctgccattgctttcaatgaggccagaggcatcctggatattagacctattatactgtaagaatataagtataaagtgcgttcatatacatgtgaggttttcttttgcttgagtggacagtagcacctgtatcattgaactcattttgtatcagagcaattttgcttgcagaaagctatgaaataaaacacgtcccttaactgcattgctatggaattaattttttttccccagggaaaactagtgtatttttttatgagcaatatcaatttggagtgaccaaaagatacttaaaaatgggtttattttgatttctcatctgaaataatcatgttctggtattatatctatctatatttaataaatatatacattttaatttattatgtgtactcacatactatagaaagatattagtatgcatttaataaaacatattcacttgaatatatggaatac

SEQ ID NO: 310077 - DNA, 3474 bp, Homo sapiens
caaccttcagaacaagctagaggttttaaatcaacgctggcaaaatgttttggaaaaaacagaacaaaggaagcagcagctggatggtgccttgcgccaggccaaagggttccatggcgaaattgaggatttgcagcagtggctgactgacacggagcgtcatctgttggcatctaaaccgctgggaggtttaccggaaacagccaaggagcagcttaatgtccatatggaagtctgtgctgcctttgaagctaaagaagaaacatataagagtctgatgcagaaaggccagcagatgcttgcaagatgcccaaaatctgcagagacaaatattgaccaagacataaataacttgaaagaaaaatgggaatcggtggaaaccaaactcaatgaaaggaaaactaaactggaagaggctctcaacttggcaatggagttccacaattctctccaagacttcatcaactggcttactcaggctgaacagaccctaaatgtagcttctcggccaagtctcatcttggacacagtcttatttcaaattgacgaacacaaggtttttgccaatgaagtaaattctcatcgtgagcagataatagagctggacaaaactggaacccacctaaaatattttagtcagaaacaagatgttgttctaatcaagaatctacttatcagtgtacaaagtcgatgggaaaaagtggttcaacggttggtagagagaggaagatctttggatgatgcaaggaagagagccaagcagttccatgaagcttggagtaaacttatggagtggctagaagagtcagaaaagtctttggattctgaactggaaatcgcaaatgatccagacaaaataaaaacacaacttgcacaacataaggagtttcagaaatcactcggagccaagcattctgtctacgacaccaccaacaggactggacgttctctgaaggagaaaacctccctggctgatgacaacctgaaactggatgacatgctgagtgaactcagagacaaatgggataccatatgtggaaaatctgtggaaagacaaaacaaattggaggaagccctgttattttctggacaattcacagatgccctacaggctctcattgattggttatatagagttgaaccccagctggcagaagaccagcctgttcatggagacattgatttggtgatgaatctgatcgataatcacaaggccttccaaaaagagttggggaagaggaccagcagtgtgcaggccctgaagcgctcagcccgagaactcatagaaggcagtcgggatgactcctcctgggtcaaggtccagatgcaggaattaagcacacgctgggagaccgtgtgtgcactttctatatcaaagcaaacacggttagaagcagccctgcgtcaggcagaggaattccactcggtggtacatgccctcttggagtggctggctgaggcggagcaaaccctgcgtttccatggtgtcctcccagatgatgaggatgctctccggactctcattgatcagcataaagaattcatgaagaaactggaagaaaagagagctgaactaaataaagccaccactatgggcgacaccgttttggctatctgccaccccgactccatcactaccattaagcactggataacaatcatccgggcgaggtttgaggaggtgctggcctgggcaaagcaacatcagcagagattagcaagtgctctggctgggcttattgccaaacaggaattgttggaagctttgctggcttggttgcaatgggctgaaactacacttactgataaggataaagaagtcatcccccaggagatcgaagaggtgaaagcactcattgcagaacaccagaccttcatggaggaaatgaccagaaaacagcctgatgttgataaagtaacgaagacctataagaggagagctgctgatccttcctcattacaatcccatattccagtcttggataagggacgagcaggaagaaaacgctttccagcatcaagcttgtatccctctgggtcacagacacaaattgaaaccaaaaatcctagggtaaacttactggtgagcaaatggcagcaagtctggctcctggcgttggaaagaaggaggaaactcaatgatgccttggacagactagaggagctgagggaatttgctaactttgattttgatatctggcgcaaaaaatacatgcgatggatgaatcacaagaaatctcgagtgatggacttcttcaggagaattgataaagaccaggatgggaaaataacgcggcaggaatttattgatggaattctttcctcaaagtttccaaccagtcgcttggagatgagcgcagttgcagacatctttgacagagatggcgatggatatattgactactatgaatttgtagcagcccttcacccaaataaagatgcatataaacctatcacagatgccgacaaaatcgaagatgaggtgacaaggcaggtagctaagtgtaaatgtgcaaagcgatttcaagttgagcagattggtgataataaatacaggttcttcctgggaaatcagtttggagactcccagcaactgcgactggtccggatcctgcggagtactgtgatggttcgtgttggaggtggatggatggcacttgatgagttcttagtgaaaaatgatccttgcagggccaaaggaaggacaaacatggaactgcgtgagaagttcattttagcagatggtgccagccagggtatggctgctttccgaccccgaggccgaagatcccggccatcatcacgaggcgcttcacccaacagatccacttctgtgtccagtcaggctgcgcaggcggcctccccacaggtccctgccaccaccacacccaagattctccatcctttaacacgcaattatggtaaaccatggttgacaaacagcaaaatgtcaactccttgtaaagcagcagagtgctcagactttcccgtgccatctgcagagggaacgccaatacaaggaagcaagcttcgacttccaggatatttatcagggaaaggcttccactctggggaggacagtggcttgataacaactgcagctgccagagtccgaacacagtttgctgattccaagaagactcccagccgaccaggaagtcgagctggaagcaaagctggcagcagggccagcagccgccgaggcagtgatgcatcagactttgacatttcagaaatccagtccgtgtgctcagatgtggaaactgtcccccagacacacagacctacaccccgagcaggttctcggccatccacagcgaagccttcaaaaatccccacgccccagaggaaatcacctgccagcccaaaggacccttgatcaattctgaattctatactggctggctagatcactggggccaacctcactccacaatcaagaccgaagcagtggcttcctccctctatgatgta

SEQ ID NO: 310078 - DNA, 2978 bp, Homo sapiens
caaccttcagaacaagctagaggttttaaatcaacgctggcaaaatgttttggaaaaaacagaacaaaggaagcagcagctggatggtgccttgcgccaggccaaagggttccatggcgaaattgaggatttgcagcagtggctgactgacacggagcgtcatctgttggcatctaaaccgctgggaggtttaccggaaacagccaaggagcagcttaatgtccatatggaagtctgtgctgcctttgaagctaaagaagaaacatataagagtctgatgcagaaaggccagcagatgcttgcaagatgcccaaaatctgcagagacaaatattgaccaagacataaataacttgaaagaaaaatgggaatcggtggaaaccaaactcaatgaaaggaaaactaaactggaagaggctctcaacttggcaatggagttccacaattctctccaagacttcatcaactggcttactcaggctgaacagaccctaaatgtagcttctcggccaagtctcatcttggacacagtcttatttcaaattgacgaacacaaggtttttgccaatgaagtaaattctcatcgtgagcagataatagagctggacaaaactggaacccacctaaaatattttagtcagaaacaagatgttgttctaatcaagaatctacttatcagtgtacaaagtcgatgggaaaaagtggttcaacggttggtagagagaggaagatctttggatgatgcaaggaagagagccaagcagttccatgaagcttggagtaaacttatggagtggctagaagagtcagaaaagtctttggattctgaactggaaatcgcaaatgatccagacaaaataaaaacacaacttgcacaacataaggagtttcagaaatcactcggagccaagcattctgtctacgacaccaccaacaggactggacgttctctgaaggagaaaacctccctggctgatgacaacctgaaactggatgacatgctgagtgaactcagagacaaatgggataccatatgtggaaaatctgtggaaagacaaaacaaattggaggaagccctgttattttctggacaattcacagatgccctacaggctctcattgattggttatatagagttgaaccccagctggcagaagaccagcctgttcatggagacattgatttggtgatgaatctgatcgataatcacaaggtattgttatctgggacattttattttatcttgtttgattattctgagtgtacaggaaatgtaaaccatttaaattagccttttaaaatcagaagactatagatcatactacataacagtctttattgttgaaatatgtgtccgtttgagcagaacctggaagcaaactttaaaagtgatggggaagtattatttagtgtcagtgaaatacttttgcttttaattaccagatctaaaacctttttagaacttggaaagtgatttcattctctggtgctttaaaacagatttcaagaatgttttactatctttagttatgcacttaaacaattatgtaataaaatttaaaatcattcattcagtgacctgacactaagtcattgcataagtatgtagatttgtgacatgacccatggtggtcatgaccaactgcttttaaaaataccgaaccaaaactgttttaaccttgccccttgaattatagcagtttatgagtcagcagcttatgctataagggatttgattattatttacttcgagaaaactggcttccttgaaatctcctgatatgcatgtaaaactgtcatgtcatgtaaatcaaaggtaatattcaaggtgtccaactaagtgtaaggtccaaaataatgaccaaatgatataaagcaacttagccttggaaacaatatgaagcatagtactaatgtagaatagttgtattggagttgactttatataaaaatgtcttacatcactctacttaaattcatcttgtatttcttctctctagtatctgagttcagaaaacttattccatttataatgttctctttatattggttatgctattttgatcttaccattctttttaaaagtcttattacatatttatttttccttttttctttctattctatcattatacccataagagagtttgttacacctgaaaagtgaaacaaactaaattaaaataaaataaaagaataaataaagaacattggtcaagtctacaaaagttaaaaatttaaaaatcacatggctttgcttatattgaaataaatgttttgtgtatggttaatacaaacttctctatttcctggcatttattcaatgagtaatgaatagcgtaatgttactttttacataaatgccatttctgtaaactcactgtctaaatatttactactctaggtaattgccagatcttttatatattaaaggtcatcaagaatgaattaatcatttagcattagtaatacaactggaaggctcaagaagttcaagtatgtaaaaatgctttggaaagtcttctgaaaactattggactagtcctatcataaatgggatatttagatactgtaccatttgcatgtgtgcttgtgtgtgtgtgaatgtgtgtattggtgtatacgtgtgtgtttgtgtctttctgcaggcacatctcattttaactgttagagttgaatcagtcaaataatcacttttgtgataggctcacttttgtgaatgatctgagtatcagaatagaaacctatagatatggccaaatggtaatattcatttatgatgatttttttaaaaacacattaattttattgtgacagaatgttggttattaatgtttgaaagatctagttgcatacacagactcttggatcaaaaataaagagctctgggctcacttcttagatcagtctgtggccaaaataaatgaatttaattcctggcacatcagtttgtcaaaattaggcaggaaaaaaaaaaa

SEQ ID NO: 310079 - DNA, 634 bp, Homo sapiens
ttccgcgatcgctcgcaaaactctccctccctttccctccttcccagccaggagacatccccacctgggacaaacacacccacacgcagtctttgcagtatctgacagagaactcacaggaagttacttcaagcacttgccagtactatgatattcaagtaccttgcagcatttctctgccattgctttcaatgaggccagaggcatcctggatattagacctattatactgtaagaatataagtataaagtgcgttcatatacatgtgaggttttcttttgcttgagtggacagtagcacctgtatcattgaactcattttgtatcagagcaattttgcttgcagaaagctatgaaataaaacacgtcccttaactgcattgctatggaattaattttttttccccagggaaaactagtgtatttttttatgagcaatatcaatttggagtgaccaaaagatacttaaaaatgggtttattttgatttctcatctgaaataatcatgttctggtattatatctatctatatttaataaatatatacattttaatttattatgtgtactcacatactatagaaagatattagtatgcatttaataaaacatattcacttgaatatatggaatac

SEQ ID NO: 310080 - DNA, 2237 bp, Homo sapiens
caaccttcagaacaagctagaggttttaaatcaacgctggcaaaatgttttggaaaaaacagaacaaaggaagcagcagctggatggtgccttgcgccaggccaaagggttccatggcgaaattgaggatttgcagcagtggctgactgacacggagcgtcatctgttggcatctaaaccgctgggaggtttaccggaaacagccaaggagcagcttaatgtccatatggaagtctgtgctgcctttgaagctaaagaagaaacatataagagtctgatgcagaaaggccagcagatgcttgcaagatgcccaaaatctgcagagacaaatattgaccaagacataaataacttgaaagaaaaatgggaatcggtggaaaccaaactcaatgaaaggaaaactaaactggaagaggctctcaacttggcaatggagttccacaattctctccaagacttcatcaactggcttactcaggctgaacagaccctaaatgtagcttctcggccaagtctcatcttggacacagtcttatttcaaattgacgaacacaaggtttttgccaatgaagtaaattctcatcgtgagcagataatagagctggacaaaactggaacccacctaaaatattttagtcagaaacaagatgttgttctaatcaagaatctacttatcagtgtacaaagtcgatgggaaaaagtggttcaacggttggtagagagaggaagatctttggatgatgcaaggaagagagccaagcagttccatgaagcttggagtaaacttatggagtggctagaagagtcagaaaagtctttggattctgaactggaaatcgcaaatgatccagacaaaataaaaacacaacttgcacaacataaggagtttcagaaatcactcggagccaagcattctgtctacgacaccaccaacaggactggacgttctctgaaggagaaaacctccctggctgatgacaacctgaaactggatgacatgctgagtgaactcagagacaaatgggataccatatgtggaaaatctgtggaaagacaaaacaaattggaggaagccctgttattttctggacaattcacagatgccctacaggctctcattgattggttatatagagttgaaccccagctggcagaagaccagcctgttcatggagacattgatttggtgatgaatctgatcgataatcacaaggccttccaaaaagagttggggaagaggaccagcagtgtgcaggccctgaagcgctcagcccgagaactcatagaaggcagtcgggatgactcctcctgggtcaaggtccagatgcaggaattaagcacacgctgggagaccgtgtgtgcactttctatatcaaagcaaacacggttagaagcagccctgcgtcaggcagaggaattccactcggtggtacatgccctcttggagtggctggctgaggcggagcaaaccctgcgtttccatggtgtcctcccagatgatgaggatgctctccggactctcattgatcagcataaagaattcatgaagaaactggaagaaaagagagctgaactaaataaagccaccactatgggcgacaccgttttggctatctgccaccccgactccatcactaccattaagcactggataacaatcatccgggcgaggtttgaggaggtgctggcctgggcaaagcaacatcagcagagattagcaagtgctctggctgggcttattgccaaacaggaattgttggaagctttgctggcttggttgcaatgggctgaaactacacttactgataaggataaagaagtcatcccccaggagatcgaagaggtgaaagcactcattgcagaacaccagaccttcatggaggaaatgaccagaaaacagcctgatgttgataaagtaacgaagacctataagaggagagctgctgatccttcctcattacaatcccatattccagtcttggataagggacgagcaggaagaaaacgctttccagcatcaagcttgtatccctctgggtcacagacacaaattgaaaccaaaaatcctagggtaaacttactggtgagcaaatggcagcaagtctggctcctggcgttggaaagaaggaggaaactcaatgatgccttggacagactagaggagctgagggaatttgctaactttgatttgatgctgacgacggggatcctctggaacgatatgcaccctgatacga

SEQ ID NO: 310081 - DNA, 2376 bp, Homo sapiens
caaccttcagaacaagctagaggttttaaatcaacgctggcaaaatgttttggaaaaaacagaacaaaggaagcagcagctggatggtgccttgcgccaggccaaagggttccatggcgaaattgaggatttgcagcagtggctgactgacacggagcgtcatctgttggcatctaaaccgctgggaggtttaccggaaacagccaaggagcagcttaatgtccatatggaagtctgtgctgcctttgaagctaaagaagaaacatataagagtctgatgcagaaaggccagcagatgcttgcaagatgcccaaaatctgcagagacaaatattgaccaagacataaataacttgaaagaaaaatgggaatcggtggaaaccaaactcaatgaaaggaaaactaaactggaagaggctctcaacttggcaatggagttccacaattctctccaagacttcatcaactggcttactcaggctgaacagaccctaaatgtagcttctcggccaagtctcatcttggacacagtcttatttcaaattgacgaacacaaggtttttgccaatgaagtaaattctcatcgtgagcagataatagagctggacaaaactggaacccacctaaaatattttagtcagaaacaagatgttgttctaatcaagaatctacttatcagtgtacaaagtcgatgggaaaaagtggttcaacggttggtagagagaggaagatctttggatgatgcaaggaagagagccaagcagttccatgaagcttggagtaaacttatggagtggctagaagagtcagaaaagtctttggattctgaactggaaatcgcaaatgatccagacaaaataaaaacacaacttgcacaacataaggagtttcagaaatcactcggagccaagcattctgtctacgacaccaccaacaggactggacgttctctgaaggagaaaacctccctggctgatgacaacctgaaactggatgacatgctgagtgaactcagagacaaatgggataccatatgtggaaaatctgtggaaagacaaaacaaattggaggaagccctgttattttctggacaattcacagatgccctacaggctctcattgattggttatatagagttgaaccccagctggcagaagaccagcctgttcatggagacattgatttggtgatgaatctgatcgataatcacaaggccttccaaaaagagttggggaagaggaccagcagtgtgcaggccctgaagcgctcagcccgagaactcatagaaggcagtcgggatgactcctcctgggtcaaggtccagatgcaggaattaagcacacgctgggagaccgtgtgtgcactttctatatcaaagcaaacacggttagaagcagccctgcgtcaggcagaggaattccactcggtggtacatgccctcttggagtggctggctgaggcggagcaaaccctgcgtttccatggtgtcctcccagatgatgaggatgctctccggactctcattgatcagcataaagaattcatgaagaaactggaagaaaagagagctgaactaaataaagccaccactatgggcgacaccgttttggctatctgccaccccgactccatcactaccattaagcactggataacaatcatccgggcgaggtttgaggaggtgctggcctgggcaaagcaacatcagcagagattagcaagtgctctggctgggcttattgccaaacaggaattgttggaagctttgctggcttggttgcaatgggctgaaactacacttactgataaggataaagaagtcatcccccaggagatcgaagaggtgaaagcactcattgcagaacaccagaccttcatggaggaaatgaccagaaaacagcctgatgttgataaagtaacgaagacctataagaggagagctgctgatccttcctcattacaatcccatattccagtcttggataagggacgagcaggaagaaaacgctttccagcatcaagcttgtatccctctgggtcacagacacaaattgaaaccaaaaatcctagggtaaacttactggtgagcaaatggcagcaagtctggctcctggcgttggaaagaaggaggaaactcaatgatgccttggacagactagaggaggtttggaaattcataccctcaacaccacattgtcatttgccctcattcctcataacacattgccattgccaaaatcttggtattttttaacttttctgataataagcaaactcttgctatttgagtacatttttaaatttccaaaataaataccacaagtatgtgtgattttgtgaaatattgatatatgggatttggatttagggaatcaa

SEQ ID NO: 310082 - DNA, 1206 bp, Homo sapiens
gtcttgaaactatattattcattctttaaagtctgatacatatgtgtagtgcaccttaaacacagttggaatgctgtatcaggtgtaaatataatccatagcacttacaatatcttgccagctactttattcagtccaaaaggaaaatatctgttgagacaagcaataagatatctctatgtaggacacagagactccatttactggtagacaaagggcctggtttgttgaaaaaagactccagagcttggagctagcagaacttaattggatacttttgttattcttgcctagcaaaatataattctgattctctctgctataatagttctgtttattcttaatcttttaaaaatcattatctctgatatttattagaaggaaataaaatgcaatattgataaaaatgactaatgtgctgttttttacgataactctaaaatatttgaatcattcattgctaatcataaaacgtattagacaatccaaaaacctccaagattgagtgctctatgttgactgtgatggtaaccttattttcatgcctacttgcttaaagtttgtctccttttcactgctatcctgcctactatcgatactttgggtaaattttaagtgaaaagtaaaagaaaatttgtgaccacacgggaaaataagcatgtaaaatagtgatttgtgctcagattgcattattttgtgaaacaaataaataagtggaaacaattggcactttgcaggtggctcagcgagcagcccagctgcaggaggccttgctgcatcctggatattagacctattatactgtaagaatataagtataaagtgcgttcatatacatgtgaggttttcttttgcttgagtggacagtagcacctgtatcattgaactcattttgtatcagagcaattttgcttgcagaaagctatgaaataaaacacgtcccttaactgcattgctatggaattaattttttttccccagggaaaactagtgtatttttttatgagcaatatcaatttggagtgaccaaaagatacttaaaaatgggtttattttgatttctcatctgaaataatcatgttctggtattatatctatctatatttaataaatatatacattttaatttattatgtgtactcacatactatagaaagatattagtatgcatttaataaaacatattcacttgaatatatggaatac

SEQ ID NO: 310083 - DNA, 559 bp, Homo sapiens
attcagagtgctgccaaaagcactagcactcagggcttggagcatgacctggatgatgtcaatgcacggtggaagactctcaataagaaggtggctcagcgagcagcccagctgcaggaggccttgctgcatcctggatattagacctattatactgtaagaatataagtataaagtgcgttcatatacatgtgaggttttcttttgcttgagtggacagtagcacctgtatcattgaactcattttgtatcagagcaattttgcttgcagaaagctatgaaataaaacacgtcccttaactgcattgctatggaattaattttttttccccagggaaaactagtgtatttttttatgagcaatatcaatttggagtgaccaaaagatacttaaaaatgggtttattttgatttctcatctgaaataatcatgttctggtattatatctatctatatttaataaatatatacattttaatttattatgtgtactcacatactatagaaagatattagtatgcatttaataaaacatattcacttgaatatatggaatac

SEQ ID NO: 310084 - DNA, 1072 bp, Homo sapiens
gaatcgtcagttggaaggtatctcggtggtagcacagcaatttcatgaaaccttagaaccactgaacgagtggcttacaaccatagaaaagaggctggtgaattgtgaacccataggaacccaagcatctaaacttgaggaacaaattgcacagcacaaagccttagaagatgacatcatcaatcacaataaacatttacaccaggctgttagcattggccagtccttaaaggttttgagctccagggaggataaagatatggtgcagagtaaattagacttctctcaagtatggtacattgagattcaagagaaaagtcacagcaggtctgagctcctccagcaggccttatgtaatgctaagatttttggggaagatgaagttgaactgatgaactggctgaatgaagtgcatgacaaactgagcaagctctcagtccaggattacagcactgaggggctatggaagcagcagtctgaacttcgggttctgcaagaggacatcttactcaggaaacaaaatgtagatcaggctttactaaatggtttagaactacttaaacaaaccacaggtgatgaagttttaataattcaagataaattggaagccattaaagcaaggtacaaagacattactaaactgagcactgatgtggccaagactctggaacaggcgctgcagcttgcaaggcggctgcactccacacacgaagagctgtgtacctggctggacaaagtggaggtggaattactttcatatgaaactcaggttctgaaaggagaagaagcaagtcaagcacaaatgagaccaaaggaactgaaaaaggaagctaagaacaacaaagccttactggactcccttaatgaagtgagcagtgctttgctggaactggtaccatggagggcaagagaaggacttgagaaaatggtagctgaggacaatgagcgctaccgattagtgagcgacaccatcactcagaaggtggaggagatcgatgcagccattctgcgatcacagcagtttgaccaagcagctgatgctgagttatcctggattactgaaaaaaaaaaa

SEQ ID NO: 310085 - DNA, 745 bp, Homo sapiens
gaatcgtcagttggaaggtatctcggtggtagcacagcaatttcatgaaaccttagaaccactgaacgagtggcttacaaccatagaaaagaggctggtgaattgtgaacccataggaacccaagcatctaaacttgaggaacaaattgcacagcacaaagttctgcaagaggacatcttactcaggaaacaaaatgtagatcaggctttactaaatggtttagaactacttaaacaaaccacaggtgatgaagttttaataattcaagataaattggaagccattaaagcaaggtacaaagacattactaaactgagcactgatgtggccaagactctggaacaggcgctgcagcttgcaaggcggctgcactccacacacgaagagctgtgtacctggctggacaaagtggaggtggaattactttcatatgaaactcaggttctgaaaggagaagaagcaagtcaagcacaaatgagaccaaaggaactgaaaaaggaagctaagaacaacaaagccttactggactcccttaatgaagtgagcagtgctttgctggaactggtaccatggagggcaagagaaggacttgagaaaatggtagctgaggacaatgagcgctaccgattagtgagcgacaccatcactcagaaggtggaggagatcgatgcagccattctgcgatcacagcagtttgaccaagcagctgatgctgagttatcctggattactgaaaaaaaaaaa

SEQ ID NO: 310086 - DNA, 95 bp, Homo sapiens
gaccaggatgggaaaataacgcggcaggaatttattgatggaattctttcctcaagtaagttccaagacagatgactatgactgatacaattttt

SEQ ID NO: 310087 - DNA, 397 bp, Homo sapiens
aattgaagagtttctcccccttcacctcctaaagaggaatagtagagagtttccacccatatgtaaagaagtggtgttagtggaatatcatggtacaggagcaatattttgaaatgtcttgttgctggttaaatacaggaacgccaatacaaggaagcaagcttcgacttccaggatatttatcagggaaaggcttccactctggggaggacagtggcttgataacaactgcagctgccagagtccgaacacagtttgctggtgagtgtggtgcctttcttttttcaatggcttttgcagcatggtcatctgaggattaaagtcccttttcctcctcattggggaagaaattacaaattgaccctgaggtagtcttaaaatgatatgtagccccagt

SEQ ID NO: 310088 - DNA, 421 bp, Homo sapiens
gaaataataacatggttcttttatccttctgcttttagttcatttctaaagacggttttctgtagtaactcttatttgattgacatcatttctttcatttcagaccttcatggaggaaatgaccagaaaacagcctgatgttgataaagtaacgaagacctataagaggagagctgctgatccttcctcattacaatcccatattccagtcttggataagggacgagcaggaagtaagcagtgatcaatttctttaaaatgtcaataaataagggagctaattttcttttattttgaattatttgaaatttgggggcaattggtgattttacatgagcacttgatatcatgaaatactttctagaaggaatacgtgtgctcaagtattgtagaaacttatttaaaaataaagaaaaaatat

SEQ ID NO: 310089 - DNA, 746 bp, Homo sapiens
aaagagacagcacgaggaagatttttgggatggttgaactgttctggatcttgattgtggtgatgattacgtgaatctatacatgtgttaaaatgtatagaagtgtataccaaaaaatgtcaagtttactgcctgataatctaaaacaaaattttaaaaatatttaaacagtttaaaaggcttatttttatgaagaaacatgaagggtccatggtttccaaaggtgggaattttcctggaacagatgccatgtatttaaggaataagaaagaaagtttagaaaagttttgtctttttcctaagaagagcaaagaaacaacaatgaataccaacatactgctcttccccttgagtaccactcaaccttcatcaattaattttagatgttcagatatatgagtgacgttttttgttgcaaggatcaatttttctacctttttccctagacaaaacaaattggaggaagccctgttattttctggacaattcacagatgccctacaggctctcattgattggttatatagagttgaaccccagctggcagaagaccagcctgttcatggagacattgatttggtgatgaatctgatcgataatcacaaggtattgttatctgggacattttattttatcttgtttgattattctgagtgtacaggaaatgtaaaccatttaaattagccttttaaaatcagaagactatagatcatactacataacagtctttattgttgaaatatgtg

SEQ ID NO: 310090 - DNA, 1002 bp, Homo sapiens
taaatatttatttattttttcagcttgagtctcgccctggcgacagagtaagactccgtctcgggggaataaaaaagctctatatttgatacttattgaaaacgaagtataaggatattctttctctttacagattggatttacatttagtgtgcctgttgcaaaaacagcagaactttctggttctagtagtactttagaaccaattataagtagttcaggtaagtaaaaatttcttacattttaacatacaaacaattgcatacagtagattagtatttcagcttctttcacctttggtaattcttataaatgccttcatttggatgaaattagctctgaaaagcaagcaggcactattatttaacctttttgacggtgctttttattaattatctttagagatacttagctccttaaatggaagtgtcagtttggttttgagagagataggcatggtagcaaatttatccactatctttgtttagtcaaaacaaggtgacaagttagttataaagcaagtctcattataagaaatttataggttgtctacattatagttgtagtagattttatttctagtttttacctttcagttcacaagcatttttatgtataaaggttatgcaggcccatgtagattgtgatacataatttctgaaccgaagaaatcagcatcattgaaggaaggaggccatgggtcattcctgtaaacccagcagtttgggaggctgtggtgggaggattgcttgaggccagaagctcaagacgatcctaggcagcacagtgagactcatccctaccgaaaaaaaaaaaaaaagaaaaagaaataaccaggtggtggtgtgagcctgtagtcccagctacctgggatgctgaagtgggaggattgcttgagcccaggaattcaaggctacagtgagctatgattgcactaccacactacagctggctgacagagcaagaccctatctcaaaaaaaaagaaagaaatgaatgaata

SEQ ID NO: 310091 - DNA, 1427 bp, Homo sapiens
agccgtatttattttctaattctaaggatcatggactttatttttcaaccacagatttttttttcctccttcttaaatcattagctcttgtctttgattttactgtctgcttacttcctgcctacttaaccaaccgacagggagaaggagaatgggaagaggttactgtttttatgttaagtgtcttttcaaagtctaatttacagccaagaacagcaaaagtaccccttggctttgtgcctctgcggcgccccggagatctccttccccgtccctcttcctttccgagaagccgcgttccgttgttgaactacgtttcccagcgtgccgcgcggccgagagcgtggactcgaccagcccttcctctttgcctatcagctcgtcgcagcatgatgatgcaaatgcgtcgggcgccgatgagtgacgacattctggctcgcgaccgcggcagccgccttagcaggggtaataggcgcaacggcggcggaggctgcagggacgacgacgacgacggcggcggggcgggcgctgtgcgcacaggggaggggtaggcgggcgtcgccagcggcttcaactgcggcagctacggctagggcgacggaagaactcccaccagtcggcggtcgagttaggcctcagcaccgcggggaactgttcgtgctgtcctctgcgggagatctccatagagaccgtgacacacacagaggcgggggtccgcagaggcggccggaccggagcctcctcggcctctgcggccgccacccccttccccgctgccagcactcaccctctctccgctcctgctcgcaacctcgcggttcctggggtgcttgtgcccactgtgtggacagcgcgggcggacttttgggccggggccgggcggcgggggaggctctctaaggcctccgcctctgcctctcccgcccccttacccgccccggagcgggaagcggcggaggctccgccatggcctcgggagccggaggagtcggagggggcggtggcggcaagatccggacgcggcgttgccaccaggggccaattaagccttaccagcaggggcgacaacagcatcaggtatgggaccccgacgccgcggtggcctggcgggtggggaaactcggctggaggggacgggcggttcgaggccccggcgccccacgtggagcagacaggagggcctgaggaaaggcccgagtgaggctccgggggagctcaggccgttgggggtggcgacgggaagtgggctgagacaggcccagccttgcggcgcacacgtgtggtttgggccgcctttcccccaactctctgggtcaggggctttcccaggcaggctctgggcgggaaaagaaattgtaggcccatgatgcgcgcgtttctttattttttggcggggatttggaatttgagggtattactcatgttct

SEQ ID NO: 310092 - DNA, 843 bp, Homo sapiens
taaccctataatgtaataaaggttatatgaatgtagtctctttctctctcaaaatatcttattgtatataatatctttggatcatggttgaccatgggtcagggaaactggaaattgaaaccatggataaggtaggctactatatataactttatgtttcatattagtacaacaactgtagtatatcgtaagaattactatcttttttccctcagttttaccaattaggaaattggtacagaaggcagttaggttccccaagtcaaatggctggttggtggcacagctgggattaaaaatcatgttcagtttttctgattgaagaacccataatgttaacactacatggtaccatcttcttcctgtatactttcatgctgaaaataagtagagataaaagaatgatgtgaaagatgaaatatatcatgcaacatgttatgttttaggaaatggaagttccagtattaccgaaaatctctctaccgatcaccagttcttcactgcctacctttaattttagttcccctgagatcacaacttcctctccatcacccatcaattcgtctcaagcattaacaaacaaggtacaaaaccattatataaatacaggtgacatttgttctttcttaattctttatttaaaaaaaaccctatattataaacagtgtttaattttcattatggaaattaataacatagtaaacagagaaatggaaatgctgttttgcttttttaaaaaaatgtacaaatatcttggatacattataatggagtgttcctcaactcttatgcaataccatagagaaggatattcttgtaaatttgtttccaaataatgtttcc

SEQ ID NO: 310093 - DNA, 6455 bp, Homo sapiens
agccgtatttattttctaattctaaggatcatggactttatttttcaaccacagatttttttttcctccttcttaaatcattagctcttgtctttgattttactgtctgcttacttcctgcctacttaaccaaccgacagggagaaggagaatgggaagaggttactgtttttatgttaagtgtcttttcaaagtctaatttacagccaagaacagcaaaagtaccccttggctttgtgcctctgcggcgccccggagatctccttccccgtccctcttcctttccgagaagccgcgttccgttgttgaactacgtttcccagcgtgccgcgcggccgagagcgtggactcgaccagcccttcctctttgcctatcagctcgtcgcagcatgatgatgcaaatgcgtcgggcgccgatgagtgacgacattctggctcgcgaccgcggcagccgccttagcaggggtaataggcgcaacggcggcggaggctgcagggacgacgacgacgacggcggcggggcgggcgctgtgcgcacaggggaggggtaggcgggcgtcgccagcggcttcaactgcggcagctacggctagggcgacggaagaactcccaccagtcggcggtcgagttaggcctcagcaccgcggggaactgttcgtgctgtcctctgcgggagatctccatagagaccgtgacacacacagaggcgggggtccgcagaggcggccggaccggagcctcctcggcctctgcggccgccacccccttccccgctgccagcactcaccctctctccgctcctgctcgcaacctcgcggttcctggggtgcttgtgcccactgtgtggacagcgcgggcggacttttgggccggggccgggcggcgggggaggctctctaaggcctccgcctctgcctctcccgcccccttacccgccccggagcgggaagcggcggaggctccgccatggcctcgggagccggaggagtcggagggggcggtggcggcaagatccggacgcggcgttgccaccaggggccaattaagccttaccagcaggggcgacaacagcatcagggcattcttagcagggttacagaatctgttaagaatattgtgccagggtggctacaaagatacttcaacaagaatgaagatgtatgcagctgttcaacagacacaagcgaggttccacgctggccagaaaataaagaggaccatctggtatatgccgatgaggagagctctaatattactgatgggagaatcacacctgagccagcagtcagtaatacagaagaaccttcaacaactagtactgcttcaaattatccagatgtgttaacaaggccttctcttcatcggagccatctgaatttttccatgttggaatcccctgcattacactgtcagccatctacatcctcggcattcccaattggcagttcgggattttcccttgtaaaggaaattaaagattctacctctcagcatgatgatgataacatctcaactaccagtggtttttcttcaagagcttctgataaagatataactgtttcaaagaacacttcattgccacctctgtggtccccagaagctgaacgttctcactcactctcacagcacactgccaccagctcaaaaaaaccagcattcaacttgtctgcctttggaacactttccccttcacttgggaattcttcaatccttaaaaccagtcagcttggagattctcctttttatcctggaaaaacaacatacggtggggcagcagctgctgtaagacagtctaaactacgaaatacaccttatcaggcaccagttagaagacaaatgaaagctaagcaactcagtgcacaatcttacggtgtgaccagttcaacagctcggcgaatattgcagtctttagagaagatgtcaagccctttagcggatgcaaaaagaattccatccattgtttcttctcctctgaattctcctcttgataggagtgggatagatatcacagattttcaggccaaaagagaaaaggtggattctcaatatcctcctgttcagagacttatgaccccaaagccagtttccatagcaacaaatcgaagtgtttattttaaaccatctctgactccttctggtgaattcaggaagactaatcaaagaatagataacaagtgcagtactggatatgaaaaaaatatgacacccggacaaaatagagaacaacgagaaagtggcttttcatatccaaatttcagtttgcctgcagccaatggtttatcttctggagtaggtggtggaggtggcaagatgagacgagaaagaacacgcctttgttgcttctaaacctctggaggaggaggaaatggaagttccagtattaccgaaaatctctctaccgatcaccagttcttcactgcctacctttaattttagttcccctgagatcacaacttcctctccatcacccatcaattcgtctcaagcattaacaaacaaggtacaaatgacctctccgagcagcactggcagtcccatgtttaaattttcatctccaatcgtaaaatctactgaggcaaatgtactacctccatcatctattggatttacatttagtgtgcctgttgcaaaaacagcagaactttctggttctagtagtactttagaaccaattataagtagttcagctcatcatgtcactacagtgaacagtacaaattgtaagaagacaccacctgaagattgtgagggtccttttagacctgcagaaatcctgaaagaaggaagtgttctagatattctgaaaagccctggtttcgcatcgccgaagatagattctgttgctgctcagcccaccgcaacaagcccagtagtttatacaagaccagcaataagtagcttttcttctagtggaattgggtttggggagagtttaaaagctgggtcatcatggcagtgtgatacatgtctactccagaacaaagttacagacaacaaatgcatagcctgtcaagcagcaaaattgtcacccagagatactgctaaacagactggaattgaaacaccaaataaaagtggcaaaacaactctttctgcatcagggacaggctttggagacaaatttaaaccagtgataggcacttgggattgtgatacctgtttagtgcaaaataaacctgaagcaataaaatgtgtagcctgtgaaacaccgaaacctggaacttgtgtgaagcgagcccttacattgacagtggtttcggaaagtgctgagactatgactgcttcatcttccagctgcactgtaaccactggtaccttaggatttggagataaattcaaaaggcccattggatcttgggagtgttcagtatgctgtgtttctaataatgcagaagacaataagtgtgtgtcctgtatgtctgagaaaccaggaagttcagtacctacttcaagtagcagcactgtacctgtctctctgccttctggaggctctctaggattggaaaagttcaagaaacccgagggaagctgggactgtgaattgtgcctagtgcagaataaggcagactctaccaaatgtttggcatgtgaaagtgcaaagccaggcacaaaatctgggtttaaaggctttgacacatcttcctcatcttcgaactcagcagcctcctcatccttcaaatttggtgtctcatcatcctcttctgggccttctcagactttaacaagcactggaaattttaaatttggagatcagggaggattcaaaataggtgtgtcatctgattctgggtctataaaccccatgagtgaaggctttaaattttctaaaccaataggagattttaaatttggagtttcatctgaatctaagcccgaagaagttaaaaaagatagtaagaatgataattttaagtttggactttcttctggtttaagcaacccagtttctttaactccatttcaatttggggtatctaatcttggacaggaagaaaagaaagaggaactgcccaaatcttcctctgcaggttttagctttggtacaggtgttattaactccacccctgctcctgctaacaccatagtgacctctgagaacaagagcagcttcaaccttggaaccatagaaaccaagagtgcttcagtggctcctttcacatgtaagacatcagaagctaaaaaagaagaaatgcctgccaccaaaggaggattctcttttggcaacgtggagcctgcctctctgccatctgcctcagtgtttgttttgggaaggacagaagagaaacagcaagagcctgtcacttctacttccctagtttttgggaagaaagctgacaatgaagagccaaagtgtcaaccagtgttttcctttgggaattcagagcaaaccaaagatgagaattcttcaaagtccacatttagttttagtatgacaaaaccatctgagaaggaatctgaacagccagcaaaagccacttttgcctttggagctcaaactagtactacagctgatcaaggtgcagcaaagccagtttttagtttcttgaacaacagttcctctagttcaagtacaccagccacttctgctggtggtggcatatttggtagttccacctcttcctccaatccacctgtggctacctttgtgtttggacagtccagcaatcctgtgagcagctctgcctttggtaacactgctgaatccagcacctctcagtctttgctattttctcaagatagcaaactagcaaccacatccagcacaggtacagctgtcaccccatttgtctttggtccaggagccagcagtaataatactaccacctctggtttcggctttggagccacaaccacatctagctctgcaggatcctcctttgtatttggaactggaccctcagcaccatctgccagtccagcatttggtgctaaccagaccccaacatttggacaaagtcaaggtgccagccagcccaatcccccaggctttggatctatatcatcttccacagcattatttcccactggttctcagcctgcaccacctacttttgggacagtgtcaagcagtagccagccccctgtgtttggacagcaacctagtcagtctgcatttggctctggaacaactcctaattctagttcggctttccagtttggcagcagcactacaaatttcaacttcacaaacaacagtccatcaggagtgttcacatttggtgcaaattctagcacacctgcagcctcagcccagccttcaggctcggggggctttccatttaaccagtctccagcagcatttacagtggggtcaaatgggaaaaatgtgttctcttcttctggaacttcattctctggtcgcaagataaagactgctgttagacgcaggaaataaaggtcacattggtgttgtactcaattttaacaacagctggtgccctgctttcagatactggattgtactttgtgctggggttatctgaagtcagatctgcctaaggacttctttaattttggaattttcctcctttctctttcgttacagaagccccaccctgcctcacccacccttttttaaataaataaatagctagactggtgactgattcttcagcaaaaatattttatgatccagcagattattcactgatttgacatagtctggctgtacccaggaatggagcctgcacggtgaatggctttgtatagaacctctttgtctacaccattatgtgcgctgataagcgttcatggaacgcgttgaaattgtaattatatctgaggaattctgtatagattagaattctgtatagattagagagtgttgaaacggatgatttctatgctgagtttgtgctggtgtatgtgtgaagtgagtgagttgggtgtattgtgcgctaaacttttctgatagaggaagcctgattaaagaatggtccgtgctaaggacttgttagatctagttcactctccatttaataattatatgctatttctatattttcattctcctatcacctgtcttgcctttttcattattttattatgaaacttgtgtaaatacaattttgtttctgtactttttggcataacataaatctgtgaacttgaaatttgaattttgtgttagagatttttttgttgtttgtttagtcttgtctcagattttattatgtaaatcccattattcaaagttgcctaaatccatttggaaatctttaaaaaaaaaattggggattcttaaagttgaatttattggcttttctgatccagttttgtttggaccaaaaaccagtattgtacaaagtattaagcatatatttttatatttactaaaatggactgtggtgactttggataataaggaaaagtttaatattaaagccatgtttattacagtataattaacatgttaaaccatgggataaatgccatcaataaaaaattatgacata

SEQ ID NO: 310094 - DNA, 6349 bp, Homo sapiens
agccgtatttattttctaattctaaggatcatggactttatttttcaaccacagatttttttttcctccttcttaaatcattagctcttgtctttgattttactgtctgcttacttcctgcctacttaaccaaccgacagggagaaggagaatgggaagaggttactgtttttatgttaagtgtcttttcaaagtctaatttacagccaagaacagcaaaagtaccccttggctttgtgcctctgcggcgccccggagatctccttccccgtccctcttcctttccgagaagccgcgttccgttgttgaactacgtttcccagcgtgccgcgcggccgagagcgtggactcgaccagcccttcctctttgcctatcagctcgtcgcagcatgatgatgcaaatgcgtcgggcgccgatgagtgacgacattctggctcgcgaccgcggcagccgccttagcaggggtaataggcgcaacggcggcggaggctgcagggacgacgacgacgacggcggtcgagttaggcctcagcaccgcggggaactgttcgtgctgtcctctgcgggagatctccatagagaccgtgacacacacagaggcgggggtccgcagaggcggccggaccggagcctcctcggcctctgcggccgccacccccttccccgctgccagcactcaccctctctccgctcctgctcgcaacctcgcggttcctggggtgcttgtgcccactgtgtggacagcgcgggcggacttttgggccggggccgggcggcgggggaggctctctaaggcctccgcctctgcctctcccgcccccttacccgccccggagcgggaagcggcggaggctccgccatggcctcgggagccggaggagtcggagggggcggtggcggcaagatccggacgcggcgttgccaccaggggccaattaagccttaccagcaggggcgacaacagcatcagggcattcttagcagggttacagaatctgttaagaatattgtgccagggtggctacaaagatacttcaacaagaatgaagatgtatgcagctgttcaacagacacaagcgaggttccacgctggccagaaaataaagaggaccatctggtatatgccgatgaggagagctctaatattactgatgggagaatcacacctgagccagcagtcagtaatacagaagaaccttcaacaactagtactgcttcaaattatccagatgtgttaacaaggccttctcttcatcggagccatctgaatttttccatgttggaatcccctgcattacactgtcagccatctacatcctcggcattcccaattggcagttcgggattttcccttgtaaaggaaattaaagattctacctctcagcatgatgatgataacatctcaactaccagtggtttttcttcaagagcttctgataaagatataactgtttcaaagaacacttcattgccacctctgtggtccccagaagctgaacgttctcactcactctcacagcacactgccaccagctcaaaaaaaccagcattcaacttgtctgcctttggaacactttccccttcacttgggaattcttcaatccttaaaaccagtcagcttggagattctcctttttatcctggaaaaacaacatacggtggggcagcagctgctgtaagacagtctaaactacgaaatacaccttatcaggcaccagttagaagacaaatgaaagctaagcaactcagtgcacaatcttacggtgtgaccagttcaacagctcggcgaatattgcagtctttagagaagatgtcaagccctttagcggatgcaaaaagaattccatccattgtttcttctcctctgaattctcctcttgataggagtgggatagatatcacagattttcaggccaaaagagaaaaggtggattctcaatatcctcctgttcagagacttatgaccccaaagccagtttccatagcaacaaatcgaagtgtttattttaaaccatctctgactccttctggtgaattcaggaagactaatcaaagaatagataacaagtgcagtactggatatgaaaaaaatatgacacccggacaaaatagagaacaacgagaaagtggcttttcatatccaaatttcagtttgcctgcagccaatggtttatcttctggagtaggtggtggaggtggcaagatgagacgagaaagaacacgcctttgttgcttctaaacctctggaggaggaggaaatggaagttccagtattaccgaaaatctctctaccgatcaccagttcttcactgcctacctttaattttagttcccctgagatcacaacttcctctccatcacccatcaattcgtctcaagcattaacaaacaaggtacaaatgacctctccgagcagcactggcagtcccatgtttaaattttcatctccaatcgtaaaatctactgaggcaaatgtactacctccatcatctattggatttacatttagtgtgcctgttgcaaaaacagcagaactttctggttctagtagtactttagaaccaattataagtagttcagctcatcatgtcactacagtgaacagtacaaattgtaagaagacaccacctgaagattgtgagggtccttttagacctgcagaaatcctgaaagaaggaagtgttctagatattctgaaaagccctggtttcgcatcgccgaagatagattctgttgctgctcagcccaccgcaacaagcccagtagtttatacaagaccagcaataagtagcttttcttctagtggaattgggtttggggagagtttaaaagctgggtcatcatggcagtgtgatacatgtctactccagaacaaagttacagacaacaaatgcatagcctgtcaagcagcaaaattgtcacccagagatactgctaaacagactggaattgaaacaccaaataaaagtggcaaaacaactctttctgcatcagggacaggctttggagacaaatttaaaccagtgataggcacttgggattgtgatacctgtttagtgcaaaataaacctgaagcaataaaatgtgtagcctgtgaaacaccgaaacctggaacttgtgtgaagcgagcccttacattgacagtggtttcggaaagtgctgagactatgactgcttcatcttccagctgcactgtaaccactggtaccttaggatttggagataaattcaaaaggcccattggatcttgggagtgttcagtatgctgtgtttctaataatgcagaagacaataagtgtgtgtcctgtatgtctgagaaaccaggaagttcagtacctacttcaagtagcagcactgtacctgtctctctgccttctggaggctctctaggattggaaaagttcaagaaacccgagggaagctgggactgtgaattgtgcctagtgcagaataaggcagactctaccaaatgtttggcatgtgaaagtgcaaagccaggcacaaaatctgggtttaaaggctttgacacatcttcctcatcttcgaactcagcagcctcctcatccttcaaatttggtgtctcatcatcctcttctgggccttctcagactttaacaagcactggaaattttaaatttggagatcagggaggattcaaaataggtgtgtcatctgattctgggtctataaaccccatgagtgaaggctttaaattttctaaaccaataggagattttaaatttggagtttcatctgaatctaagcccgaagaagttaaaaaagatagtaagaatgataattttaagtttggactttcttctggtttaagcaacccagtttctttaactccatttcaatttggggtatctaatcttggacaggaagaaaagaaagaggaactgcccaaatcttcctctgcaggttttagctttggtacaggtgttattaactccacccctgctcctgctaacaccatagtgacctctgagaacaagagcagcttcaaccttggaaccatagaaaccaagagtgcttcagtggctcctttcacatgtaagacatcagaagctaaaaaagaagaaatgcctgccaccaaaggaggattctcttttggcaacgtggagcctgcctctctgccatctgcctcagtgtttgttttgggaaggacagaagagaaacagcaagagcctgtcacttctacttccctagtttttgggaagaaagctgacaatgaagagccaaagtgtcaaccagtgttttcctttgggaattcagagcaaaccaaagatgagaattcttcaaagtccacatttagttttagtatgacaaaaccatctgagaaggaatctgaacagccagcaaaagccacttttgcctttggagctcaaactagtactacagctgatcaaggtgcagcaaagccagtttttagtttcttgaacaacagttcctctagttcaagtacaccagccacttctgctggtggtggcatatttggtagttccacctcttcctccaatccacctgtggctacctttgtgtttggacagtccagcaatcctgtgagcagctctgcctttggtaacactgctgaatccagcacctctcagtctttgctattttctcaagatagcaaactagcaaccacatccagcacaggtacagctgtcaccccatttgtctttggtccaggagccagcagtaataatactaccacctctggtttcggctttggagccacaaccacatctagctctgcaggatcctcctttgtatttggaactggaccctcagcaccatctgccagtccagcatttggtgctaaccagaccccaacatttggacaaagtcaaggtgccagccagcccaatcccccaggctttggatctatatcatcttccacagcattatttcccactggttctcagcctgcaccacctacttttgggacagtgtcaagcagtagccagccccctgtgtttggacagcaacctagtcagtctgcatttggctctggaacaactcctaattctagttcggctttccagtttggcagcagcactacaaatttcaacttcacaaacaacagtccatcaggagtgttcacatttggtgcaaattctagcacacctgcagcctcagcccagccttcaggctcggggggctttccatttaaccagtctccagcagcatttacagtggggtcaaatgggaaaaatgtgttctcttcttctggaacttcattctctggtcgcaagataaagactgctgttagacgcaggaaataaaggtcacattggtgttgtactcaattttaacaacagctggtgccctgctttcagatactggattgtactttgtgctggggttatctgaagtcagatctgcctaaggacttctttaattttggaattttcctcctttctctttcgttacagaagccccaccctgcctcacccacccttttttaaataaataaatagctagactggtgactgattcttcagcaaaaatattttatgatccagcagattattcactgatttgacatagtctggctgtacccaggaatggagcctgcacggtgaatggctttgtatagaacctctttgtctacaccattatgtgcgctgataagcgttcatggaacgcgttgaaattgtaattatatctgaggaattctgtatagattagaattctgtatagattagagagtgttgaaacggatgatttctatgctgagtttgtgctggtgtatgtgtgaagtgagtgagttgggtgtattgtgcgctaaacttttctgatagaggaagcctgattaaagaatggtccgtgctaaggacttgttagatctagttcactctccatttaataattatatgctatttctatattttcattctcctatcacctgtcttgcctttttcattattttattatgaaacttgtgtaaatacaattttgtttctgtactttttggcataacataaatctgtgaacttgaaatttgaattttgtgttagagatttttttgttgtttgtttagtcttgtctcagattttattatgtaaatcccattattcaaagttgcctaaatccatttggaaatctttaaaaaaaaaattggggattcttaaagttgaatttattggcttttctgatccagttttgtttggaccaaaaaccagtattgtacaaagtattaagcatatatttttatatttactaaaatggactgtggtgactttggataataaggaaaagtttaatattaaagccatgtttattacagtataattaacatgttaaaccatgggataaatgccatcaataaaaaattatgacata

SEQ ID NO: 310095 - DNA, 6401 bp, Homo sapiens
agccgtatttattttctaattctaaggatcatggactttatttttcaaccacagatttttttttcctccttcttaaatcattagctcttgtctttgattttactgtctgcttacttcctgcctacttaaccaaccgacagggagaaggagaatgggaagaggttactgtttttatgttaagtgtcttttcaaagtctaatttacagccaagaacagcaaaagtaccccttggctttgtgcctctgcggcgccccggagatctccttccccgtccctcttcctttccgagaagccgcgttccgttgttgaactacgtttcccagcgtgccgcgcggccgagagcgtggactcgaccagcccttcctctttgcctatcagctcgtcgcagcatgatgatgcaaatgcgtcgggcgccgatgagtgacgacattctggctcgcgaccgcggcagccgccttagcaggggtaataggcgcaacggcggcggaggctgcagggacgacgacgacgacggcggcggggcgggcgctgtgcgcacaggggaggggtaggcgggcgtcgccagcggcttcaactgcggcagctacggctagggcgacggaagaactcccaccagtcggcggtcgagttaggcctcagcaccgcggggaactgttcgtgctgtcctctgcgggagatctccatagagaccgtgacacacacagaggcgggggtccgcagaggcggccggaccggagcctcctcggcctctgcggccgccacccccttccccgctgccagcactcaccctctctccgctcctgctcgcaacctcgcggttcctggggtgcttgtgcccactgtgtggacagcgcgggcggacttttgggccggggccgggcggcgggggaggctctctaaggcctccgcctctgcctctcccgcccccttacccgccccggagcgggaagcggcggaggctccgccatggcctcgggagccggaggagtcggagggggcggtggcggcaagatccggacgcggcgttgccaccaggggccaattaagccttaccagcaggggcgacaacagcatcagggcattcttagcagggttacagaatctgttaagaatattgtgccagggtggctacaaagatacttcaacaagaatgaagatgtatgcagctgttcaacagacacaagcgaggttccacgctggccagaaaataaagaggaccatctggtatatgccgatgaggagagctctaatattactgatgggagaatcacacctgagccagcagtcagtaatacagaagaaccttcaacaactagtactgcttcaaattatccagatgtgttaacaaggccttctcttcatcggagccatctgaatttttccatgttggaatcccctgcattacactgtcagccatctacatcctcggcattcccaattggcagttcgggattttcccttgtaaaggaaattaaagattctacctctcagcatgatgatgataacatctcaactaccagtggtttttcttcaagagcttctgataaagatataactgtttcaaagaacacttcattgccacctctgtggtccccagaagctgaacgttctcactcactctcacagcacactgccaccagctcaaaaaaaccagcattcaacttgtctgcctttggaacactttccccttcacttgggaattcttcaatccttaaaaccagtcagcttggagattctcctttttatcctggaaaaacaacatacggtggggcagcagctgctgtaagacagtctaaactacgaaatacaccttatcaggcaccagttagaagacaaatgaaagctaagcaactcagtgcacaatcttacggtgtgaccagttcaacagctcggcgaatattgcagtctttagagaagatgtcaagccctttagcggatgcaaaaagaattccatccattgtttcttctcctctgaattctgtggattctcaatatcctcctgttcagagacttatgaccccaaagccagtttccatagcaacaaatcgaagtgtttattttaaaccatctctgactccttctggtgaattcaggaagactaatcaaagaatagataacaagtgcagtactggatatgaaaaaaatatgacacccggacaaaatagagaacaacgagaaagtggcttttcatatccaaatttcagtttgcctgcagccaatggtttatcttctggagtaggtggtggaggtggcaagatgagacgagaaagaacacgcctttgttgcttctaaacctctggaggaggaggaaatggaagttccagtattaccgaaaatctctctaccgatcaccagttcttcactgcctacctttaattttagttcccctgagatcacaacttcctctccatcacccatcaattcgtctcaagcattaacaaacaaggtacaaatgacctctccgagcagcactggcagtcccatgtttaaattttcatctccaatcgtaaaatctactgaggcaaatgtactacctccatcatctattggatttacatttagtgtgcctgttgcaaaaacagcagaactttctggttctagtagtactttagaaccaattataagtagttcagctcatcatgtcactacagtgaacagtacaaattgtaagaagacaccacctgaagattgtgagggtccttttagacctgcagaaatcctgaaagaaggaagtgttctagatattctgaaaagccctggtttcgcatcgccgaagatagattctgttgctgctcagcccaccgcaacaagcccagtagtttatacaagaccagcaataagtagcttttcttctagtggaattgggtttggggagagtttaaaagctgggtcatcatggcagtgtgatacatgtctactccagaacaaagttacagacaacaaatgcatagcctgtcaagcagcaaaattgtcacccagagatactgctaaacagactggaattgaaacaccaaataaaagtggcaaaacaactctttctgcatcagggacaggctttggagacaaatttaaaccagtgataggcacttgggattgtgatacctgtttagtgcaaaataaacctgaagcaataaaatgtgtagcctgtgaaacaccgaaacctggaacttgtgtgaagcgagcccttacattgacagtggtttcggaaagtgctgagactatgactgcttcatcttccagctgcactgtaaccactggtaccttaggatttggagataaattcaaaaggcccattggatcttgggagtgttcagtatgctgtgtttctaataatgcagaagacaataagtgtgtgtcctgtatgtctgagaaaccaggaagttcagtacctacttcaagtagcagcactgtacctgtctctctgccttctggaggctctctaggattggaaaagttcaagaaacccgagggaagctgggactgtgaattgtgcctagtgcagaataaggcagactctaccaaatgtttggcatgtgaaagtgcaaagccaggcacaaaatctgggtttaaaggctttgacacatcttcctcatcttcgaactcagcagcctcctcatccttcaaatttggtgtctcatcatcctcttctgggccttctcagactttaacaagcactggaaattttaaatttggagatcagggaggattcaaaataggtgtgtcatctgattctgggtctataaaccccatgagtgaaggctttaaattttctaaaccaataggagattttaaatttggagtttcatctgaatctaagcccgaagaagttaaaaaagatagtaagaatgataattttaagtttggactttcttctggtttaagcaacccagtttctttaactccatttcaatttggggtatctaatcttggacaggaagaaaagaaagaggaactgcccaaatcttcctctgcaggttttagctttggtacaggtgttattaactccacccctgctcctgctaacaccatagtgacctctgagaacaagagcagcttcaaccttggaaccatagaaaccaagagtgcttcagtggctcctttcacatgtaagacatcagaagctaaaaaagaagaaatgcctgccaccaaaggaggattctcttttggcaacgtggagcctgcctctctgccatctgcctcagtgtttgttttgggaaggacagaagagaaacagcaagagcctgtcacttctacttccctagtttttgggaagaaagctgacaatgaagagccaaagtgtcaaccagtgttttcctttgggaattcagagcaaaccaaagatgagaattcttcaaagtccacatttagttttagtatgacaaaaccatctgagaaggaatctgaacagccagcaaaagccacttttgcctttggagctcaaactagtactacagctgatcaaggtgcagcaaagccagtttttagtttcttgaacaacagttcctctagttcaagtacaccagccacttctgctggtggtggcatatttggtagttccacctcttcctccaatccacctgtggctacctttgtgtttggacagtccagcaatcctgtgagcagctctgcctttggtaacactgctgaatccagcacctctcagtctttgctattttctcaagatagcaaactagcaaccacatccagcacaggtacagctgtcaccccatttgtctttggtccaggagccagcagtaataatactaccacctctggtttcggctttggagccacaaccacatctagctctgcaggatcctcctttgtatttggaactggaccctcagcaccatctgccagtccagcatttggtgctaaccagaccccaacatttggacaaagtcaaggtgccagccagcccaatcccccaggctttggatctatatcatcttccacagcattatttcccactggttctcagcctgcaccacctacttttgggacagtgtcaagcagtagccagccccctgtgtttggacagcaacctagtcagtctgcatttggctctggaacaactcctaattctagttcggctttccagtttggcagcagcactacaaatttcaacttcacaaacaacagtccatcaggagtgttcacatttggtgcaaattctagcacacctgcagcctcagcccagccttcaggctcggggggctttccatttaaccagtctccagcagcatttacagtggggtcaaatgggaaaaatgtgttctcttcttctggaacttcattctctggtcgcaagataaagactgctgttagacgcaggaaataaaggtcacattggtgttgtactcaattttaacaacagctggtgccctgctttcagatactggattgtactttgtgctggggttatctgaagtcagatctgcctaaggacttctttaattttggaattttcctcctttctctttcgttacagaagccccaccctgcctcacccacccttttttaaataaataaatagctagactggtgactgattcttcagcaaaaatattttatgatccagcagattattcactgatttgacatagtctggctgtacccaggaatggagcctgcacggtgaatggctttgtatagaacctctttgtctacaccattatgtgcgctgataagcgttcatggaacgcgttgaaattgtaattatatctgaggaattctgtatagattagaattctgtatagattagagagtgttgaaacggatgatttctatgctgagtttgtgctggtgtatgtgtgaagtgagtgagttgggtgtattgtgcgctaaacttttctgatagaggaagcctgattaaagaatggtccgtgctaaggacttgttagatctagttcactctccatttaataattatatgctatttctatattttcattctcctatcacctgtcttgcctttttcattattttattatgaaacttgtgtaaatacaattttgtttctgtactttttggcataacataaatctgtgaacttgaaatttgaattttgtgttagagatttttttgttgtttgtttagtcttgtctcagattttattatgtaaatcccattattcaaagttgcctaaatccatttggaaatctttaaaaaaaaaattggggattcttaaagttgaatttattggcttttctgatccagttttgtttggaccaaaaaccagtattgtacaaagtattaagcatatatttttatatttactaaaatggactgtggtgactttggataataaggaaaagtttaatattaaagccatgtttattacagtataattaacatgttaaaccatgggataaatgccatcaataaaaaattatgacata

SEQ ID NO: 310096 - DNA, 6239 bp, Homo sapiens
agccgtatttattttctaattctaaggatcatggactttatttttcaaccacagatttttttttcctccttcttaaatcattagctcttgtctttgattttactgtctgcttacttcctgcctacttaaccaaccgacagggagaaggagaatgggaagaggttactgtttttatgttaagtgtcttttcaaagtctaatttacagccaagaacagcaaaagtaccccttggctttgtgcctctgcggcgccccggagatctccttccccgtccctcttcctttccgagaagccgcgttccgttgttgaactacgtttcccagcgtgccgcgcggccgagagcgtggactcgaccagcccttcctctttgcctatcagctcgtcgcagcatgatgatgcaaatgcgtcgggcgccgatgagtgacgacattctggctcgcgaccgcggcagccgccttagcaggggtaataggcgcaacggcggcggaggctgcagggacgacgacgacgacggcggcggggcgggcgctgtgcgcacaggggaggggtaggcgggcgtcgccagcggcttcaactgcggcagctacggctagggcgacggaagaactcccaccagtcggcggtcgagttaggcctcagcaccgcggggaactgttcgtgctgtcctctgcgggagatctccatagagaccgtgacacacacagaggcgggggtccgcagaggcggccggaccggagcctcctcggcctctgcggccgccacccccttccccgctgccagcactcaccctctctccgctcctgctcgcaacctcgcggttcctggggtgcttgtgcccactgtgtggacagcgcgggcggacttttgggccggggccgggcggcgggggaggctctctaaggcctccgcctctgcctctcccgcccccttacccgccccggagcgggaagcggcggaggctccgccatggcctcgggagccggaggagtcggagggggcggtggcggcaagatccggacgcggcgttgccaccaggggccaattaagccttaccagcaggggcgacaacagcatcagggcattcttagcagggttacagaatctgttaagaatattgtgccagggtggctacaaagatacttcaacaagaatgaagatgtatgcagctgttcaacagacacaagcgaggttccacgctggccagaaaataaagaggaccatctggtatatgccgatgaggagagctctaatattactgatgggagaatcacacctgagccagcagtcagtaatacagaagaaccttcaacaactagtactgcttcaaattatccagatgtgttaacaaggccttctcttcatcggagccatctgaatttttccatgttggaatcccctgcattacactgtcagccatctacatcctcggcattcccaattggcagttcgggattttcccttgtaaaggaaattaaagattctacctctcagcatgatgatgataacatctcaactaccagtggtttttcttcaagagcttctgataaagatataactgtttcaaagaacacttcattgccacctctgtggtccccagaagctgaacgttctcactcactctcacagcacactgccaccagctcaaaaaaaccagcattcaacttgtctgcctttggaacactttccccttcacttgggaattcttcaatccttaaaaccagtcagcttggagattctcctttttatcctggaaaaacaacatacggtggggcagcagctgctgtaagacagtctaaactacgaaatacaccttatcaggtggattctcaatatcctcctgttcagagacttatgaccccaaagccagtttccatagcaacaaatcgaagtgtttattttaaaccatctctgactccttctggtgaattcaggaagactaatcaaagaatagataacaagtgcagtactggatatgaaaaaaatatgacacccggacaaaatagagaacaacgagaaagtggcttttcatatccaaatttcagtttgcctgcagccaatggtttatcttctggagtaggtggtggaggtggcaagatgagacgagaaagaacacgcctttgttgcttctaaacctctggaggaggaggaaatggaagttccagtattaccgaaaatctctctaccgatcaccagttcttcactgcctacctttaattttagttcccctgagatcacaacttcctctccatcacccatcaattcgtctcaagcattaacaaacaaggtacaaatgacctctccgagcagcactggcagtcccatgtttaaattttcatctccaatcgtaaaatctactgaggcaaatgtactacctccatcatctattggatttacatttagtgtgcctgttgcaaaaacagcagaactttctggttctagtagtactttagaaccaattataagtagttcagctcatcatgtcactacagtgaacagtacaaattgtaagaagacaccacctgaagattgtgagggtccttttagacctgcagaaatcctgaaagaaggaagtgttctagatattctgaaaagccctggtttcgcatcgccgaagatagattctgttgctgctcagcccaccgcaacaagcccagtagtttatacaagaccagcaataagtagcttttcttctagtggaattgggtttggggagagtttaaaagctgggtcatcatggcagtgtgatacatgtctactccagaacaaagttacagacaacaaatgcatagcctgtcaagcagcaaaattgtcacccagagatactgctaaacagactggaattgaaacaccaaataaaagtggcaaaacaactctttctgcatcagggacaggctttggagacaaatttaaaccagtgataggcacttgggattgtgatacctgtttagtgcaaaataaacctgaagcaataaaatgtgtagcctgtgaaacaccgaaacctggaacttgtgtgaagcgagcccttacattgacagtggtttcggaaagtgctgagactatgactgcttcatcttccagctgcactgtaaccactggtaccttaggatttggagataaattcaaaaggcccattggatcttgggagtgttcagtatgctgtgtttctaataatgcagaagacaataagtgtgtgtcctgtatgtctgagaaaccaggaagttcagtacctacttcaagtagcagcactgtacctgtctctctgccttctggaggctctctaggattggaaaagttcaagaaacccgagggaagctgggactgtgaattgtgcctagtgcagaataaggcagactctaccaaatgtttggcatgtgaaagtgcaaagccaggcacaaaatctgggtttaaaggctttgacacatcttcctcatcttcgaactcagcagcctcctcatccttcaaatttggtgtctcatcatcctcttctgggccttctcagactttaacaagcactggaaattttaaatttggagatcagggaggattcaaaataggtgtgtcatctgattctgggtctataaaccccatgagtgaaggctttaaattttctaaaccaataggagattttaaatttggagtttcatctgaatctaagcccgaagaagttaaaaaagatagtaagaatgataattttaagtttggactttcttctggtttaagcaacccagtttctttaactccatttcaatttggggtatctaatcttggacaggaagaaaagaaagaggaactgcccaaatcttcctctgcaggttttagctttggtacaggtgttattaactccacccctgctcctgctaacaccatagtgacctctgagaacaagagcagcttcaaccttggaaccatagaaaccaagagtgcttcagtggctcctttcacatgtaagacatcagaagctaaaaaagaagaaatgcctgccaccaaaggaggattctcttttggcaacgtggagcctgcctctctgccatctgcctcagtgtttgttttgggaaggacagaagagaaacagcaagagcctgtcacttctacttccctagtttttgggaagaaagctgacaatgaagagccaaagtgtcaaccagtgttttcctttgggaattcagagcaaaccaaagatgagaattcttcaaagtccacatttagttttagtatgacaaaaccatctgagaaggaatctgaacagccagcaaaagccacttttgcctttggagctcaaactagtactacagctgatcaaggtgcagcaaagccagtttttagtttcttgaacaacagttcctctagttcaagtacaccagccacttctgctggtggtggcatatttggtagttccacctcttcctccaatccacctgtggctacctttgtgtttggacagtccagcaatcctgtgagcagctctgcctttggtaacactgctgaatccagcacctctcagtctttgctattttctcaagatagcaaactagcaaccacatccagcacaggtacagctgtcaccccatttgtctttggtccaggagccagcagtaataatactaccacctctggtttcggctttggagccacaaccacatctagctctgcaggatcctcctttgtatttggaactggaccctcagcaccatctgccagtccagcatttggtgctaaccagaccccaacatttggacaaagtcaaggtgccagccagcccaatcccccaggctttggatctatatcatcttccacagcattatttcccactggttctcagcctgcaccacctacttttgggacagtgtcaagcagtagccagccccctgtgtttggacagcaacctagtcagtctgcatttggctctggaacaactcctaattctagttcggctttccagtttggcagcagcactacaaatttcaacttcacaaacaacagtccatcaggagtgttcacatttggtgcaaattctagcacacctgcagcctcagcccagccttcaggctcggggggctttccatttaaccagtctccagcagcatttacagtggggtcaaatgggaaaaatgtgttctcttcttctggaacttcattctctggtcgcaagataaagactgctgttagacgcaggaaataaaggtcacattggtgttgtactcaattttaacaacagctggtgccctgctttcagatactggattgtactttgtgctggggttatctgaagtcagatctgcctaaggacttctttaattttggaattttcctcctttctctttcgttacagaagccccaccctgcctcacccacccttttttaaataaataaatagctagactggtgactgattcttcagcaaaaatattttatgatccagcagattattcactgatttgacatagtctggctgtacccaggaatggagcctgcacggtgaatggctttgtatagaacctctttgtctacaccattatgtgcgctgataagcgttcatggaacgcgttgaaattgtaattatatctgaggaattctgtatagattagaattctgtatagattagagagtgttgaaacggatgatttctatgctgagtttgtgctggtgtatgtgtgaagtgagtgagttgggtgtattgtgcgctaaacttttctgatagaggaagcctgattaaagaatggtccgtgctaaggacttgttagatctagttcactctccatttaataattatatgctatttctatattttcattctcctatcacctgtcttgcctttttcattattttattatgaaacttgtgtaaatacaattttgtttctgtactttttggcataacataaatctgtgaacttgaaatttgaattttgtgttagagatttttttgttgtttgtttagtcttgtctcagattttattatgtaaatcccattattcaaagttgcctaaatccatttggaaatctttaaaaaaaaaattggggattcttaaagttgaatttattggcttttctgatccagttttgtttggaccaaaaaccagtattgtacaaagtattaagcatatatttttatatttactaaaatggactgtggtgactttggataataaggaaaagtttaatattaaagccatgtttattacagtataattaacatgttaaaccatgggataaatgccatcaataaaaaattatgacata

SEQ ID NO: 310097 - DNA, 6182 bp, Homo sapiens
agccgtatttattttctaattctaaggatcatggactttatttttcaaccacagatttttttttcctccttcttaaatcattagctcttgtctttgattttactgtctgcttacttcctgcctacttaaccaaccgacagggagaaggagaatgggaagaggttactgtttttatgttaagtgtcttttcaaagtctaatttacagccaagaacagcaaaagtaccccttggctttgtgcctctgcggcgccccggagatctccttccccgtccctcttcctttccgagaagccgcgttccgttgttgaactacgtttcccagcgtgccgcgcggccgagagcgtggactcgaccagcccttcctctttgcctatcagctcgtcgcagcatgatgatgcaaatgcgtcgggcgccgatgagtgacgacattctggctcgcgaccgcggcagccgccttagcaggggtaataggcgcaacggcggcggaggctgcagggacgacgacgacgacggcggcggggcgggcgctgtgcgcacaggggaggggtaggcgggcgtcgccagcggcttcaactgcggcagctacggctagggcgacggaagaactcccaccagtcggcggtcgagttaggcctcagcaccgcggggaactgttcgtgctgtcctctgcgggagatctccatagagaccgtgacacacacagaggcgggggtccgcagaggcggccggaccggagcctcctcggcctctgcggccgccacccccttccccgctgccagcactcaccctctctccgctcctgctcgcaacctcgcggttcctggggtgcttgtgcccactgtgtggacagcgcgggcggacttttgggccggggccgggcggcgggggaggctctctaaggcctccgcctctgcctctcccgcccccttacccgccccggagcgggaagcggcggaggctccgccatggcctcgggagccggaggagtcggagggggcggtggcggcaagatccggacgcggcgttgccaccaggggccaattaagccttaccagcaggggcgacaacagcatcagggcattcttagcagggttacagaatctgttaagaatattgtgccagggtggctacaaagatacttcaacaagaatgaagatgtatgcagctgttcaacagacacaagcgaggttccacgctggccagaaaataaagaggaccatctggtatatgccgatgaggagagctctaatattactgatgggagaatcacacctgagccagcagtcagtaatacagaagaaccttcaacaactagtactgcttcaaattatccagatgtgttaacaaggccttctcttcatcggagccatctgaatttttccatgttggaatcccctgcattacactgtcagccatctacatcctcggcattcccaattggcagttcgggattttcccttgtaaaggaaattaaagattctacctctcagcatgatgatgataacatctcaactaccagtggtttttcttcaagagcttctgataaagatataactgtttcaaagaacacttcattgccacctctgtggtccccagaagctgaacgttctcactcactctcacagcacactgccaccagctcaaaaaaaccagcattcaacttgtctgcctttggaacactttccccttcacttgggaattcttcaatccttaaaaccagtcagcttggagattctcctttttatcctggaaaaacaacatacggtggggcagcagctgctgtaagacagtctaaactacgaaatacaccttatcaggcaccagttagaagacaaatgaaagctaagcaactcagtgcacaatcttacggtgtgaccagttcaacagctcggcgaatattgcagtctttagagaagatgtcaagccctttagcggatgcaaaaagaattccatccattgtttcttctcctctgaattctcctcttgataggagtgggatagatatcacagattttcaggccaaaagagaaaaggtggattctcaatatcctcctgttcagagacttatgaccccaaagccagtttccatagcaacaaatcgaagtgtttattttaaaccatctctgactccttctggtgaattcaggaagactaatcaaagaatagataacaagtgcagtactggatatgaaaaaaatatgacacccggacaaaatagagaacaacgagaaagtggcttttcatatccaaatttcagtttgcctgcagccaatggtttatcttctggagtaggtggtggaggtggcaagatgagacgagaaagaacacgcctttgttgcttctaaacctctggaggaggaggaaatggaagttccagtattaccgaaaatctctctaccgatcaccagttcttcactgcctacctttaattttagttcccctgagatcacaacttcctctccatcacccatcaattcgtctcaagcattaacaaacaaggtacaaatgacctctccgagcagcactggcagtcccatgtttaaattttcatctccaatcgtaaaatctactgaggcaaatgtactacctccatcatctattggatttacatttagtgtgcctgttgcaaaaacagcagaactttctggttctagtagtactttagaaccaattataagtagttcagctcatcatgtcactacagtgaacagtacaaattgtaagaagacaccacctgaagattgtgagggtccttttagacctgcagaaatcctgaaagaaggaagtgttctagatattctgaaaagccctggtttcgcatcgccgaagatagattctgttgctgctcagcccaccgcaacaagcccagtagtttatacaagaccagcaataagtagcttttcttctagtggaattgggtttggggagagtttaaaagctgggtcatcatggcagtgtgatacatgtctactccagaacaaagttacagacaacaaatgcatagcctgtcaagcagcaaaattgtcacccagagatactgctaaacagactggaattgaaacaccaaataaaagtggcaaaacaactctttctgcatcagggacaggctttggagacaaatttaaaccagtgataggcacttgggattgtgatacctgtttagtgcaaaataaacctgaagcaataaaatgtgtagcctgtgaaacaccgaaacctggaacttgtgtgaagcgagcccttacattgacagtggtttcggaaagtgctgagactatgactgcttcatcttccagctgcactgtaaccactggtaccttaggatttggagataaattcaaaaggcccattggatcttgggagtgttcagtatgctgtgtttctaataatgcagaagacaataagtgtgtgtcctgtatgtctgagaaaccaggaagttcagtacctacttcaagtagcagcactgtacctgtctctctgccttctggaggctctctaggattggaaaagttcaagaaacccgagggaagctgggactgtgaattgtgcctagtgcagaataaggcagactctaccaaatgtttggcatgtgaaagtgcaaagccaggcacaaaatctgggtttaaaggctttgacacatcttcctcatcttcgaactcagcagcctcctcatccttcaaatttggtgtctcatcatcctcttctgggccttctcagactttaacaagcactggaaattttaaatttggagatcagggaggattcaaaataggtgtgtcatctgattctgggtctataaaccccatgagtgaaggctttaaattttctaaaccaataggagattttaaatttggagtttcatctgaatctaagcccgaagaagttaaaaaagatagtaagaatgataattttaagtttggactttcttctggtttaagcaacccagtttctttaactccatttcaatttggggtatctaatcttggacaggaagaaaagaaagaggaactgcccaaatcttcctctgcaggttttagctttggtacaggtgttattaactccacccctgctcctgctaacaccatagtgacctctgagaacaagagcagcttcaaccttggaaccatagaaaccaagagtgcttcagtggctcctttcacatgtaagacatcagaagctaaaaaagaagaaatgcctgccaccaaaggaggattctcttttggcaacgtggagcctgcctctctgccatctgcctcagtgtttgttttgggaaggacagaagagaaacagcaagagcctgtcacttctacttccctagtttttgggaagaaagctgacaatgaagagccaaagtgtcaaccagtgttttcctttgggaattcagagcaaaccaaagatgagaattcttcaaagtccacatttagttttagtatgacaaaaccatctgagaaggaatctgaacagccagcaaaagccacttttgcctttggagctcaaactagtactacagctgatcaaggtgcagcaaagccagtttttagtttcttgaacaacagttcctctagttcaagtacaccagccacttctgctggtggtggcatatttggtagttccacctcttcctccaatccacctgtggctacctttgtgtttggacagtccagcaatcctgtgagcagctctgcctttggtaacactgctgaatccagcacctctcagtctttgctattttctcaagatagcaaactagcaaccacatccagcacaggtacagctgtcaccccatttgtctttggtccaggagccagcagtaataatactaccacctctggtttcggctttggagccacaaccacatctagctctgcaggttcggctttccagtttggcagcagcactacaaatttcaacttcacaaacaacagtccatcaggagtgttcacatttggtgcaaattctagcacacctgcagcctcagcccagccttcaggctcggggggctttccatttaaccagtctccagcagcatttacagtggggtcaaatgggaaaaatgtgttctcttcttctggaacttcattctctggtcgcaagataaagactgctgttagacgcaggaaataaaggtcacattggtgttgtactcaattttaacaacagctggtgccctgctttcagatactggattgtactttgtgctggggttatctgaagtcagatctgcctaaggacttctttaattttggaattttcctcctttctctttcgttacagaagccccaccctgcctcacccacccttttttaaataaataaatagctagactggtgactgattcttcagcaaaaatattttatgatccagcagattattcactgatttgacatagtctggctgtacccaggaatggagcctgcacggtgaatggctttgtatagaacctctttgtctacaccattatgtgcgctgataagcgttcatggaacgcgttgaaattgtaattatatctgaggaattctgtatagattagaattctgtatagattagagagtgttgaaacggatgatttctatgctgagtttgtgctggtgtatgtgtgaagtgagtgagttgggtgtattgtgcgctaaacttttctgatagaggaagcctgattaaagaatggtccgtgctaaggacttgttagatctagttcactctccatttaataattatatgctatttctatattttcattctcctatcacctgtcttgcctttttcattattttattatgaaacttgtgtaaatacaattttgtttctgtactttttggcataacataaatctgtgaacttgaaatttgaattttgtgttagagatttttttgttgtttgtttagtcttgtctcagattttattatgtaaatcccattattcaaagttgcctaaatccatttggaaatctttaaaaaaaaaattggggattcttaaagttgaatttattggcttttctgatccagttttgtttggaccaaaaaccagtattgtacaaagtattaagcatatatttttatatttactaaaatggactgtggtgactttggataataaggaaaagtttaatattaaagccatgtttattacagtataattaacatgttaaaccatgggataaatgccatcaataaaaaattatgacata

SEQ ID NO: 310098 - DNA, 4340 bp, Homo sapiens
tgattgaccgaatttctggtgttcgattgtcaggagactaatcaaagaatagactacaagtgcagtactggatatgaaaaaaatatgacacccggacaaaatagagaacaacgagaaagtggcttttcatatccaaatttcagtttgcctgcagccaatggtttatcttctggagtaggtggtggaggtggcaagatgagacgagaaagaacacgcctttgttgcttctaaacctctggaggaggaggaaatggaagttccagtattaccgaaaatctctctaccgatcaccagttcttcactgcctacctttaattttagttcccctgagatcacaacttcctctccatcacccatcaattcgtctcaagcattaacaaacaaggtacaaatgacctctccgagcagcactggcagtcccatgtttaaattttcatctccaatcgtaaaatctactgaggcaaatgtactacctccatcatctattggatttacatttagtgtgcctgttgcaaaaacagcagaactttctggttctagtagtactttagaaccaattataagtagttcagctcatcatgtcactacagtgaacagtacaaattgtaagaagacaccacctgaagattgtgagggtccttttagacctgcagaaatcctgaaagaaggaagtgttctagatattctgaaaagccctggtttcgcatcgccgaagatagattctgttgctgctcagcccaccgcaacaagcccagtagtttatacaagaccagcaataagtagcttttcttctagtggaattgggtttggggagagtttaaaagctgggtcatcatggcagtgtgatacatgtctactccagaacaaagttacagacaacaaatgcatagcctgtcaagcagcaaaattgtcacccagagatactgctaaacagactggaattgaaacaccaaataaaagtggcaaaacaactctttctgcatcagggacaggctttggagacaaatttaaaccagtgataggcacttgggattgtgatacctgtttagtgcaaaataaacctgaagcaataaaatgtgtagcctgtgaaacaccgaaacctggaacttgtgtgaagcgagcccttacattgacagtggtttcggaaagtgctgagactatgactgcttcatcttccagctgcactgtaaccactggtaccttaggatttggagataaattcaaaaggcccattggatcttgggagtgttcagtatgctgtgtttctaataatgcagaagacaataagtgtgtgtcctgtatgtctgagaaaccaggaagttcagtacctacttcaagtagcagcactgtacctgtctctctgccttctggaggctctctaggattggaaaagttcaagaaacccgagggaagctgggactgtgaattgtgcctagtgcagaataaggcagactctaccaaatgtttggcatgtgaaagtgcaaagccaggcacaaaatctgggtttaaaggctttgacacatcttcctcatcttcgaactcagcagcctcctcatccttcaaatttggtgtctcatcatcctcttctgggccttctcagactttaacaagcactggaaattttaaatttggagatcagggaggattcaaaataggtgtgtcatctgattctgggtctataaaccccatgagtgaaggctttaaattttctaaaccaataggagattttaaatttggagtttcatctgaatctaagcccgaagaagttaaaaaagatagtaagaatgataattttaagtttggactttcttctggtttaagcaacccagtttctttaactccatttcaatttggggtatctaatcttggacaggaagaaaagaaagaggaactgcccaaatcttcctctgcaggttttagctttggtacaggtgttattaactccacccctgctcctgctaacaccatagtgacctctgagaacaagagcagcttcaaccttggaaccatagaaaccaagagtgcttcagtggctcctttcacatgtaagacatcagaagctaaaaaagaagaaatgcctgccaccaaaggaggattctcttttggcaacgtggagcctgcctctctgccatctgcctcagtgtttgttttgggaaggacagaagagaaacagcaagagcctgtcacttctacttccctagtttttgggaagaaagctgacaatgaagagccaaagtgtcaaccagtgttttcctttgggaattcagagcaaaccaaagatgagaattcttcaaagtccacatttagttttagtatgacaaaaccatctgagaaggaatctgaacagccagcaaaagccacttttgcctttggagctcaaactagtactacagctgatcaaggtgcagcaaagccagtttttagtttcttgaacaacagttcctctagttcaagtacaccagccacttctgctggtggtggcatatttggtagttccacctcttcctccaatccacctgtggctacctttgtgtttggacagtccagcaatcctgtgagcagctctgcctttggtaacactgctgaatccagcacctctcagtctttgctattttctcaagatagcaaactagcaaccacatccagcacaggtacagctgtcaccccatttgtctttggtccaggagccagcagtaataatactaccacctctggtttcggctttggagccacaaccacatctagctctgcaggatcctcctttgtatttggaactggaccctcagcaccatctgccagtccagcatttggtgctaaccagaccccaacatttggacaaagtcaaggtgccagccagcccaatcccccaggctttggatctatatcatcttccacagcattatttcccactggttctcagcctgcaccacctacttttgggacagtgtcaagcagtagccagccccctgtgtttggacagcaacctagtcagtctgcatttggctctggaacaactcctaattctagttcggctttccagtttggcagcagcactacaaatttcaacttcacaaacaacagtccatcaggagtgttcacatttggtgcaaattctagcacacctgcagcctcagcccagccttcaggctcggggggctttccatttaaccagtctccagcagcatttacagtggggtcaaatgggaaaaatgtgttctcttcttctggaacttcattctctggtcgcaagataaagactgctgttagacgcaggaaataaaggtcacattggtgttgtactcaattttaacaacagctggtgccctgctttcagatactggattgtactttgtgctggggttatctgaagtcagatctgcctaaggacttctttaattttggaattttcctcctttctctttcgttacagaagccccaccctgcctcacccacccttttttaaataaataaatagctagactggtgactgattcttcagcaaaaatattttatgatccagcagattattcactgatttgacatagtctggctgtacccaggaatggagcctgcacggtgaatggctttgtatagaacctctttgtctacaccattatgtgcgctgataagcgttcatggaacgcgttgaaattgtaattatatctgaggaattctgtatagattagaattctgtatagattagagagtgttgaaacggatgatttctatgctgagtttgtgctggtgtatgtgtgaagtgagtgagttgggtgtattgtgcgctaaacttttctgatagaggaagcctgattaaagaatggtccgtgctaaggacttgttagatctagttcactctccatttaataattatatgctatttctatattttcattctcctatcacctgtcttgcctttttcattattttattatgaaacttgtgtaaatacaattttgtttctgtactttttggcataacataaatctgtgaacttgaaatttgaattttgtgttagagatttttttgttgtttgtttagtcttgtctcagattttattatgtaaatcccattattcaaagttgcctaaatccatttggaaatctttaaaaaaaaaattggggattcttaaagttgaatttattggcttttctgatccagttttgtttggaccaaaaaccagtattgtacaaagtattaagcatatatttttatatttactaaaatggactgtggtgactttggataataaggaaaagtttaatattaaagccatgtttattacagtataattaacatgttaaaccatgggataaatgccatcaataaaaaattatgacata

SEQ ID NO: 310099 - DNA, 6800 bp, Homo sapiens
agccgtatttattttctaattctaaggatcatggactttatttttcaaccacagatttttttttcctccttcttaaatcattagctcttgtctttgattttactgtctgcttacttcctgcctacttaaccaaccgacagggagaaggagaatgggaagaggttactgtttttatgttaagtgtcttttcaaagtctaatttacagccaagaacagcaaaagtaccccttggctttgtgcctctgcggcgccccggagatctccttccccgtccctcttcctttccgagaagccgcgttccgttgttgaactacgtttcccagcgtgccgcgcggccgagagcgtggactcgaccagcccttcctctttgcctatcagctcgtcgcagcatgatgatgcaaatgcgtcgggcgccgatgagtgacgacattctggctcgcgaccgcggcagccgccttagcaggggtaataggcgcaacggcggcggaggctgcagggacgacgacgacgacggcggcggggcgggcgctgtgcgcacaggggaggggtaggcgggcgtcgccagcggcttcaactgcggcagctacggctagggcgacggaagaactcccaccagtcggcggtcgagttaggcctcagcaccgcggggaactgttcgtgctgtcctctgcgggagatctccatagagaccgtgacacacacagaggcgggggtccgcagaggcggccggaccggagcctcctcggcctctgcggccgccacccccttccccgctgccagcactcaccctctctccgctcctgctcgcaacctcgcggttcctggggtgcttgtgcccactgtgtggacagcgcgggcggacttttgggccggggccgggcggcgggggaggctctctaaggcctccgcctctgcctctcccgcccccttacccgccccggagcgggaagcggcggaggctccgccatggcctcgggagccggaggagtcggagggggcggtggcggcaagatccggacgcggcgttgccaccaggggccaattaagccttaccagcaggggcgacaacagcatcagggcattcttagcagggttacagaatctgttaagaatattgtgccagggtggctacaaagatacttcaacaagaatgaagatgtatgcagctgttcaacagacacaagcgaggttccacgctggccagaaaataaagaggaccatctggtatatgccgatgaggagagctctaatattactgatgggagaatcacacctgagccagcagtcagtaatacagaagaaccttcaacaactagtactgcttcaaattatccagatgtgttaacaaggccttctcttcatcggagccatctgaatttttccatgttggaatcccctgcattacactgtcagccatctacatcctcggcattcccaattggcagttcgggattttcccttgtaaaggaaattaaagattctacctctcagcatgatgatgataacatctcaactaccagtggtttttcttcaagagcttctgataaagatataactgtttcaaagaacacttcattgccacctctgtggtccccagaagctgaacgttctcactcactctcacagcacactgccaccagctcaaaaaaaccagcattcaacttgtctgcctttggaacactttccccttcacttgggaattcttcaatccttaaaaccagtcagcttggagattctcctttttatcctggaaaaacaacatacggtggggcagcagctgctgtaagacagtctaaactacgaaatacaccttatcaggcaccagttagaagacaaatgaaagctaagcaactcagtgcacaatcttacggtgtgaccagttcaacagctcggcgaatattgcagtctttagagaagatgtcaagccctttagcggatgcaaaaagaattccatccattgtttcttctcctctgaattctcctcttgataggagtgggatagatatcacagattttcaggccaaaagagaaaaggtggattctcaatatcctcctgttcagagacttatgaccccaaagccagtttccatagcaacaaatcgaagtgtttattttaaaccatctctgactccttctggtgaattcaggaagactaatcaaagaatagataacaagtgcagtactggatatgaaaaaaatatgacacccggacaaaatagagaacaacgagaaagtggcttttcatatccaaatttcagtttgcctgcagccaatggtttatcttctggagtaggtggtggaggtggcaagatgagacgagaaagaacacgcctttgttgcttctaaacctctggaggaggaggaaatggaagttccagtattaccgaaaatctctctaccgatcaccagttcttcactgcctacctttaattttagttcccctgagatcacaacttcctctccatcacccatcaattcgtctcaagcattaacaaacaaggtacaaatgacctctccgagcagcactggcagtcccatgtttaaattttcatctccaatcgtaaaatctactgaggcaaatgtactacctccatcatctattggatttacatttagtgtgcctgttgcaaaaacagcagaactttctggttctagtagtactttagaaccaattataagtagttcagctcatcatgtcactacagtgaacagtacaaattgtaagaagacaccacctgaagattgtgagggtccttttagacctgcagaaatcctgaaagaaggaagtgttctagatattctgaaaagccctggtttcgcatcgccgaagatagattctgttgctgctcagcccaccgcaacaagcccagtagtttatacaagaccagcaataagtagcttttcttctagtggaattgggtttggggagagtttaaaagctgggtcatcatggcagtgtgatacatgtctactccagaacaaagttacagacaacaaatgcatagcctgtcaagcagcaaaattgtcacccagagatactgctaaacagactggaattgaaacaccaaataaaagtggcaaaacaactctttctgcatcagggacaggctttggagacaaatttaaaccagtgataggcacttgggattgtgatacctgtttagtgcaaaataaacctgaagcaataaaatgtgtagcctgtgaaacaccgaaacctggaacttgtgtgaagcgagcccttacattgacagtggtttcggaaagtgctgagactatgactgcttcatcttccagctgcactgtaaccactggtaccttaggatttggagataaattcaaaaggcccattggatcttgggagtgttcagtatgctgtgtttctaataatgcagaagacaataagtgtgtgtcctgtatgtctgagaaaccaggaagttcagtacctacttcaagtagcagcactgtacctgtctctctgccttctggaggctctctaggattggaaaagttcaagaaacccgagggaagctgggactgtgaattgtgcctagtgcagaataaggcagactctaccaaatgtttggcatgtgaaagtgcaaagccaggcacaaaatctgggtttaaaggctttgacacatcttcctcatcttcgaactcagcagcctcctcatccttcaaatttggtgtctcatcatcctcttctgggccttctcagactttaacaagcactggaaattttaaatttggagatcagggaggattcaaaataggtgtgtcatctgattctgggtctataaaccccatgagtgaaggctttaaattttctaaaccaataggagattttaaatttggagtttcatctgaatctaagcccgaagaagttaaaaaagatagtaagaatgataattttaagtttggactttcttctggtttaagcaacccagtttctttaactccatttcaatttggggtatctaatcttggacaggaagaaaagaaagaggaactgcccaaatcttcctctgcaggttttagctttggtacaggtgttattaactccacccctgctcctgctaacaccatagtgacctctgagaacaagagcagcttcaaccttggaaccatagaaaccaagagtgcttcagtggctcctttcacatgtaagacatcagaagctaaaaaagaagaaatgcctgccaccaaaggaggattctcttttggcaacgtggagcctgcctctctgccatctgcctcagtgtttgttttgggaaggacagaagagaaacagcaagagcctgtcacttctacttccctagtttttgggaagaaagctgacaatgaagagccaaagtgtcaaccagtgttttcctttgggaattcagagcaaaccaaagatgagaattcttcaaagtccacatttagttttagtatgacaaaaccatctgagaaggaatctgaacagccagcaaaagccacttttgcctttggagctcaaactagtactacagctgatcaaggtgcagcaaagccagtttttagtttcttgaacaacagttcctctagttcaagtacaccagccacttctgctggtggtggcatatttggtagttccacctcttcctccaatccacctgtggctacctttgtgtttggacagtccagcaatcctgtgagcagctctgcctttggtaacactgctgaatccagcacctctcagtctttgctattttctcaagatagcaaactagcaaccacatccagcacaggtacagctgtcaccccatttgtctttggtccaggagccagcagtaataatactaccacctctggtttcggctttggagccacaaccacatctagctctgcaggatcctcctttgtatttggaactggaccctcagcaccatctgccagtccagcatttggtgctaaccagaccccaacatttggacaaagtcaaggtgccagccagcccaatcccccaggctttggatctatatcatcttccacagcattatttcccactggttctcagcctgcaccacctacttttgggacagtgtcaagcagtagccagccccctgtgtttggacagcaacctagtcagtctgcatttggctctggaacaactcctaattctagttcggctttccagtttggcagcagcactacaaatttcaacttcacaaacaacagtccatcaggagtgttcacatttggtgcaaattctagcacacctgcagcctcagcccagccttcaggctcggggggctttccatttaaccagtctccagcagcatttacagtggggtaagagaattttttattgaaatggagaagttacattggtaagggtatgtgcatgtatatgttttgtttttaaaagtcatcaagattccgtatggtttgggtaaaattaaatatgttctccaacataaatttaccatactataattctggaggattatattacagtttgagaaaaaaataacagtagcgtgtgtgttaggtatagcagaaaatgtatataccaatgtgagtctactccccccccacccgaccccccttacccttctgctgctcatggtaaatgttagcatttggaaattttgctcagagcatcatgtcacattatgaagtttttatttttcacaggtcaaatgggaaaaatgtgttctcttcttctggaacttcattctctggtcgcaagataaagactgctgttagacgcaggaaataaaggtcacattggtgttgtactcaattttaacaacagctggtgccctgctttcagatactggattgtactttgtgctggggttatctgaagtcagatctgcctaaggacttctttaattttggaattttcctcctttctctttcgttacagaagccccaccctgcctcacccacccttttttaaataaataaatagctagactggtgactgattcttcagcaaaaatattttatgatccagcagattattcactgatttgacatagtctggctgtacccaggaatggagcctgcacggtgaatggctttgtatagaacctctttgtctacaccattatgtgcgctgataagcgttcatggaacgcgttgaaattgtaattatatctgaggaattctgtatagattagaattctgtatagattagagagtgttgaaacggatgatttctatgctgagtttgtgctggtgtatgtgtgaagtgagtgagttgggtgtattgtgcgctaaacttttctgatagaggaagcctgattaaagaatggtccgtgctaaggacttgttagatctagttcactctccatttaataattatatgctatttctatattttcattctcctatcacctgtcttgcctttttcattattttattatgaaacttgtgtaaatacaattttgtttctgtactttttggcataacataaatctgtgaacttgaaatttgaattttgtgttagagatttttttgttgtttgtttagtcttgtctcagattttattatgtaaatcccattattcaaagttgcctaaatccatttggaaatctttaaaaaaaaaattggggattcttaaagttgaatttattggcttttctgatccagttttgtttggaccaaaaaccagtattgtacaaagtattaagcatatatttttatatttactaaaatggactgtggtgactttggataataaggaaaagtttaatattaaagccatgtttattacagtataattaacatgttaaaccatgggataaatgccatcaataaaaaattatgacata

SEQ ID NO: 310100 - DNA, 6522 bp, Homo sapiens
agccgtatttattttctaattctaaggatcatggactttatttttcaaccacagatttttttttcctccttcttaaatcattagctcttgtctttgattttactgtctgcttacttcctgcctacttaaccaaccgacagggagaaggagaatgggaagaggttactgtttttatgttaagtgtcttttcaaagtctaatttacagccaagaacagcaaaagtaccccttggctttgtgcctctgcggcgccccggagatctccttccccgtccctcttcctttccgagaagccgcgttccgttgttgaactacgtttcccagcgtgccgcgcggccgagagcgtggactcgaccagcccttcctctttgcctatcagctcgtcgcagcatgatgatgcaaatgcgtcgggcgccgatgagtgacgacattctggctcgcgaccgcggcagccgccttagcaggggtaataggcgcaacggcggcggaggctgcagggacgacgacgacgacggcggcggggcgggcgctgtgcgcacaggggaggggtaggcgggcgtcgccagcggcttcaactgcggcagctacggctagggcgacggaagaactcccaccagtcggcggtcgagttaggcctcagcaccgcggggaactgttcgtgctgtcctctgcgggagatctccatagagaccgtgacacacacagaggcgggggtccgcagaggcggccggaccggagcctcctcggcctctgcggccgccacccccttccccgctgccagcactcaccctctctccgctcctgctcgcaacctcgcggttcctggggtgcttgtgcccactgtgtggacagcgcgggcggacttttgggccggggccgggcggcgggggaggctctctaaggcctccgcctctgcctctcccgcccccttacccgccccggagcgggaagcggcggaggctccgccatggcctcgggagccggaggagtcggagggggcggtggcggcaagatccggacgcggcgttgccaccaggggccaattaagccttaccagcaggggcgacaacagcatcagggcattcttagcagggttacagaatctgttaagaatattgtgccagggtggctacaaagatacttcaacaagaatgaagatgtatgcagctgttcaacagacacaagcgaggttccacgctggccagaaaataaagaggaccatctggtatatgccgatgaggagagctctaatattactgatgggagaatcacacctgagccagcagtcagtaatacagaagaaccttcaacaactagtactgcttcaaattatccagatgtgttaacaaggccttctcttcatcggagccatctgaatttttccatgttggaatcccctgcattacactgtcagccatctacatcctcggcattcccaattggcagttcgggattttcccttgtaaaggaaattaaagattctacctctcagcatgatgatgataacatctcaactaccagtggtttttcttcaagagcttctgataaagatataactgtttcaaagaacacttcattgccacctctgtggtccccagaagctgaacgttctcactcactctcacagcacactgccaccagctcaaaaaaaccagcattcaacttgtctgcctttggaacactttccccttcacttgggaattcttcaatccttaaaaccagtcagcttggagattctcctttttatcctggaaaaacaacatacggtggggcagcagctgctgtaagacagtctaaactacgaaatacaccttatcaggcaccagttagaagacaaatgaaagctaagcaactcagtgcacaatcttacggtgtgaccagttcaacagctcggcgaatattgcagtctttagagaagatgtcaagccctttagcggatgcaaaaagaattccatccattgtttcttctcctctgaattctcctcttgataggagtgggatagatatcacagattttcaggccaaaagagaaaaggtggattctcaatatcctcctgttcagagacttatgaccccaaagccagtttccatagcaacaaatcgaagtgtttattttaaaccatctctgactccttctggtgaattcaggaagactaatcaaagaatagataacaagtgcagtactggatatgaaaaaaatatgacacccggacaaaatagagaacaacgagaaagtggcttttcatatccaaatttcagtttgcctgcagccaatggtttatcttctggagtaggtggtggaggtggcaagatgagacgagaaagaacacgcctttgttgcttctaaacctctggaggaggaggaaatggaagttccagtattaccgaaaatctctctaccgatcaccagttcttcactgcctacctttaattttagttcccctgagatcacaacttcctctccatcacccatcaattcgtctcaagcattaacaaacaaggtacaaatgacctctccgagcagcactggcagtcccatgtttaaattttcatctccaatcgtaaaatctactgaggcaaatgtactacctccatcatctattggatttacatttagtgtgcctgttgcaaaaacagcagaactttctggttctagtagtactttagaaccaattataagtagttcagctcatcatgtcactacagtgaacagtacaaattgtaagaagacaccacctgaagattgtgagggtccttttagacctgcagaaatcctgaaagaaggaagtgttctagatattctgaaaagccctggtttcgcatcgccgaagatagattctgttgctgctcagcccaccgcaacaagcccagtagtttatacaagaccagcaataagtagcttttcttctagtggaattgggtttggggagagtttaaaagctgggtcatcatggcagtgtgatacatgtctactccagaacaaagttacagacaacaaatgcatagcctgtcaagcagcaaaattgtcacccagagatactgctaaacagactggaattgaaacaccaaataaaagtggcaaaacaactctttctgcatcagggacaggctttggagacaaatttaaaccagtgataggcacttgggattgtgatacctgtttagtgcaaaataaacctgaagcaataaaatgtgtagcctgtgaaacaccgaaacctggaacttgtgtgaagcgagcccttacattgacagtggtttcggaaagtgctgagactatgactgcttcatcttccagctgcactgtaaccactggtaccttaggatttggagataaattcaaaaggcccattggatcttgggagtgttcagtatgctgtgtttctaataatgcagaagacaataagtgtgtgtcctgtatgtctgagaaaccaggaagttcagtacctacttcaagtagcagcactgtacctgtctctctgccttctggaggctctctaggattggaaaagttcaagaaacccgagggaagctgggactgtgaattgtgcctagtgcagaataaggcagactctaccaaatgtttggcatgtgaaagtgcaaagccaggcacaaaatctgggtttaaaggctttgacacatcttcctcatcttcgaactcagcagcctcctcatccttcaaatttggtgtctcatcatcctcttctgggccttctcagactttaacaagcactggaaattttaaatttggagatcagggaggattcaaaataggtgtgtcatctgattctgggtctataaaccccatgagtgaaggctttaaattttctaaaccaataggagattttaaatttggagtttcatctgaatctaagcccgaagaagttaaaaaagatagtaagaatgataattttaagtttggactttcttctggtttaagcaacccagtttctttaactccatttcaatttggggtatctaatcttggacaggaagaaaagaaagaggaactgcccaaatcttcctctgcaggttttagctttggtacaggtgttattaactccacccctgctcctgctaacaccatagtgacctctgagaacaagagcagcttcaaccttggaaccatagaaaccaagagtgcttcagtggctcctttcacatgtaagacatcagaagctaaaaaagaagaaatgcctgccaccaaaggaggattctcttttggcaacgtggagcctgcctctctgccatctgcctcagtgtttgttttgggaaggacagaagagaaacagcaagagcctgtcacttctacttccctagtttttgggaagaaagctgacaatgaagagccaaagtgtcaaccagtgttttcctttgggaattcagagcaaaccaaagatgagaattcttcaaagtccacatttagttttagtatgacaaaaccatctgagaaggaatctgaacagccagcaaaagccacttttgcctttggagctcaaactagtactacagctgatcaaggtgcagcaaagccagtttttagtttcttgaacaacagttcctctagttcaagtacaccagccacttctgctggtggtggcatatttggtagttccacctcttcctccaatccacctgtggctacctttgtgtttggacagtccagcaatcctgtgagcagctctgcctttggtaacactgctgaatccagcacctctcagtctttgctattttctcaagatagcaaactagcaaccacatccagcacaggtacagctgtcaccccatttgtctttggtccaggagccagcagtaataatactaccacctctggtttcggctttggagccacaaccacatctagctctgcaggatcctcctttgtatttggaactggaccctcagcaccatctgccagtccagcatttggtgctaaccagaccccaacatttggacaaagtcaaggtgccagccagcccaatcccccaggctttggatctatatcatcttccacagcattatttcccactggttctcagcctgcaccacctacttttgggacagtgtcaagcagtagccagccccctgtgtttggacagcaacctagtcagtctgcatttggctctggaacaactcctaattctagttcggctttccagtttggcagcagcactacaaatttcaacttcacaaacaacagtccatcaggagtgttcacatttggtgcaaattctagcacacctgcagcctcagcccagccttcaggctcggggggctttccatttaaccagtctccagcagcatttacagtggggtcaaatgggaaaaatgtgttctcttcttctggaacttcattctctggtcgcaagataaagactgctgttagacgcaggaaataaaggtcacattggtgttgtactcaattttaacaacagctggtgccctgctttcagatactggattgtactttgtgctggggttatctgaagtcagatctgcctaaggacttctttaattttggaattttcctcctttctctttcgttacagaagccccaccctgcctcacccacccttttttaaataaataaatagctagactggtgactgattcttcagcaaaaatattttatgatccagcagattattcactgatttgacatagtctggctgtacccaggaatggagcctgcacggtgaatggctttgtatagaacctctttgtctacaccattatgtgcgctgataagcgttcatggaacgcgttgaaattgtaattatatctgaggaattctgtatagattagaattctgtatagattagagagtgttgaaacggatgatttctatgctgagtttgtgctggtgtatgtgtgaagtgagtgagttgggtgtattgtgcgctaaacttttctgatagaggaagcctgattaaagaatggtccgtgctaaggacttgttagatctagttcactctccatttaataattatatgctatttctatattttcattctcctatcacctgtcttgcctttttcattattttattatgaaacttgtgtaaatacaattttgtttctgtactttttggcataacataaatctgtgaacttgaaatttgaattttgtgttagagatttttttgttgtttgtttagtcttgtctcagattttattatgtaaatcccattattcaaagttgcctaaatccatttggaaatctttaaaaaaaaaattggggattcttaaagttgaatttattggcttttctgatccagttttgtttggaccaaaaaccagtattgtacaaagtattaagcatatatttttatatttactaaaatggactgtggtgactttggataataaggaaaagtttaatattaaagccatgtttattacagtataattaacatgttaaaccatgggataaatgccatcaataaaaaattatgacatactttttgttctagttttacctcataatgaaggcacacagtattattggggggactttgtaaaataaa

SEQ ID NO: 310101 - DNA, 6619 bp, Homo sapiens
agccgtatttattttctaattctaaggatcatggactttatttttcaaccacagatttttttttcctccttcttaaatcattagctcttgtctttgattttactgtctgcttacttcctgcctacttaaccaaccgacagggagaaggagaatgggaagaggttactgtttttatgttaagtgtcttttcaaagtctaatttacagccaagaacagcaaaagtaccccttggctttgtgcctctgcggcgccccggagatctccttccccgtccctcttcctttccgagaagccgcgttccgttgttgaactacgtttcccagcgtgccgcgcggccgagagcgtggactcgaccagcccttcctctttgcctatcagctcgtcgcagcatgatgatgcaaatgcgtcgggcgccgatgagtgacgacattctggctcgcgaccgcggcagccgccttagcaggggtaataggcgcaacggcggcggaggctgcagggacgacgacgacgacggcggcggggcgggcgctgtgcgcacaggggaggggtaggcgggcgtcgccagcggcttcaactgcggcagctacggctagggcgacggaagaactcccaccagtcggcggtcgagttaggcctcagcaccgcggggaactgttcgtgctgtcctctgcgggagatctccatagagaccgtgacacacacagaggcgggggtccgcagaggcggccggaccggagcctcctcggcctctgcggccgccacccccttccccgctgccagcactcaccctctctccgctcctgctcgcaacctcgcggttcctggggtgcttgtgcccactgtgtggacagcgcgggcggacttttgggccggggccgggcggcgggggaggctctctaaggcctccgcctctgcctctcccgcccccttacccgccccggagcgggaagcggcggaggctccgccatggcctcgggagccggaggagtcggagggggcggtggcggcaagatccggacgcggcgttgccaccaggggccaattaagccttaccagcaggggcgacaacagcatcagggcattcttagcagggttacagaatctgttaagaatattgtgccagggtggctacaaagatacttcaacaagaatgaagatgtatgcagctgttcaacagacacaagcgaggttccacgctggccagaaaataaagaggaccatctggtatatgccgatgaggagagctctaatattactgatgggagaatcacacctgagccagcagtcagtaatacagaagaaccttcaacaactagtactgcttcaaattatccagatgtgttaacaaggccttctcttcatcggagccatctgaatttttccatgttggaatcccctgcattacactgtcagccatctacatcctcggcattcccaattggcagttcgggattttcccttgtaaaggaaattaaagattctacctctcagcatgatgatgataacatctcaactaccagtggtttttcttcaagagcttctgataaagatataactgtttcaaagaacacttcattgccacctctgtggtccccagaagctgaacgttctcactcactctcacagcacactgccaccagctcaaaaaaaccagcattcaacttgtctgcctttggaacactttccccttcacttgggaattcttcaatccttaaaaccagtcagcttggagattctcctttttatcctggaaaaacaacatacggtggggcagcagctgctgtaagacagtctaaactacgaaatacaccttatcaggcaccagttagaagacaaatgaaagctaagcaactcagtgcacaatcttacggtgtgaccagttcaacagctcggcgaatattgcagtctttagagaagatgtcaagccctttagcggatgcaaaaagaattccatccattgtttcttctcctctgaattctcctcttgataggagtgggatagatatcacagattttcaggccaaaagagaaaaggtggattctcaatatcctcctgttcagagacttatgaccccaaagccagtttccatagcaacaaatcgaagtgtttattttaaaccatctctgactccttctggtgaattcaggaagactaatcaaagaatagataacaagtgcagtactggatatgaaaaaaatatgacacccggacaaaatagagaacaacgagaaagtggcttttcatatccaaatttcagtttgcctgcagccaatggtttatcttctggagtaggtggtggaggtggcaagatgagacgagaaagaacacgcctttgttgcttctaaacctctggaggaggaggaaatggaagttccagtattaccgaaaatctctctaccgatcaccagttcttcactgcctacctttaattttagttcccctgagatcacaacttcctctccatcacccatcaattcgtctcaagcattaacaaacaaggtacaaatgacctctccgagcagcactggcagtcccatgtttaaattttcatctccaatcgtaaaatctactgaggcaaatgtactacctccatcatctattggatttacatttagtgtgcctgttgcaaaaacagcagaactttctggttctagtagtactttagaaccaattataagtagttcagctcatcatgtcactacagtgaacagtacaaattgtaagaagacaccacctgaagattgtgagggtccttttagacctgcagaaatcctgaaagaaggaagtgttctagatattctgaaaagccctggtttcgcatcgccgaagatagattctgttgctgctcagcccaccgcaacaagcccagtagtttatacaagaccagcaataagtagcttttcttctagtggaattgggtttggggagagtttaaaagctgggtcatcatggcagtgtgatacatgtctactccagaacaaagttacagacaacaaatgcatagcctgtcaagcagcaaaattgtcacccagagatactgctaaacagactggaattgaaacaccaaataaaagtggcaaaacaactctttctgcatcagggacaggctttggagacaaatttaaaccagtgataggcacttgggattgtgatacctgtttagtgcaaaataaacctgaagcaataaaatgtgtagcctgtgaaacaccgaaacctggaacttgtgtgaagcgagcccttacattgacagtggtttcggaaagtgctgagactatgactgcttcatcttccagctgcactgtaaccactggtaccttaggatttggagataaattcaaaaggcccattggatcttgggagtgttcagtatgctgtgtttctaataatgcagaagacaataagtgtgtgtcctgtatgtctgagaaaccaggaagttcagtacctacttcaagtagcagcactgtacctgtctctctgccttctggaggctctctaggattggaaaagttcaagaaacccgagggaagctgggactgtgaattgtgcctagtgcagaataaggcagactctaccaaatgtttggcatgtgaaagtgcaaagccaggcacaaaatctgggtttaaaggctttgacacatcttcctcatcttcgaactcagcagcctcctcatccttcaaatttggtgtctcatcatcctcttctgggccttctcagactttaacaagcactggaaattttaaatttggagatcagggaggattcaaaataggtgtgtcatctgattctgggtctataaaccccatgagtgaaggctttaaattttctaaaccaataggagattttaaatttggagtttcatctgaatctaagcccgaagaagttaaaaaagatagtaagaatgataattttaagtttggactttcttctggtttaagcaacccagtttctttaactccatttcaatttggggtatctaatcttggacaggaagaaaagaaagaggaactgcccaaatcttcctctgcaggttttagctttggtacaggtgttattaactccacccctgctcctgctaacaccatagtgacctctgagaacaagagcagcttcaaccttggaaccatagaaaccaagagtgcttcagtggctcctttcacatgtaagacatcagaagctaaaaaagaagaaatgcctgccaccaaaggaggattctcttttggcaacgtggagcctgcctctctgccatctgcctcagtgtttgttttgggaaggacagaagagaaacagcaagagcctgtcacttctacttccctagtttttgggaagaaagctgacaatgaagagccaaagtgtcaaccagtgttttcctttgggaattcagagcaaaccaaagatgagaattcttcaaagtccacatttagttttagtatgacaaaaccatctgagaaggaatctgaacagccagcaaaagccacttttgcctttggagctcaaactagtactacagctgatcaaggtgcagcaaagccagtttttagtttcttgaacaacagttcctctagttcaagtacaccagccacttctgctggtggtggcatatttggtagttccacctcttcctccaatccacctgtggctacctttgtgtttggacagtccagcaatcctgtgagcagctctgcctttggtaacactgctgaatccagcacctctcagtctttgctattttctcaagatagcaaactagcaaccacatccagcacaggtacagctgtcaccccatttgtctttggtccaggagccagcagtaataatactaccacctctggtttcggctttggagccacaaccacatctagctctgcaggatcctcctttgtatttggaactggaccctcagcaccatctgccagtccagcatttggtgctaaccagaccccaacatttggacaaagtcaaggtgccagccagcccaatcccccaggctttggatctatatcatcttccacagcattatttcccactggttctcagcctgcaccacctacttttgggacagtgtcaagcagtagccagccccctgtgtttggacagcaacctagtcagtctgcatttggctctggaacaactcctaattctagttcggctttccagtttggcagcagcactacaaatttcaacttcacaaacaacagtccatcaggagtgttcacatttggtgcaaattctagcacacctgcagcctcagcccagccttcaggctcggggggctttccatttaaccagtctccagcagcatttacagtggggtcaaatgggaaaaatgtgttctcttcttctggaacttcattctctggtcgcaagataaagactgctgttagacgcaggaaataaaggtcacattggtgttgtactcaattttaacaacagctggtgccctgctttcagatactggattgtactttgtgctggggttatctgaagtcagatctgcctaaggacttctttaattttggaattttcctcctttctctttcgttacagaagccccaccctgcctcacccacccttttttaaataaataaatagctagactggtgactgattcttcagcaaaaatattttatgatccagcagattattcactgatttgacatagtctggctgtacccaggaatggagcctgcacggtgaatggctttgtatagaacctctttgtctacaccattatgtgcgctgataagcgttcatggaacgcgttgaaattgtaattatatctgaggaattctgtatagattagaattctgtatagattagagagtgttgaaacggatgatttctatgctgagtttgtgctggtgtatgtgtgaagtgagtgagttgggtgtattgtgcgctaaacttttctgatagaggaagcctgattaaagaatggtccgtgctaaggacttgttagatctagttcactctccatttaataattatatgctatttctatattttcattctcctatcacctgtcttgcctttttcattattttattatgaaacttgtgtaaatacaattttgtttctgtactttttggcataacataaatctgtgaacttgaaatttgaattttgtgttagagatttttttgttgtttgtttagtcttgtctcagattttattatgtaaatcccattattcaaagttgcctaaatccatttggaaatctttaaaaaaaaaattggggattcttaaagttgaatttattggcttttctgatccagttttgtttggaccaaaaaccagtattgtacaaagtattaagcatatatttttatatttactaaaatggactgtggtgactttggataataaggaaaagtttaatattaaagccatgtttattacagtataattaacatgttaaaccatgggataaatgccatcaataaaaaattatgacataaaaaagcaaagacaagagacaagaagagaacaccgtctggcggcgccgtgagccccagaagaaagcttcaagcaacaagtggagaggggcgggcccaacagaagagagagaccggcagaaggagaacccaagaaaaccggaagcaaaagggagggaacccacaa

SEQ ID NO: 310102 - DNA, 6097 bp, Homo sapiens
agccgtatttattttctaattctaaggatcatggactttatttttcaaccacagatttttttttcctccttcttaaatcattagctcttgtctttgattttactgtctgcttacttcctgcctacttaaccaaccgacagggagaaggagaatgggaagaggttactgtttttatgttaagtgtcttttcaaagtctaatttacagccaagaacagcaaaagtaccccttggctttgtgcctctgcggcgccccggagatctccttccccgtccctcttcctttccgagaagccgcgttccgttgttgaactacgtttcccagcgtgccgcgcggccgagagcgtggactcgaccagcccttcctctttgcctatcagctcgtcgcagcatgatgatgcaaatgcgtcgggcgccgatgagtgacgacattctggctcgcgaccgcggcagccgccttagcaggggtaataggcgcaacggcggcggaggctgcagggacgacgacgacgacggcggcggggcgggcgctgtgcgcacaggggaggggtaggcgggcgtcgccagcggcttcaactgcggcagctacggctagggcgacggaagaactcccaccagtcggcggtcgagttaggcctcagcaccgcggggaactgttcgtgctgtcctctgcgggagatctccatagagaccgtgacacacacagaggcgggggtccgcagaggcggccggaccggagcctcctcggcctctgcggccgccacccccttccccgctgccagcactcaccctctctccgctcctgctcgcaacctcgcggttcctggggtgcttgtgcccactgtgtggacagcgcgggcggacttttgggccggggccgggcggcgggggaggctctctaaggcctccgcctctgcctctcccgcccccttacccgccccggagcgggaagcggcggaggctccgccatggcctcgggagccggaggagtcggagggggcggtggcggcaagatccggacgcggcgttgccaccaggggccaattaagccttaccagcaggggcgacaacagcatcagggcattcttagcagggttacagaatctgttaagaatattgtgccagggtggctacaaagatacttcaacaagaatgaagatgtatgcagctgttcaacagacacaagcgaggttccacgctggccagaaaataaagaggaccatctggtatatgccgatgaggagagctctaatattactgatgggagaatcacacctgagccagcagtcagtaatacagaagaaccttcaacaactagtactgcttcaaattatccagatgtgttaacaaggccttctcttcatcggagccatctgaatttttccatgttggaatcccctgcattacactgtcagccatctacatcctcggcattcccaattggcagttcgggattttcccttgtaaaggaaattaaagattctacctctcagcatgatgatgataacatctcaactaccagtggtttttcttcaagagcttctgataaagatataactgtttcaaagaacacttcattgccacctctgtggtccccagaagctgaacgttctcactcactctcacagcacactgccaccagctcaaaaaaaccagcattcaacttgtctgcctttggaacactttccccttcacttgggaattcttcaatccttaaaaccagtcagcttggagattctcctttttatcctggaaaaacaacatacggtggggcagcagctgctgtaagacagtctaaactacgaaatacaccttatcaggcaccagttagaagacaaatgaaagctaagcaactcagtgcacaatcttacggtgtgaccagttcaacagctcggcgaatattgcagtctttagagaagatgtcaagccctttagcggatgcaaaaagaattccatccattgtttcttctcctctgaattctcctcttgataggagtgggatagatatcacagattttcaggccaaaagagaaaaggtggattctcaatatcctcctgttcagagacttatgaccccaaagccagtttccatagcaacaaatcgaagtgtttattttaaaccatctctgactccttctggtgaattcaggaagactaatcaaagaatagataacaagtgcagtactggatatgaaaaaaatatgacacccggacaaaatagagaacaacgagaaagtggcttttcatatccaaatttcagtttgcctgcagccaatggtttatcttctggagtaggtggtggaggtggcaagatgagacgagaaagaacacgcctttgttgcttctaaacctctggaggaggaggaaatggaagttccagtattaccgaaaatctctctaccgatcaccagttcttcactgcctacctttaattttagttcccctgagatcacaacttcctctccatcacccatcaattcgtctcaagcattaacaaacaaggtacaaatgacctctccgagcagcactggcagtcccatgtttaaattttcatctccaatcgtaaaatctactgaggcaaatgtactacctccatcatctattggatttacatttagtgtgcctgttgcaaaaacagcagaactttctggttctagtagtactttagaaccaattataagtagttcagctcatcatgtcactacagtgaacagtacaaattgtaagaagacaccacctgaagattgtgagggtccttttagacctgcagaaatcctgaaagaaggaagtgttctagatattctgaaaagccctggtttcgcatcgccgaagatagattctgttgctgctcagcccaccgcaacaagcccagtagtttatacaagaccagcaataagtagcttttcttctagtggaattgggtttggggagagtttaaaagctgggtcatcatggcagtgtgatacatgtctactccagaacaaagttacagacaacaaatgcatagcctgtcaagcagcaaaattgtcacccagagatactgctaaacagactggaattgaaacaccaaataaaagtggcaaaacaactctttctgcatcagggacaggctttggagacaaatttaaaccagtgataggcacttgggattgtgatacctgtttagtgcaaaataaacctgaagcaataaaatgtgtagcctgtgaaacaccgaaacctggaacttgtgtgaagcgagcccttacattgacagtggtttcggaaagtgctgagactatgactgcttcatcttccagctgcactgtaaccactggtaccttaggatttggagataaattcaaaaggcccattggatcttgggagtgttcagtatgctgtgtttctaataatgcagaagacaataagtgtgtgtcctgtatgtctgagaaaccaggaagttcagtacctacttcaagtagcagcactgtacctgtctctctgccttctggaggctctctaggattggaaaagttcaagaaacccgagggaagctgggactgtgaattgtgcctagtgcagaataaggcagactctaccaaatgtttggcatgtgaaagtgcaaagccaggcacaaaatctgggtttaaaggctttgacacatcttcctcatcttcgaactcagcagcctcctcatccttcaaatttggtgtctcatcatcctcttctgggccttctcagactttaacaagcactggaaattttaaatttggagatcagggaggattcaaaataggtgtgtcatctgattctgggtctataaaccccatgagtgaaggctttaaattttctaaaccaataggagattttaaatttggagtttcatctgaatctaagcccgaagaagttaaaaaagatagtaagaatgataattttaagtttggactttcttctggtttaagcaacccagtttctttaactccatttcaatttggggtatctaatcttggacaggaagaaaagaaagaggaactgcccaaatcttcctctgcaggttttagctttggtacaggtgttattaactccacccctgctcctgctaacaccatagtgacctctgagaacaagagcagcttcaaccttggaaccatagaaaccaagagtgcttcagtggctcctttcacatgtaagacatcagaagctaaaaaagaagaaatgcctgccaccaaaggaggattctcttttggcaacgtggagcctgcctctctgccatctgcctcagtgtttgttttgggaaggacagaagagaaacagcaagagcctgtcacttctacttccctagtttttgggaagaaagctgacaatgaagagccaaagtgtcaaccagtgttttcctttgggaattcagagcaaaccaaagatgagaattcttcaaagtccacatttagttttagtatgacaaaaccatctgagaaggaatctgaacagccagcaaaagccacttttgcctttggagctcaaactagtactacagctgatcaaggtgcagcaaagccagtttttagtttcttgaacaacagttcctctagttcaagtacaccagccacttctgctggtggtggcatatttggtagttccacctcttcctccaatccacctgtggctacctttgtgtttggacagtccagcaatcctgtgagcagctctgcctttggtaacactgctgaatccagcacctctcagtctttgctattttctcaagatagcaaactagcaaccacatccagcacaggtacagctgtcaccccatttgtctttggtccaggagccagcagtaataatactaccacctctggtttcggctttggagccacaaccacatctagctctgcaggatcctcctttgtatttggaactggaccctcagcaccatctgccagtccagcatttggtgctaaccagaccccaacatttggacaaagtcaaggtgccagccagcccaatcccccaggctttggatctatatcatcttccacagcattatttcccactggttctcagcctgcaccacctacttttgggacagtgtcaagcagtagccagccccctgtgtttggacagcaacctagtcagtctgcatttggctctggaacaactcctaattctagttcggctttccagtttggcagcagcactacaaatttcaacttcacaaacaacagtccatcaggagtgttcacatttggtgcaaattctagcacacctgcagcctcagcccagccttcaggctcggggggctttccatttaaccagtctccagcagcatttacagtggggtcaaatgggaaaaatgtgttctcttcttctggaacttcattctctggtcgcaagataaagactgctgttagacgcaggaaataaaggtcacattggtgttgtactcaattttaacaacagctggtgccctgctttcagatactggattgtactttgtgctggggttatctgaagtcagatctgcctaaggacttctttaattttggaattttcctcctttctctttcgttacagaagccccaccctgcctcacccacccttttttaaataaataaatagctagactggtgactgattcttcagcaaaaatattttatgatccagcagattattcactgatttgacatagtctggctgtacccaggaatggagcctgcacggtgaatggctttgtatagaacctctttgtctacaccattatgtgcgctgataagcgttcatggaacgcgttgaaattgtaattatatctgaggaattctgtatagattagaattctgtatagattagagagtgttgaaacggatgatttctatgctgagtttgtgctggtgtatgtgtgaagtgagtgagttgggtgtattgtgcgctaaattttctgatccagttttgtttggaccaaaaaccagtattgtacaaagtattaagcatatatttttatatttactaaaatggactgtggtgactttggataataaggaaaagtttaatattaaagccatgtttattacagtataattaacatgttaaaccatgggataaatgccatcaataaaaaattatgacata

SEQ ID NO: 310103 - DNA, 3468 bp, Homo sapiens
agccgtatttattttctaattctaaggatcatggactttatttttcaaccacagatttttttttcctccttcttaaatcattagctcttgtctttgattttactgtctgcttacttcctgcctacttaaccaaccgacagggagaaggagaatgggaagaggttactgtttttatgttaagtgtcttttcaaagtctaatttacagccaagaacagcaaaagtaccccttggctttgtgcctctgcggcgccccggagatctccttccccgtccctcttcctttccgagaagccgcgttccgttgttgaactacgtttcccagcgtgccgcgcggccgagagcgtggactcgaccagcccttcctctttgcctatcagctcgtcgcagcatgatgatgcaaatgcgtcgggcgccgatgagtgacgacattctggctcgcgaccgcggcagccgccttagcaggggtaataggcgcaacggcggcggaggctgcagggacgacgacgacgacggcggcggggcgggcgctgtgcgcacaggggaggggtaggcgggcgtcgccagcggcttcaactgcggcagctacggctagggcgacggaagaactcccaccagtcggcggtcgagttaggcctcagcaccgcggggaactgttcgtgctgtcctctgcgggagatctccatagagaccgtgacacacacagaggcgggggtccgcagaggcggccggaccggagcctcctcggcctctgcggccgccacccccttccccgctgccagcactcaccctctctccgctcctgctcgcaacctcgcggttcctggggtgcttgtgcccactgtgtggacagcgcgggcggacttttgggccggggccgggcggcgggggaggctctctaaggcctccgcctctgcctctcccgcccccttacccgccccggagcgggaagcggcggaggctccgccatggcctcgggagccggaggagtcggagggggcggtggcggcaagatccggacgcggcgttgccaccaggggccaattaagccttaccagcaggggcgacaacagcatcagggcattcttagcagggttacagaatctgttaagaatattgtgccagggtggctacaaagatacttcaacaagaatgaagatgtatgcagctgttcaacagacacaagcgaggttccacgctggccagaaaataaagaggaccatctggtatatgccgatgaggagagctctaatattactgatgggagaatcacacctgagccagcagtcagtaatacagaagaaccttcaacaactagtactgcttcaaattatccagatgtgttaacaaggccttctcttcatcggagccatctgaatttttccatgttggaatcccctgcattacactgtcagccatctacatcctcggcattcccaattggcagttcgggattttcccttgtaaaggaaattaaagattctacctctcagcatgatgatgataacatctcaactaccagtggtttttcttcaagagcttctgataaagatataactgtttcaaagaacacttcattgccacctctgtggtccccagaagctgaacgttctcactcactctcacagcacactgccaccagctcaaaaaaaccagcattcaacttgtctgcctttggaacactttccccttcacttgggaattcttcaatccttaaaaccagtcagcttggagattctcctttttatcctggaaaaacaacatacggtggggcagcagctgctgtaagacagtctaaactacgaaatacaccttatcaggcaccagttagaagacaaatgaaagctaagcaactcagtgcacaatcttacggtgtgaccagttcaacagctcggcgaatattgcagtctttagagaagatgtcaagccctttagcggatgcaaaaagaattccatccattgtttcttctcctctgaattctcctcttgataggagtgggatagatatcacagattttcaggccaaaagagaaaaggtggattctcaatatcctcctgttcagagacttatgaccccaaagccagtttccatagcaacaaatcgaagtgtttattttaaaccatctctgactccttctggtgaattcaggaagactaatcaaagaatagataacaagtgcagtactggatatgaaaaaaatatgacacccggacaaaatagagaacaacgagaaagtggcttttcatatccaaatttcagtttgcctgcagccaatggtttatcttctggagtaggtggtggaggtggcaagatgagacgagaaagaacacgcctttgttgcttctaaacctctggaggaggaggaaatggaagttccagtattaccgaaaatctctctaccgatcaccagttcttcactgcctacctttaattttagttcccctgagatcacaacttcctctccatcacccatcaattcgtctcaagcattaacaaacaaggtacaaatgacctctccgagcagcactggcagtcccatgtttaaattttcatctccaatcgtaaaatctactgaggcaaatgtactacctccatcatctattggatttacatttagtgtgcctgttgcaaaaacagcagaactttctggttctagtagtactttagaaccaattataagtagttcaggtaagtaaaaatttcttacattttaacatacaaacaattgcatacagtagattagtatttcagcttctttcacctttggtaattcttataaatgccttcatttggatgaaattagctctgaaaagcaagcaggcactattatttaacctttttgacggtgctttttattaattatctttagagatacttagctccttaaatggaagtgtcagtttggttttgagagagataggcatggtagcaaatttatccactatctttgtttagtcaaaacaaggtgacaagttagttataaagcaagtctcattataagaaatttataggttgtctacattatagttgtagtagattttatttctagtttttacctttcagttcacaagcatttttatgtataaaggttatgcaggcccatgtagattgtgatacataatttctgaaccgaagaaatcagcatcattgaaggaaggaggccatgggtcattcctgtaaacccagcagtttgggaggctgtggtgggaggattgcttgaggccagaagctcaagacgatcctaggcagcacagtgagactcatccctaccgaaaaaaaaaaaaaaagaaaaagaaataaccaggtggtggtgtgagcctgtagtcccagctacctgggatgctgaagtgggaggattgcttgagcccaggaattcaaggctacagtgagctatgattgcactaccacactacagctggctgacagagcaagaccctatctcaaaaaaaaagaaagaaatgaatgaata

SEQ ID NO: 310104 - DNA, 1966 bp, Homo sapiens
agccgtatttattttctaattctaaggatcatggactttatttttcaaccacagatttttttttcctccttcttaaatcattagctcttgtctttgattttactgtctgcttacttcctgcctacttaaccaaccgacagggagaaggagaatgggaagaggttactgtttttatgttaagtgtcttttcaaagtctaatttacagccaagaacagcaaaagtaccccttggctttgtgcctctgcggcgccccggagatctccttccccgtccctcttcctttccgagaagccgcgttccgttgttgaactacgtttcccagcgtgccgcgcggccgagagcgtggactcgaccagcccttcctctttgcctatcagctcgtcgcagcatgatgatgcaaatgcgtcgggcgccgatgagtgacgacattctggctcgcgaccgcggcagccgccttagcaggggtaataggcgcaacggcggcggaggctgcagggacgacgacgacgacggcggcggggcgggcgctgtgcgcacaggggaggggtaggcgggcgtcgccagcggcttcaactgcggcagctacggctagggcgacggaagaactcccaccagtcggcggtcgagttaggcctcagcaccgcggggaactgttcgtgctgtcctctgcgggagatctccatagagaccgtgacacacacagaggcgggggtccgcagaggcggccggaccggagcctcctcggcctctgcggccgccacccccttccccgctgccagcactcaccctctctccgctcctgctcgcaacctcgcggttcctggggtgcttgtgcccactgtgtggacagcgcgggcggacttttgggccggggccgggcggcgggggaggctctctaaggcctccgcctctgcctctcccgcccccttacccgccccggagcgggaagcggcggaggctccgccatggcctcgggagccggaggagtcggagggggcggtggcggcaagatccggacgcggcgttgccaccaggggccaattaagccttaccagcaggggcgacaacagcatcagggcattcttagcagggttacagaatctgttaagaatattgtgccagggtggctacaaagatacttcaacaagaatgaagatgtatgcagctgttcaacagacacaagcgaggttccacgctggccagaaaataaagaggaccatctggtatatgccgatgaggagagctctaatattactgatgggagaatcacacctgagccagcagtcagtaatacagaagaaccttcaacaactagtactgcttcaaattatccagatgtgttaacaaggccttctcttcatcggagccatctgaatttttccatgttggaatcccctgcattacactgtcagccatctacatcctcggcattcccaattggcagttcgggattttcccttgtaaaggaaattaaagattctacctctcagcatgatgatgataacatctcaactaccagtggtttttcttcaagagcttctgataaagatataactgtttcaaagaacacttcattgccacctctgtggtccccagaagctgaacgttctcactcactctcacagcacactgccaccagctcaaaaaaaccagcattcaacttgtctgcctttggaacactttccccttcacttgggaattcttcaatccttaaaaccagtcagcttggagattctcctttttatcctggaaaaacaacatacggtggggcagcagctgctgtaagacagtctaaactacgaaatacaccttatcaggcaccagttagaagacaaatgaaagctaagcaactcagtgcacttcttatctattctttgattagtcttcctgaattcaccagaaggagtcagagatggtttaaaataaacacttcgatttgttgctatggaaactggctcctcgtgc

SEQ ID NO: 310105 - DNA, 1603 bp, Homo sapiens
agccgtatttattttctaattctaaggatcatggactttatttttcaaccacagatttttttttcctccttcttaaatcattagctcttgtctttgattttactgtctgcttacttcctgcctacttaaccaaccgacagggagaaggagaatgggaagaggttactgtttttatgttaagtgtcttttcaaagtctaatttacagccaagaacagcaaaagtaccccttggctttgtgcctctgcggcgccccggagatctccttccccgtccctcttcctttccgagaagccgcgttccgttgttgaactacgtttcccagcgtgccgcgcggccgagagcgtggactcgaccagcccttcctctttgcctatcagctcgtcgcagcatgatgatgcaaatgcgtcgggcgccgatgagtgacgacattctggctcgcgaccgcggcagccgccttagcaggggtaataggcgcaacggcggcggaggctgcagggacgacgacgacgacggcggcggggcgggcgctgtgcgcacaggggaggggtaggcgggcgtcgccagcggcttcaactgcggcagctacggctagggcgacggaagaactcccaccagtcggcggtcgagttaggcctcagcaccgcggggaactgttcgtgctgtcctctgcgggagatctccatagagaccgtgacacacacagaggcgggggtccgcagaggcggccggaccggagcctcctcggcctctgcggccgccacccccttccccgctgccagcactcaccctctctccgctcctgctcgcaacctcgcggttcctggggtgcttgtgcccactgtgtggacagcgcgggcggacttttgggccggggccgggcggcgggggaggctctctaaggcctccgcctctgcctctcccgcccccttacccgccccggagcgggaagcggcggaggctccgccatggcctcgggagccggaggagtcggagggggcggtggcggcaagatccggacgcggcgttgccaccaggggccaattaagccttaccagcaggggcgacaacagcatcagggcattcttagcagggttacagaatctgttaagaatattgtgccagggtggctacaaagatacttcaacaagaatgaagatgtatgcagctgttcaacagacacaagcgaggttccacgctggccagaaaataaagaggaccatctggtatatgccgatgaggagagctctaatattactgatgggagaatcacacctgagccagcagtcagtaatacagaagaaccttcaacaactagtactgcttcaaattatccagatgtgttaacaaggccttctcttcatcggagccatctgaatttttccatgttggaatcccctgcattacactgtcagccatctacatcctcggcattcccaattggcagttcgggattttcccttgtaaaggaaattaaagattctacctctcaccaagaccctgagcaatctcaattacaacatatacaccaacaaacaatgttcaaccagtaactactactaatcaacgcccataatcatacaaagcccacgcgcaaatagtaat

SEQ ID NO: 310106 - DNA, 2862 bp, Homo sapiens
ttctcggctgatctctctgggtaggtgccctctgggggcagtacccctgcctgagtggcacttcccctcctggctttgtttggtttggcctcgatttagaacagggttggcagaggcaggctgacttgcatttctggttttgggtttgttgctgcactttccccaaggggtgggcgggctctgactgacagtcaccactgggacaggcctgggccccaccctcaccacccaggaaaggggaaatgcggcccgctccccactcagtgccactctgtgccactccgtgccaggccctgagggcacccggttgctgcttccttccgtctttccccaaggactatcagagatgccagcgtgacccctgacacgtgtgtgcagcagcctgcagctgccccaagccatggctgaacactgactcccagctgtggggcttcaccattacagactccccagggcttcaaagacttctcagcttcgagcatggcttttggctgtcagggcagctgtacaatagtggatgtttgagacggaggcagatgagaagagggagatggccttggaggaagggaaggggcctggtgccgaggattccccacccagcaaggagccctctcctggccaggagcttcctccaggacaagaccttccacccaacaaggactccccttctgggcaggaacccgctcccagccaagaaccactgtccagcaaagactcagctacctctgaaggatcccctccaggcccagatgctccgcccagcaaggatgtgccaccatgccaggaaccccctccagcccaagacctctcaccctgccaggacctacctgctggtcaagaacccctgcctcaccaggaccctctactcaccaaagacctccctgccatccaggaatcccccacccgggaccttccaccctgtcaagatctgcctcctagccaggtctccctgccagccaaggcccttactgaggacaccatgagctccggggacctactagcagctactggggacccacctgcggcccccaggccagccttcgtgatccctgaggtccggctggatagcacctacagccagaaggcaggggcagagcagggctgctcgggagatgaggaggatgcagaagaggccgaggaggtggaggagggggaggaaggggaggaggacgaggatgaggacaccagcgatgacaactacggagagcgcagtgaggccaagcgcagcagcatgatcgagacgggccagggggctgagggtggcctctcactgcgtgtgcagaactcgctgcggcgccggacgcacagcgagggcagcctgctgcaggagccccgagggccctgctttgcctccgacaccaccttgcactgctcagacggtgagggcgccgcctccacctggggcatgccttcgcccagcaccctcaagaaagagctgggccgcaatggtggctccatgcaccacctttccctcttcttcacaggacacaggaagatgagcggggctgacaccgttggggatgatgacgaagcctcccggaagagaaagagcaaaaacctagccaaggacatgaagaacaagctggggatcttcagacggcggaatgagtcccctggagcccctcccgcgggcaaggcagacaaaatgatgaagtcattcaagcccacctcagaggaagccctcaagtggggcgagtccttggagaagctgctggttcacaaatacgggttagcagtgttccaagccttccttcgcactgagttcagtgaggagaatctggagttctggttggcttgtgaggacttcaagaaggtcaagtcacagtccaagatggcatccaaggccaagaagatctttgctgaatacatcgcgatccaggcatgcaaggaggtcaacctggactcctacacgcgggagcacaccaaggacaacctgcagagcgtcacgcggggctgcttcgacctggcacagaagcgcatcttcgggctcatggaaaaggactcgtaccctcgctttctccgttctgacctctacctggaccttattaaccagaagaagatgagtcccccgctttaggggccactggagtcgagctcagcgttcacaccaggcgggctgggtcccctgcccacctgcctccctgccccctgtgacggagggggcaagcaagcccccagaggccgtgtctctggacagacggatagacatacggaagcgaggcctggaccaagagaggcccaggctactggaggagtagaaggatgggccccgtggggtccccactgccccggtacgagggggcccaagaccctggcaggtcaggggccctggccaagccagatctggagctgctgctccctgctgcggagaccgcggaggcttcgcgttgaccaagttccttaaagaactggctgatggggcaggaggtccaggcctgggctctcgggccctcctagagggccattggagcttgcagctcagacccccactttgagttttatttatttaaatagtagttggatgcttggcacgtcgtcctgtaataggaaacccttgcctcatcagttttcctgatttacaagtgcaatattttagccaatgccttgggagaagctgccatgcaaaggtggacaccattctccagcttcaggggatatgctcgtcccgggcaccggtggcaggcagctggccttctggactaaggcagcctggggggacactgcagtctggctacacacagagatctggcaccccctgggtggagtgtccctcgggggctttgggaaagcatggcaccctcagaccacacagtagccaagttctggagcaaataaaaggcctgtgttatttcttgttcttga

SEQ ID NO: 310107 - DNA, 3065 bp, Homo sapiens
ttctcggctgatctctctgggtaggtgccctctgggggcagtacccctgcctgagtggcacttcccctcctggctttgtttggtttggcctcgatttagaacagggttggcagaggcaggctgacttgcatttctggttttgggtttgttgctgcactttccccaaggggtgggcgggctctgactgacagtcaccactgggacaggcctgggccccaccctcaccacccaggaaaggggaaatgcggcccgctccccactcagtgccactctgtgccactccgtgccaggccctgagggcacccggttgctgcttccttccgtctttccccaaggactatcagagatgccagcgtgacccctgacacgtgtgtgcagcagcctgcagctgccccaagccatggctgaacactgactcccagctgtggggcttcaccattacagactccccagggcttcaaagacttctcagcttcgagcatggcttttggctgtcagggcagctgtacaatagtggatgtttgagacggaggcagatgagaagagggagatggccttggaggaagggaaggggcctggtgccgaggattccccacccagcaaggagccctctcctggccaggagcttcctccaggacaagaccttccacccaacaaggactccccttctgggcaggaacccgctcccagccaagaaccactgtccagcaaagactcagctacctctgaaggatcccctccaggcccagatgctccgcccagcaaggatgtgccaccatgccaggaaccccctccagcccaagacctctcaccctgccaggacctacctgctggtcaagaacccctgcctcaccaggaccctctactcaccaaagacctccctgccatccaggaatcccccacccgggaccttccaccctgtcaagatctgcctcctagccaggtctccctgccagccaaggcccttactgaggacaccatgagctccggggacctactagcagctactggggacccacctgcggcccccaggccagccttcgtgatccctgaggtccggctggatagcacctacagccagaaggcaggggcagagcagggctgctcgggagatgaggaggatgcagaagaggccgaggaggtggaggagggggaggaaggggaggaggacgaggatgaggacaccagcgatgacaactacggagagcgcagtgaggccaagcgcagcagcatgatcgagacgggccagggggctgagggtggcctctcactgcgtgtgcagaactcgctgcggcgccggacgcacagcgagggcagcctgctgcaggagccccgagggccctgctttgcctccgacaccaccttgcactgctcagacggtgagggcgccgcctccacctggggcatgccttcgcccagcaccctcaagaaagagctgggccgcaatggtggctccatgcaccacctttccctcttcttcacaggacacaggaagatgagcggggctgacaccgttggggatgatgacgaagcctcccggaagagaaagagcaaaaacctagccaaggacatgaagaacaagctggggatcttcagacggcggaatgagtcccctggagcccctcccgcgggcaaggcagacaaaatgatgaagtcattcaagcccacctcagaggaagccctcaagtggggcgagtccttggagaagctgctggttcacaaatacgggttagcagtgttccaagccttccttcgcactgagttcagtgaggagaatctggagttctggttggcttgtgaggacttcaagaaggtcaagtcacagtccaagatggcatccaaggccaagaagatctttgctgaatacatcgcgatccaggcatgcaaggaggtcaacctggactcctacacgcgggagcacaccaaggacaacctgcagagcgtcacgcggggctgcttcgacctggcacagaagcgcatcttcgggctcatggaaaaggactcgtaccctcgctttctccgttctgacctctacctggaccttattaaccagaagaagatgagtcccccgctttaggggccactggagtcgagctcagcgttcacaccaggcgggctgggtcccctgcccacctgcctccctgccccctgtgacggagggggcaagcaagcccccagaggccgtgtctctggacagacggatagacatacggaagcgaggcctggaccaagagaggcccaggctactggaggagtagaaggatgggccccgtggggtccccactgccccggtacgagggggcccaagaccctggcaggtcaggggccctggccaagccagatctggagctgctgctccctgctgcggagaccgcggaggcttcgcgttgaccaagttccttaaagaactggctgatggggcaggaggtccaggcctgggctctcgggccctcctagagggccattggagcttgcagctcagacccccactttgagttttatttatttaaatagtagttggatgcttggcacgtcgtcctgtaataggaaacccttgcctcatcagttttcctgatttacaagtgcaatattttagccaatgccttgggagaagctgccatgcaaaggtggacaccattctccagcttcaggggatatgctcgtcccgggcaccggtggcaggcagctggccttctggactaaggcagcctggggggacactgcagtctggctacacacagagatctggcaccccctgggtggagtgtccctcgggggctttgggaaagcatggcaccctcagaccacacagtagccaagttctggagcaaataaaaggcctgtgttatttcttgttcttgaaaaaaaaaaaaaaagaaaaacagacaaaagaggggggcggaccgactccgaaaaaattatcgccacggagagggggaccccatatgttagtgccggctttacccacagtatgttgtggtgacacaagagggtgccccccattatggggcaatcgctttataacagcataggagatttgggccgtaattatacagacagtccag

SEQ ID NO: 310108 - DNA, 2315 bp, Homo sapiens
aagtgctcaagttgtctgggctgagatagggacactgaggggctggctagctcctttgtgcctccagttcccttggagaggagggtggctcttggcaggggtgggctgtgggcttcctgaccttggggtagaggcaagagcctccagcttctggcagtgaccgggcagggctgtgtcctagatcaccatcccgaggggaaaggacggctttggcttcaccatctgctgcgactctccagttcgagtccaggccgtggattccgggggtccggcggaacgggcagggctgcagcagctggacacggtgctgcagctgaatgagaggcctgtggagcactggaaatgtgtggagctggcccacgagatccggagctgccccagtgagatcatcctactcgtgtggcgcatggtcccccaggtcaagccaggaccagatggcggggtcctgcggcgggcctcctgcaagtcgacacatgacctccagtcaccccccaacaaacgggagaagaactgcacccatggggtccaggcacggcctgagcagcgccacagctgccacctggtatgtgacagctctgatgggctgctgctcggcggctgggagcgctacaccgaggtggccaagcgcgggggccagcacaccctgcctgcactgtcccgtgccactgcccccaccgaccccaactacatcatcctggccccgctgaatcctgggagccagctgctccggcctgtgtaccaggaggataccatccccgaagaatcagggagtcccagtaaagggaagtcctacacaggcctggggaagaagtcccggctgatgaagacagtgcagaccatgaagggccacgggaactaccaaaactgcccggttgtgaggccgcatgccacgcactcaagctatggcacctacgtcaccctggcccccaaagtcctggtgttccctgtctttgttcagcctctagatctctgtaatcctgcccggaccctcctgctgtcagaggagctgctgctgtatgaagggaggaacaaggctgccgaggtgacactgtttgcctattcggacctgctgctcttcaccaaggaggacgagcctggccgctgcgacgtcctgaggaaccccctctacctccagagtgtgaagctgcaggaaggttcttcagaagacctgaaattctgcgtgctctatctagcagagaaggcagagtgcttattcactttggaagcgcactcgcaggagcagaagaagagagtgtgctggtgcctgtcggagaacatcgccaagcagcaacagctggcagcatcacccccggacagcaagaaactccaccctttcggctctctccagcaggagatggggccggtcaactcaaccaatgccacccaggatagaagctttacctcaccaggacagactctgattggctgagcaaacccaagggcgggactctgcttctggcaacttaaccctttcttgggcatcccctaccacacagtaacctcacctcaactggacctgaaacagaggaccaagatggtgggtctagggtcatctgaagggagtggtcccaagggtgcatgtggatgtcaacagaaggaccacaatggtgtgagaggccttgtgggcgtgcagagactggcagcagaaagtcccaagaggagaggactcagaggcttcttccttccaaggaggaggaggaggaggacattccacatctgggcttccagtggtggctcccggacctgccttgggggcagcaggagaggttgggagaggtcaccctgatgaagaacaatgccatgatctgctgctgccagaggacatctccgcccatccactcattttccacctgtacacattggctcattcattcgatggatatttcgggtgcatctactttatgccaggctctatgctaggagctggggatactgtggagaaaaagtcggatatggtctcgctctcatcaagatttcagtctagctgggagtgagcgttaaataagtcaataccaacacacacacgtgcacacacgtgatggcaagctgtgatcatctatgaaagaaaaaacacagatttctttaagagggaattgtacttagagtgctgtgtgtgggggtggggatggggaaggacataacttttaaaccgagacttgtgggctggagaggaaggagccagtcctggacttggggaagagtgttcgcggtggatggaatagcacgtggagagtccctgagatgggaaggagctcagtgggctggaggaatggcgagcaggccagtgtggctggagcttagtgaggtgcaagaca

SEQ ID NO: 310109 - DNA, 1710 bp, Homo sapiens
gaggccagtcacaaatagctgggactggcttcctgccggggcggccccagaggctgtcccttgcagacacatgcccctttcacggctccctctcagggttggccagaaggaatttttttttccgctccccctcctggtccctcccatttcctggctcctcctgtctgagtcccagccccggcttgtgcctgggagtccagtcatcaggccaggattccagagagcgtgtgtggctgcagcctgcaccgttgctgcccgctgcccaggacgcggggtgggggacaggagccagagtggtgcctcctgcagaccaatctggggccccaaggtggggggccctacagagatgctccgaggcatgtacctcactcgcaacgggaacctgcagaggcgacacacgatgaaggaagccaaggacatgaagaacaagctggggatcttcagacggcggaatgagtcccctggagcccctcccgcgggcaaggcagacaaaatgatgaagtcattcaagcccacctcagaggaagccctcaagtggggcgagtccttggagaagctgctggttcacaaatacgggttagcagtgttccaagccttccttcgcactgagttcagtgaggagaatctggagttctggttggcttgtgaggacttcaagaaggtcaagtcacagtccaagatggcatccaaggccaagaagatctttgctgaatacatcgcgatccaggcatgcaaggaggtcaacctggactcctacacgcgggagcacaccaaggacaacctgcagagcgtcacgcggggctgcttcgacctggcacagaagcgcatcttcgggctcatggaaaaggactcgtaccctcgctttctccgttctgacctctacctggaccttattaaccagaagaagatgagtcccccgctttaggggccactggagtcgagctcagcgttcacaccaggcgggctgggtcccctgcccacctgcctccctgccccctgtgacggagggggcaagcaagcccccagaggccgtgtctctggacagacggatagacatacggaagcgaggcctggaccaagagaggcccaggctactggaggagtagaaggatgggccccgtggggtccccactgccccggtacgagggggcccaagaccctggcaggtcaggggccctggccaagccagatctggagctgctgctccctgctgcggagaccgcggaggcttcgcgttgaccaagttccttaaagaactggctgatggggcaggaggtccaggcctgggctctcgggccctcctagagggccattggagcttgcagctcagacccccactttgagttttatttatttaaatagtagttggatgcttggcacgtcgtcctgtaataggaaacccttgcctcatcagttttcctgatttacaagtgcaatattttagccaatgccttgggagaagctgccatgcaaaggtggacaccattctccagcttcaggggatatgctcgtcccgggcaccggtggcaggcagctggccttctggactaaggcagcctggggggacactgcagtctggctacacacagagatctggcaccccctgggtggagtgtccctcgggggctttgggaaagcatggcaccctcagaccacacagtagccaagttctggagcaaataaaaggcctgtgttatttcttgttcttga

SEQ ID NO: 310110 - DNA, 3561 bp, Homo sapiens
aagcttgcggccgctgagagacccgctgctgagaatgccaggaggtggggacactgagaatgggaagaaactaaagatcaccatcccgaggggaaaggacggctttggcttcaccatctgctgcgactctccagttcgagtccaggccgtggattccgggggtccggcggaacgggcagggctgcagcagctggacacggtgctgcagctgaatgagaggcctgtggagcactggaaatgtgtggagctggcccacgagatccggagctgccccagtgagatcatcctactcgtgtggcgcatggtcccccaggtcaagccaggaccagatggcggggtcctgcggcgggcctcctgcaagtcgacacatgacctccagtcaccccccaacaaacgggagaagaactgcacccatggggtccaggcacggcctgagcagcgccacagctgccacctggtatgtgacagctctgatgggctgctgctcggcggctgggagcgctacaccgaggtggccaagcgcgggggccagcacaccctgcctgcactgtcccgtgccactgcccccaccgaccccaactacatcatcctggccccgctgaatcctgggagccagctgctccggcctgtgtaccaggaggataccatccccgaagaatcagggagtcccagtaaagggaagtcctacacaggcctggggaagaagtcccggctgatgaagacagtgcagaccatgaagggccacgggaactaccaaaactgcccggttgtgaggccgcatgccacgcactcaagctatggcacctacgtcaccctggcccccaaagtcctggtgttccctgtctttgttcagcctctagatctctgtaatcctgcccggaccctcctgctgtcagaggagctgctgctgtatgaagggaggaacaaggctgccgaggtgacactgtttgcctattcggacctgctgctcttcaccaaggaggacgagcctggccgctgcgacgtcctgaggaaccccctctacctccagagtgtgaagctgcaggaaggttcttcagaagacctgaaattctgcgtgctctatctagcagagaaggcagagtgcttattcactttggaagcgcactcgcaggagcagaagaagagagtgtgctggtgcctgtcggagaacatcgccaagcagcaacagctggcagcatcacccccggacagcaagatgtttgagacggaggcagatgagaagagggagatggccttggaggaagggaaggggcctggtgccgaggattccccacccagcaaggagccctctcctggccaggagcttcctccaggacaagaccttccacccaacaaggactccccttctgggcaggaacccgctcccagccaagaaccactgtccagcaaagactcagctacctctgaaggatcccctccaggcccagatgctccgcccagcaaggatgtgccaccatgccaggaaccccctccagcccaagacctctcaccctgccaggacctacctgctggtcaagaacccctgcctcaccaggaccctctactcaccaaagacctccctgccatccaggaatcccccacccgggaccttccaccctgtcaagatctgcctcctagccaggtctccctgccagccaaggcccttactgaggacaccatgagctccggggacctactagcagctactggggacccacctgcggcccccaggccagccttcgtgatccctgaggtccggctggatagcacctacagccagaaggcaggggcagagcagggctgctcgggagatgaggaggatgcagaagaggccgaggaggtggaggagggggaggaaggggaggaggacgaggatgaggacaccagcgatgacaactacggagagcgcagtgaggccaagcgcagcagcatgatcgagacgggccagggggctgagggtggcctctcactgcgtgtgcagaactcgctgcggcgccggacgcacagcgagggcagcctgctgcaggagccccgagggccctgctttgcctccgacaccaccttgcactgctcagacggtgagggcgccgcctccacctggggcatgccttcgcccagcaccctcaagaaagagctgggccgcaatggtggctccatgcaccacctttccctcttcttcacaggacacaggaagatgagcggggctgacaccgttggggatgatgacgaagcctcccggaagagaaagagcaaaaacctagccaaggacatgaagaacaagctggggatcttcagacggcggaatgagtcccctggagcccctcccgcgggcaaggcagacaaaatgatgaagtcattcaagcccacctcagaggaagccctcaagtggggcgagtccttggagaagctgctggttcacaaatacgggttagcagtgttccaagccttccttcgcactgagttcagtgaggagaatctggagttctggttggcttgtgaggacttcaagaaggtcaagtcacagtccaagatggcatccaaggccaagaagatctttgctgaatacatcgcgatccaggcatgcaaggaggtcaacctggactcctacacgcgggagcacaccaaggacaacctgcagagcgtcacgcggggctgcttcgacctggcacagaagcgcatcttcgggctcatggaaaaggactcgtaccctcgctttctccgttctgacctctacctggaccttattaaccagaagaagatgagtcccccgctttaggggccactggagtcgagctcagcgttcacaccaggcgggctgggtcccctgcccacctgcctccctgccccctgtgacggagggggcaagcaagcccccagaggccgtgtctctggacagacggatagacatacggaagcgaggcctggaccaagagaggcccaggctactggaggagtagaaggatgggccccgtggggtccccactgccccggtacgagggggcccaagaccctggcaggtcaggggccctggccaagccagatctggagctgctgctccctgctgcggagaccgcggaggcttcgcgttgaccaagttccttaaagaactggctgatggggcaggaggtccaggcctgggctctcgggccctcctagagggccattggagcttgcagctcagacccccactttgagttttatttatttaaatagtagttggatgcttggcacgtcgtcctgtaataggaaacccttgcctcatcagttttcctgatttacaagtgcaatattttagccaatgccttgggagaagctgccatgcaaaggtggacaccattctccagcttcaggggatatgctcgtcccgggcaccggtggcaggcagctggccttctggactaaggcagcctggggggacactgcagtctggctacacacagagatctggcaccccctgggtggagtgtccctcgggggctttgggaaagcatggcaccctcagaccacacagtagccaagttctggagcaaataaaaggcctgtgttatttcttgttcttga

SEQ ID NO: 310111 - DNA, 3594 bp, Homo sapiens
tgctgggggagagctgggttttcatggggcggcagccgaggcaggacccgcagccatgaaccgcttcaatgggctctgcaaggtgtgctcggagcgccgctaccgccagatcaccatcccgaggggaaaggacggctttggcttcaccatctgctgcgactctccagttcgagtccaggccgtggattccgggggtccggcggaacgggcagggctgcagcagctggacacggtgctgcagctgaatgagaggcctgtggagcactggaaatgtgtggagctggcccacgagatccggagctgccccagtgagatcatcctactcgtgtggcgcatggtcccccaggtcaagccaggaccagatggcggggtcctgcggcgggcctcctgcaagtcgacacatgacctccagtcaccccccaacaaacgggagaagaactgcacccatggggtccaggcacggcctgagcagcgccacagctgccacctggtatgtgacagctctgatgggctgctgctcggcggctgggagcgctacaccgaggtggccaagcgcgggggccagcacaccctgcctgcactgtcccgtgccactgcccccaccgaccccaactacatcatcctggccccgctgaatcctgggagccagctgctccggcctgtgtaccaggaggataccatccccgaagaatcagggagtcccagtaaagggaagtcctacacaggcctggggaagaagtcccggctgatgaagacagtgcagaccatgaagggccacgggaactaccaaaactgcccggttgtgaggccgcatgccacgcactcaagctatggcacctacgtcaccctggcccccaaagtcctggtgttccctgtctttgttcagcctctagatctctgtaatcctgcccggaccctcctgctgtcagaggagctgctgctgtatgaagggaggaacaaggctgccgaggtgacactgtttgcctattcggacctgctgctcttcaccaaggaggacgagcctggccgctgcgacgtcctgaggaaccccctctacctccagagtgtgaagctgcaggaaggttcttcagaagacctgaaattctgcgtgctctatctagcagagaaggcagagtgcttattcactttggaagcgcactcgcaggagcagaagaagagagtgtgctggtgcctgtcggagaacatcgccaagcagcaacagctggcagcatcacccccggacagcaagatgtttgagacggaggcagatgagaagagggagatggccttggaggaagggaaggggcctggtgccgaggattccccacccagcaaggagccctctcctggccaggagcttcctccaggacaagaccttccacccaacaaggactccccttctgggcaggaacccgctcccagccaagaaccactgtccagcaaagactcagctacctctgaaggatcccctccaggcccagatgctccgcccagcaaggatgtgccaccatgccaggaaccccctccagcccaagacctctcaccctgccaggacctacctgctggtcaagaacccctgcctcaccaggaccctctactcaccaaagacctccctgccatccaggaatcccccacccgggaccttccaccctgtcaagatctgcctcctagccaggtctccctgccagccaaggcccttactgaggacaccatgagctccggggacctactagcagctactggggacccacctgcggcccccaggccagccttcgtgatccctgaggtccggctggatagcacctacagccagaaggcaggggcagagcagggctgctcgggagatgaggaggatgcagaagaggccgaggaggtggaggagggggaggaaggggaggaggacgaggatgaggacaccagcgatgacaactacggagagcgcagtgaggccaagcgcagcagcatgatcgagacgggccagggggctgagggtggcctctcactgcgtgtgcagaactcgctgcggcgccggacgcacagcgagggcagcctgctgcaggagccccgagggccctgctttgcctccgacaccaccttgcactgctcagacggtgagggcgccgcctccacctggggcatgccttcgcccagcaccctcaagaaagagctgggccgcaatggtggctccatgcaccacctttccctcttcttcacaggacacaggaagatgagcggggctgacaccgttggggatgatgacgaagcctcccggaagagaaagagcaaaaacctagccaaggacatgaagaacaagctggggatcttcagacggcggaatgagtcccctggagcccctcccgcgggcaaggcagacaaaatgatgaagtcattcaagcccacctcagaggaagccctcaagtggggcgagtccttggagaagctgctggttcacaaatacgggttagcagtgttccaagccttccttcgcactgagttcagtgaggagaatctggagttctggttggcttgtgaggacttcaagaaggtcaagtcacagtccaagatggcatccaaggccaagaagatctttgctgaatacatcgcgatccaggcatgcaaggaggtcaacctggactcctacacgcgggagcacaccaaggacaacctgcagagcgtcacgcggggctgcttcgacctggcacagaagcgcatcttcgggctcatggaaaaggactcgtaccctcgctttctccgttctgacctctacctggaccttattaaccagaagaagatgagtcccccgctttaggggccactggagtcgagctcagcgttcacaccaggcgggctgggtcccctgcccacctgcctccctgccccctgtgacggagggggcaagcaagcccccagaggccgtgtctctggacagacggatagacatacggaagcgaggcctggaccaagagaggcccaggctactggaggagtagaaggatgggccccgtggggtccccactgccccggtacgagggggcccaagaccctggcaggtcaggggccctggccaagccagatctggagctgctgctccctgctgcggagaccgcggaggcttcgcgttgaccaagttccttaaagaactggctgatggggcaggaggtccaggcctgggctctcgggccctcctagagggccattggagcttgcagctcagacccccactttgagttttatttatttaaatagtagttggatgcttggcacgtcgtcctgtaataggaaacccttgcctcatcagttttcctgatttacaagtgcaatattttagccaatgccttgggagaagctgccatgcaaaggtggacaccattctccagcttcaggggatatgctcgtcccgggcaccggtggcaggcagctggccttctggactaaggcagcctggggggacactgcagtctggctacacacagagatctggcaccccctgggtggagtgtccctcgggggctttgggaaagcatggcaccctcagaccacacagtagccaagttctggagcaaataaaaggcctgtgttatttcttgttcttga

SEQ ID NO: 310112 - DNA, 2658 bp, Homo sapiens
aacccacttccctgcgcctctggctgcctcaatgtcactggggattagtgtgcatttgcggcttttggcggacactcccctcctggctgcagcctcaccctctggagcccagggatgggcttgggcctgggagccccctgaaccagggagcagccctgaccgtccgtttctctattttccctgacgtcagaaggcagagtgcttattcactttggaagcgcactcgcaggagcagaagaagagagtgtgctggtgcctgtcggagaacatcgccaagcagcaacagctggcagcatcacccccggacagcaagatgtttgagacggaggcagatgagaagagggagatggccttggaggaagggaaggggcctggtgccgaggattccccacccagcaaggagccctctcctggccaggagcttcctccaggacaagaccttccacccaacaaggactccccttctgggcaggaacccgctcccagccaagaaccactgtccagcaaagactcagctacctctgaaggatcccctccaggcccagatgctccgcccagcaaggatgtgccaccatgccaggaaccccctccagcccaagacctctcaccctgccaggacctacctgctggtcaagaacccctgcctcaccaggaccctctactcaccaaagacctccctgccatccaggaatcccccacccgggaccttccaccctgtcaagatctgcctcctagccaggtctccctgccagccaaggcccttactgaggacaccatgagctccggggacctactagcagctactggggacccacctgcggcccccaggccagccttcgtgatccctgaggtccggctggatagcacctacagccagaaggcaggggcagagcagggctgctcgggagatgaggaggatgcagaagaggccgaggaggtggaggagggggaggaaggggaggaggacgaggatgaggacaccagcgatgacaactacggagagcgcagtgaggccaagcgcagcagcatgatcgagacgggccagggggctgagggtggcctctcactgcgtgtgcagaactcgctgcggcgccggacgcacagcgagggcagcctgctgcaggagccccgagggccctgctttgcctccgacaccaccttgcactgctcagacggtgagggcgccgcctccacctggggcatgccttcgcccagcaccctcaagaaagagctgggccgcaatggtggctccatgcaccacctttccctcttcttcacaggacacaggaagatgagcggggctgacaccgttggggatgatgacgaagcctcccggaagagaaagagcaaaaacctagccaaggacatgaagaacaagctggggatcttcagacggcggaatgagtcccctggagcccctcccgcgggcaaggcagacaaaatgatgaagtcattcaagcccacctcagaggaagccctcaagtggggcgagtccttggagaagctgctggttcacaaatacgggttagcagtgttccaagccttccttcgcactgagttcagtgaggagaatctggagttctggttggcttgtgaggacttcaagaaggtcaagtcacagtccaagatggcatccaaggccaagaagatctttgctgaatacatcgcgatccaggcatgcaaggaggtcaacctggactcctacacgcgggagcacaccaaggacaacctgcagagcgtcacgcggggctgcttcgacctggcacagaagcgcatcttcgggctcatggaaaaggactcgtaccctcgctttctccgttctgacctctacctggaccttattaaccagaagaagatgagtcccccgctttaggggccactggagtcgagctcagcgttcacaccaggcgggctgggtcccctgcccacctgcctccctgccccctgtgacggagggggcaagcaagcccccagaggccgtgtctctggacagacggatagacatacggaagcgaggcctggaccaagagaggcccaggctactggaggagtagaaggatgggccccgtggggtccccactgccccggtacgagggggcccaagaccctggcaggtcaggggccctggccaagccagatctggagctgctgctccctgctgcggagaccgcggaggcttcgcgttgaccaagttccttaaagaactggctgatggggcaggaggtccaggcctgggctctcgggccctcctagagggccattggagcttgcagctcagacccccactttgagttttatttatttaaatagtagttggatgcttggcacgtcgtcctgtaataggaaacccttgcctcatcagttttcctgatttacaagtgcaatattttagccaatgccttgggagaagctgccatgcaaaggtggacaccattctccagcttcaggggatatgctcgtcccgggcaccggtggcaggcagctggccttctggactaaggcagcctggggggacactgcagtctggctacacacagagatctggcaccccctgggtggagtgtccctcgggggctttgggaaagcatggcaccctcagaccacacagtagccaagttctggagcaaataaaaggcctgtgttatttcttgttcttga

SEQ ID NO: 310113 - DNA, 2495 bp, Homo sapiens
gtctggggaaggcagccgcttgacacggccgccaggagctgccacagccacggccgcccgcctgcgggaggagccgggtggaaacctgggcgggcgagctggcaggagcggcagccaggagtcgcctgggtccctgctggagtatgctggatgtttgagacggaggcagatgagaagagggagatggccttggaggaagggaaggggcctggtgccgaggattccccacccagcaaggagccctctcctggccaggagcttcctccaggacaagaccttccacccaacaaggactccccttctgggcaggaacccgctcccagccaagaaccactgtccagcaaagactcagctacctctgaaggatcccctccaggcccagatgctccgcccagcaaggatgtgccaccatgccaggaaccccctccagcccaagacctctcaccctgccaggacctacctgctggtcaagaacccctgcctcaccaggaccctctactcaccaaagacctccctgccatccaggaatcccccacccgggaccttccaccctgtcaagatctgcctcctagccaggtctccctgccagccaaggcccttactgaggacaccatgagctccggggacctactagcagctactggggacccacctgcggcccccaggccagccttcgtgatccctgaggtccggctggatagcacctacagccagaaggcaggggcagagcagggctgctcgggagatgaggaggatgcagaagaggccgaggaggtggaggagggggaggaaggggaggaggacgaggatgaggacaccagcgatgacaactacggagagcgcagtgaggccaagcgcagcagcatgatcgagacgggccagggggctgagggtggcctctcactgcgtgtgcagaactcgctgcggcgccggacgcacagcgagggcagcctgctgcaggagccccgagggccctgctttgcctccgacaccaccttgcactgctcagacggtgagggcgccgcctccacctggggcatgccttcgcccagcaccctcaagaaagagctgggccgcaatggtggctccatgcaccacctttccctcttcttcacaggacacaggaagatgagcggggctgacaccgttggggatgatgacgaagcctcccggaagagaaagagcaaaaacctagccaaggacatgaagaacaagctggggatcttcagacggcggaatgagtcccctggagcccctcccgcgggcaaggcagacaaaatgatgaagtcattcaagcccacctcagaggaagccctcaagtggggcgagtccttggagaagctgctggttcacaaatacgggttagcagtgttccaagccttccttcgcactgagttcagtgaggagaatctggagttctggttggcttgtgaggacttcaagaaggtcaagtcacagtccaagatggcatccaaggccaagaagatctttgctgaatacatcgcgatccaggcatgcaaggaggtcaacctggactcctacacgcgggagcacaccaaggacaacctgcagagcgtcacgcggggctgcttcgacctggcacagaagcgcatcttcgggctcatggaaaaggactcgtaccctcgctttctccgttctgacctctacctggaccttattaaccagaagaagatgagtcccccgctttaggggccactggagtcgagctcagcgttcacaccaggcgggctgggtcccctgcccacctgcctccctgccccctgtgacggagggggcaagcaagcccccagaggccgtgtctctggacagacggatagacatacggaagcgaggcctggaccaagagaggcccaggctactggaggagtagaaggatgggccccgtggggtccccactgccccggtacgagggggcccaagaccctggcaggtcaggggccctggccaagccagatctggagctgctgctccctgctgcggagaccgcggaggcttcgcgttgaccaagttccttaaagaactggctgatggggcaggaggtccaggcctgggctctcgggccctcctagagggccattggagcttgcagctcagacccccactttgagttttatttatttaaatagtagttggatgcttggcacgtcgtcctgtaataggaaacccttgcctcatcagttttcctgatttacaagtgcaatattttagccaatgccttgggagaagctgccatgcaaaggtggacaccattctccagcttcaggggatatgctcgtcccgggcaccggtggcaggcagctggccttctggactaaggcagcctggggggacactgcagtctggctacacacagagatctggcaccccctgggtggagtgtccctcgggggctttgggaaagcatggcaccctcagaccacacagtagccaagttctggagcaaataaaaggcctgtgttatttcttgttcttga

SEQ ID NO: 310114 - DNA, 2482 bp, Homo sapiens
cactttcactttcacactcccaggctgtggctcttacccgtgccgagctttcacatccgctcacatctgtgctcccagatgccagcgtgacccctgacacgtgtgtgcagcagcctgcagctgccccaagccatggctgaacactgactcccagctgtggggcttcaccattacagactccccaggggaaggggcctggtgccgaggattccccacccagcaaggagccctctcctggccaggagcttcctccaggacaagaccttccacccaacaaggactccccttctgggcaggaacccgctcccagccaagaaccactgtccagcaaagactcagctacctctgaaggatcccctccaggcccagatgctccgcccagcaaggatgtgccaccatgccaggaaccccctccagcccaagacctctcaccctgccaggacctacctgctggtcaagaacccctgcctcaccaggaccctctactcaccaaagacctccctgccatccaggaatcccccacccgggaccttccaccctgtcaagatctgcctcctagccaggtctccctgccagccaaggcccttactgaggacaccatgagctccggggacctactagcagctactggggacccacctgcggcccccaggccagccttcgtgatccctgaggtccggctggatagcacctacagccagaaggcaggggcagagcagggctgctcgggagatgaggaggatgcagaagaggccgaggaggtggaggagggggaggaaggggaggaggacgaggatgaggacaccagcgatgacaactacggagagcgcagtgaggccaagcgcagcagcatgatcgagacgggccagggggctgagggtggcctctcactgcgtgtgcagaactcgctgcggcgccggacgcacagcgagggcagcctgctgcaggagccccgagggccctgctttgcctccgacaccaccttgcactgctcagacggtgagggcgccgcctccacctggggcatgccttcgcccagcaccctcaagaaagagctgggccgcaatggtggctccatgcaccacctttccctcttcttcacaggacacaggaagatgagcggggctgacaccgttggggatgatgacgaagcctcccggaagagaaagagcaaaaacctagccaaggacatgaagaacaagctggggatcttcagacggcggaatgagtcccctggagcccctcccgcgggcaaggcagacaaaatgatgaagtcattcaagcccacctcagaggaagccctcaagtggggcgagtccttggagaagctgctggttcacaaatacgggttagcagtgttccaagccttccttcgcactgagttcagtgaggagaatctggagttctggttggcttgtgaggacttcaagaaggtcaagtcacagtccaagatggcatccaaggccaagaagatctttgctgaatacatcgcgatccaggcatgcaaggaggtcaacctggactcctacacgcgggagcacaccaaggacaacctgcagagcgtcacgcggggctgcttcgacctggcacagaagcgcatcttcgggctcatggaaaaggactcgtaccctcgctttctccgttctgacctctacctggaccttattaaccagaagaagatgagtcccccgctttaggggccactggagtcgagctcagcgttcacaccaggcgggctgggtcccctgcccacctgcctccctgccccctgtgacggagggggcaagcaagcccccagaggccgtgtctctggacagacggatagacatacggaagcgaggcctggaccaagagaggcccaggctactggaggagtagaaggatgggccccgtggggtccccactgccccggtacgagggggcccaagaccctggcaggtcaggggccctggccaagccagatctggagctgctgctccctgctgcggagaccgcggaggcttcgcgttgaccaagttccttaaagaactggctgatggggcaggaggtccaggcctgggctctcgggccctcctagagggccattggagcttgcagctcagacccccactttgagttttatttatttaaatagtagttggatgcttggcacgtcgtcctgtaataggaaacccttgcctcatcagttttcctgatttacaagtgcaatattttagccaatgccttgggagaagctgccatgcaaaggtggacaccattctccagcttcaggggatatgctcgtcccgggcaccggtggcaggcagctggccttctggactaaggcagcctggggggacactgcagtctggctacacacagagatctggcaccccctgggtggagtgtccctcgggggctttgggaaagcatggcaccctcagaccacacagtagccaagttctggagcaaataaaaggcctgtgttatttcttgttcttga

SEQ ID NO: 310115 - DNA, 1913 bp, Homo sapiens
gaggccagtcacaaatagctgggactggcttcctgccggggcggccccagaggctgtcccttgcagacacatgcccctttcacggctccctctcagggttggccagaaggaatttttttttccgctccccctcctggtccctcccatttcctggctcctcctgtctgagtcccagccccggcttgtgcctgggagtccagtcatcaggccaggattccagagagcgtgtgtggctgcagcctgcaccgttgctgcccgctgcccaggacgcggggtgggggacaggagccagagtggtgcctcctgcagaccaatctggggccccaaggtggggggccctacagagatgctccgaggcatgtacctcactcgcaacgggaacctgcagaggcgacacacgatgaaggaagccaaggacatgaagaacaagctggggatcttcagacggcggaatgagtcccctggagcccctcccgcgggcaaggcagacaaaatgatgaagtcattcaagcccacctcagaggaagccctcaagtggggcgagtccttggagaagctgctggttcacaaatacgggttagcagtgttccaagccttccttcgcactgagttcagtgaggagaatctggagttctggttggcttgtgaggacttcaagaaggtcaagtcacagtccaagatggcatccaaggccaagaagatctttgctgaatacatcgcgatccaggcatgcaaggaggtcaacctggactcctacacgcgggagcacaccaaggacaacctgcagagcgtcacgcggggctgcttcgacctggcacagaagcgcatcttcgggctcatggaaaaggactcgtaccctcgctttctccgttctgacctctacctggaccttattaaccagaagaagatgagtcccccgctttaggggccactggagtcgagctcagcgttcacaccaggcgggctgggtcccctgcccacctgcctccctgccccctgtgacggagggggcaagcaagcccccagaggccgtgtctctggacagacggatagacatacggaagcgaggcctggaccaagagaggcccaggctactggaggagtagaaggatgggccccgtggggtccccactgccccggtacgagggggcccaagaccctggcaggtcaggggccctggccaagccagatctggagctgctgctccctgctgcggagaccgcggaggcttcgcgttgaccaagttccttaaagaactggctgatggggcaggaggtccaggcctgggctctcgggccctcctagagggccattggagcttgcagctcagacccccactttgagttttatttatttaaatagtagttggatgcttggcacgtcgtcctgtaataggaaacccttgcctcatcagttttcctgatttacaagtgcaatattttagccaatgccttgggagaagctgccatgcaaaggtggacaccattctccagcttcaggggatatgctcgtcccgggcaccggtggcaggcagctggccttctggactaaggcagcctggggggacactgcagtctggctacacacagagatctggcaccccctgggtggagtgtccctcgggggctttgggaaagcatggcaccctcagaccacacagtagccaagttctggagcaaataaaaggcctgtgttatttcttgttcttgaaaaaaaaaaaaaaagaaaaacagacaaaagaggggggcggaccgactccgaaaaaattatcgccacggagagggggaccccatatgttagtgccggctttacccacagtatgttgtggtgacacaagagggtgccccccattatggggcaatcgctttataacagcataggagatttgggccgtaattatacagacagtccag

SEQ ID NO: 310116 - DNA, 1591 bp, Homo sapiens
cgttgtgagggatggacgcctctcccccggagcagcactttggggccagcttgggccctggggatgagccacaggggacccacagcctatgcgtgtgagcatgtaacccgggagccagctgggcccctcgcggggtgggcagaaggacgggctggcccaggaccctcttctttgagacatcccggactccatctcggatgaaagtgctttgagaaaccacagagttttctgtttaatggaagaaagaaatccagcctctctccagagtggcggtggccggctagacaggagccaaggacatgaagaacaagctggggatcttcagacggcggaatgagtcccctggagcccctcccgcgggcaaggcagacaaaatgatgaagtcattcaagcccacctcagaggaagccctcaagtggggcgagtccttggagaagctgctggttcacaaatacgggttagcagtgttccaagccttccttcgcactgagttcagtgaggagaatctggagttctggttggcttgtgaggacttcaagaaggtcaagtcacagtccaagatggcatccaaggccaagaagatctttgctgaatacatcgcgatccaggcatgcaaggaggtcaacctggactcctacacgcgggagcacaccaaggacaacctgcagagcgtcacgcggggctgcttcgacctggcacagaagcgcatcttcgggctcatggaaaaggactcgtaccctcgctttctccgttctgacctctacctggaccttattaaccagaagaagatgagtcccccgctttaggggccactggagtcgagctcagcgttcacaccaggcgggctgggtcccctgcccacctgcctccctgccccctgtgacggagggggcaagcaagcccccagaggccgtgtctctggacagacggatagacatacggaagcgaggcctggaccaagagaggcccaggctactggaggagtagaaggatgggccccgtggggtccccactgccccggtacgagggggcccaagaccctggcaggtcaggggccctggccaagccagatctggagctgctgctccctgctgcggagaccgcggaggcttcgcgttgaccaagttccttaaagaactggctgatggggcaggaggtccaggcctgggctctcgggccctcctagagggccattggagcttgcagctcagacccccactttgagttttatttatttaaatagtagttggatgcttggcacgtcgtcctgtaataggaaacccttgcctcatcagttttcctgatttacaagtgcaatattttagccaatgccttgggagaagctgccatgcaaaggtggacaccattctccagcttcaggggatatgctcgtcccgggcaccggtggcaggcagctggccttctggactaaggcagcctggggggacactgcagtctggctacacacagagatctggcaccccctgggtggagtgtccctcgggggctttgggaaagcatggcaccctcagaccacacagtagccaagttctggagcaaataaaaggcctgtgttatttcttgttcttga

SEQ ID NO: 310117 - DNA, 1658 bp, Homo sapiens
gaggccagtcacaaatagctgggactggcttcctgccggggcggccccagaggctgtcccttgcagacacatgcccctttcacggctccctctcagggttggccagaaggaatttttttttccgctccccctcctggtccctcccatttcctggctcctcctgtctgagtcccagccccggcttgtgcctgggagtccagtcatcaggccaggattccagagagcgtgtgtggctgcagcctgcaccgttgctgcccgctgcccaggacgcggggtgggggacaggagccagagtggtgcctcctgcagaccaatctggggccccaaggtggggggccctacagagatgctccgagagccaaggacatgaagaacaagctggggatcttcagacggcggaatgagtcccctggagcccctcccgcgggcaaggcagacaaaatgatgaagtcattcaagcccacctcagaggaagccctcaagtggggcgagtccttggagaagctgctggttcacaaatacgggttagcagtgttccaagccttccttcgcactgagttcagtgaggagaatctggagttctggttggcttgtgaggacttcaagaaggtcaagtcacagtccaagatggcatccaaggccaagaagatctttgctgaatacatcgcgatccaggcatgcaaggaggtcaacctggactcctacacgcgggagcacaccaaggacaacctgcagagcgtcacgcggggctgcttcgacctggcacagaagcgcatcttcgggctcatggaaaaggactcgtaccctcgctttctccgttctgacctctacctggaccttattaaccagaagaagatgagtcccccgctttaggggccactggagtcgagctcagcgttcacaccaggcgggctgggtcccctgcccacctgcctccctgccccctgtgacggagggggcaagcaagcccccagaggccgtgtctctggacagacggatagacatacggaagcgaggcctggaccaagagaggcccaggctactggaggagtagaaggatgggccccgtggggtccccactgccccggtacgagggggcccaagaccctggcaggtcaggggccctggccaagccagatctggagctgctgctccctgctgcggagaccgcggaggcttcgcgttgaccaagttccttaaagaactggctgatggggcaggaggtccaggcctgggctctcgggccctcctagagggccattggagcttgcagctcagacccccactttgagttttatttatttaaatagtagttggatgcttggcacgtcgtcctgtaataggaaacccttgcctcatcagttttcctgatttacaagtgcaatattttagccaatgccttgggagaagctgccatgcaaaggtggacaccattctccagcttcaggggatatgctcgtcccgggcaccggtggcaggcagctggccttctggactaaggcagcctggggggacactgcagtctggctacacacagagatctggcaccccctgggtggagtgtccctcgggggctttgggaaagcatggcaccctcagaccacacagtagccaagttctggagcaaataaaaggcctgtgttatttcttgttcttga

SEQ ID NO: 310118 - DNA, 1642 bp, Homo sapiens
  misc_feature (154)..(154): n is a, c, g, or t
cggtgcagctcgtgcaccgttgctggccgctgcccaggacactggggctgagttgtgacagagagccaacgagatgcgatgcctcctgacagtaccacgtctgtgcgcctcccatggtgcggaggtcctacaggagtatgcattccgaggtgantgtaaccgtcacatcgtgcaatggagaaacctgtccacaggtgcagatcaacacagattaaaggatgctaggatgcccttcgtgcccaagtctactccctgatctcgtgtgagtgtcgtaagggaggcgagcatgggccaaggatgcacgcaacacgtcatttgtcttgctgtctgcttgccatgtagccaaggacatgaagaacaagctggggatcttcagacggcggaatgagtcccctggagcccctcccgcgggcaaggcagacaaaatgatgaagtcattcaagcccacctcagaggaagccctcaagtggggcgagtccttggagaagctgctggttcacaaatacgggttagcagtgttccaagccttccttcgcactgagttcagtgaggagaatctggagttctggttggcttgtgaggacttcaagaaggtcaagtcacagtccaagatggcatccaaggccaagaagatctttgctgaatacatcgcgatccaggcatgcaaggaggtcaacctggactcctacacgcgggagcacaccaaggacaacctgcagagcgtcacgcggggctgcttcgacctggcacagaagcgcatcttcgggctcatggaaaaggactcgtaccctcgctttctccgttctgacctctacctggaccttattaaccagaagaagatgagtcccccgctttaggggccactggagtcgagctcagcgttcacaccaggcgggctgggtcccctgcccacctgcctccctgccccctgtgacggagggggcaagcaagcccccagaggccgtgtctctggacagacggatagacatacggaagcgaggcctggaccaagagaggcccaggctactggaggagtagaaggatgggccccgtggggtccccactgccccggtacgagggggcccaagaccctggcaggtcaggggccctggccaagccagatctggagctgctgctccctgctgcggagaccgcggaggcttcgcgttgaccaagttccttaaagaactggctgatggggcaggaggtccaggcctgggctctcgggccctcctagagggccattggagcttgcagctcagacccccactttgagttttatttatttaaatagtagttggatgcttggcacgtcgtcctgtaataggaaacccttgcctcatcagttttcctgatttacaagtgcaatattttagccaatgccttgggagaagctgccatgcaaaggtggacaccattctccagcttcaggggatatgctcgtcccgggcaccggtggcaggcagctggccttctggactaaggcagcctggggggacactgcagtctggctacacacagagatctggcaccccctgggtggagtgtccctcgggggctttgggaaagcatggcaccctcagaccacacagtagccaagttctggagcaaataaaaggcctgtgttatttcttgttcttga

SEQ ID NO: 310119 - DNA, 1494 bp, Homo sapiens
gaggccagtcacaaatagctgggactggcttcctgccggggcggccccagaggctgtcccttgcagacacatgcccctttcacggctccctctcagggttggccagaaggaatttttttttccgctccccctcctggtccctcccatttcctggctcctcctgtctgagtcccagccccggcttgtgcctgggagtccagtcatcaggccaggattccagagagcgtgtgtggctgcagcctgcaccgttgctgcccgctgcccaggacgcggggtgggggacaggagccagagtggtgcctcctgcagaccaatctggggccccaaggtggggggccctacagagatgctccgaggcatgtacctcactcgcaacgggaacctgcagaggcgacacacgatgaaggaagccaaggacatgaagaacaagctggggatcttcagacggcggaatgagtcccctggagcccctcccgcgggcaaggcagacaaaatgatgaagtcattcaagcccacctcagaggaagccctcaagtggggcgagtccttggagaagctgctggttcacaaatacgggttagcagtgttccaagccttccttcgcactgagttcagtgaggagaatctggagttctggttggcttgtgaggacttcaagaaggtcaagtcacagtccaagatggcatccaaggccaagaagatctttgctgaatacatcgcgatccaggcatgcaaggaggtcaacctggactcctacacgcgggagcacaccaaggacaacctgcagagcgtcacgcggggctgcttcgacctggcacagaagcgcatcttcgggctcatggaaaaggactcgtaccctcgctttctccgttctgacctctacctggaccttattaaccagaagaagatgagtcccccgctttaggggccactggagtcgagctcagcgttcacaccaggcgggctgggtcccctgcccacctgcctccctgccccctgtgacggagggggcaagcaagcccccagaggccgtgtctctggacagacggatagacatacggaagcgaggcctggaccaagagaggcccaggctactggaggagtagaaggatgggccccgtggggtccccactgccccggtacgagggggcccaagaccctggcaggtcaggggccctggccaagccagatctggagctgctgctccctgctgcggagaccgcggaggcttcgcgttgaccaagttccttaaagaactggctgatggggcaggaggtccaggcctgggctctcgggccctcctagagggccattggagcttgcagctcagacccccactttgagttttattaacacgcagtgggtcgtggacgttcgtatagaacctgcctagatcggttaagggcgattacagctggaactcgcgcaagggacctcagatcggaattccgggcagggaaggtctaaaacggggagccggaaagccgaggagac

SEQ ID NO: 310120 - DNA, 1122 bp, Homo sapiens
ttctcggctgatctctctgggtaggtgccctctgggggcagtacccctgcctgagtggcacttcccctcctggctttgtttggtttggcctcgatttagaacagggttggcagaggcaggctgacttgcatttctggttttgggtttgttgctgcactttccccaaggggtgggcgggctctgactgacagtcaccactgggacaggcctgggccccaccctcaccacccaggaaaggggaaatgcggcccgctccccactcagtgccactctgtgccactccgtgccaggccctgagggcacccggttgctgcttccttccgtctttccccaaggactatcagagatgccagcgtgacccctgacacgtgtgtgcagcagcctgcagctgccccaagccatggctgaacactgactcccagctgtggggcttcaccattacagactccccagggcttcaaagacttctcagcttcgagcatggcttttggctgtcagggcagctgtacaatagtggatgtttgagacggaggcagatgagaagagggagatggccttggaggaagggaaggggcctggtgccgaggattccccacccagcaaggagccctctcctggccaggagcttcctccaggacaagaccttccacccaacaaggactccccttctgggcaggaacccgctcccagccaagaaccactgtccagcaaagactcagctacctctgaaggatcccctccaggcccagatgctccgcccagcaaggatgtgccaccatgccaggaaccccctccagcccaagacctctcaccctgccaggacctacctgctggtcaagaacccctgcctcaccaggaccctctactcaccaaagacctccctgccatccaggaacccgctcccagccaagaaccactgtccagcaaagactcagctacctctgaaggatcccctccaggcccagatgctccgcccagcaaggatgtgccaccatgccaggaaccccctccagcccaagacctctcaccctgccaggacctacctgctggtcaagaacccctgcctcactcacccaccacattaacaacataaaaccctcattcacccgagaaaccccccta

SEQ ID NO: 310121 - DNA, 1307 bp, Homo sapiens
aacccacttccctgcgcctctggctgcctcaatgtcactggggattagtgtgcatttgcggcttttggcggacactcccctcctggctgcagcctcaccctctggagcccagggatgggcttgggcctgggagccccctgaaccagggagcagccctgaccgtccgtttctctattttccctgacgtcagaaggcagagtgcttattcactttggaagcgcactcgcaggagcagaagaagagagtgtgctggtgcctgtcggagaacatcgccaagcagcaacagctggcagcatcacccccggacagcaagaaactccaccctttcggctctctccagcaggagatggggccggtcaactcaaccaatgccacccaggatagaagctttacctcaccaggacagactctgattggctgagcaaacccaagggcgggactctgcttctggcaacttaaccctttcttgggcatcccctaccacacagtaacctcacctcaactggacctgaaacagaggaccaagatggtgggtctagggtcatctgaagggagtggtcccaagggtgcatgtggatgtcaacagaaggaccacaatggtgtgagaggccttgtgggcgtgcagagactggcagcagaaagtcccaagaggagaggactcagaggcttcttccttccaaggaggaggaggaggaggacattccacatctgggcttccagtggtggctcccggacctgccttgggggcagcaggagaggttgggagaggtcaccctgatgaagaacaatgccatgatctgctgctgccagaggacatctccgcccatccactcattttccacctgtacacattggctcattcattcgatggatatttcgggtgcatctactttatgccaggctctatgctaggagctggggatactgtggagaaaaagtcggatatggtctcgctctcatcaagatttcagtctagctgggagtgagcgttaaataagtcaataccaacacacacacgtgcacacacgtgatggcaagctgtgatcatctatgaaagaaaaaacacagatttctttaagagggaattgtacttagagtgctgtgtgtgggggtggggatggggaaggacataacttttaaaccgagacttgtgggctggagaggaaggagccagtcctggacttggggaagagtgttcgcggtggatggaatagcacgtggagagtccctgagatgggaaggagctcagtgggctggaggaatggcgagcaggccagtgtggctggagcttagtgaggtgcaagaca

SEQ ID NO: 310122 - DNA, 748 bp, Homo sapiens
gtgagaaagctaaagggggagggagaaggatacatgcaatgtggggagggctggcccaggggctgcagggaatgagaagtcaccatgttccacccccactatcctggcagcctcccagcgaactttccacctgttggacagaagataaaactgaggcccaatgggaccaagaaggcagagcatggacttaaacacatgactttaggattccagatgctgtgttcttatagctccactggtccccacagaaagcagagcaggtgtagcttagcccaggccattgtgtatttggatttaaaagatctgagatagtagctggagaaatagagttacagcctagccagactagaaatccatcagccagtcacaatgacaacacacatttattccgtgtccacattatcctaagcagtttacattaactcattaactctcacaacagccctttgaagtagatagtatttttgtgcccattttacagcagaggaaaccgaggcaaagagaggttatctaacttgctccaggttacacagtgtatcagtgtctgaactagaattagaatctggttccagggccagtgctcttaaccaaccaccacaccgtttgcctctcgtgaatatttatatgtagatgaataagtatttatggatttcctgctgtgtaccaggccctgcgctctgcaacatggcaggagccacagaagtgtgtgaggctggtctcaacctgagagaaataagttaactgtgtg

SEQ ID NO: 310123 - DNA, 1494 bp, Homo sapiens
cggccgggtggcgcgggaggaagtcacgtgggagcgcgggctcacatgactggccgcgcgatggacccgctgcccgcggctgcagtcggggcggcagctgaggcggaggctgacgaggaggcggatcccccggcgtcagatctgccgacaccccaggccatcgagccccaggccatcgtgcagcaggtcccagcccccagtcgaatgcagatgccgcaggggaacccgctgctgctgtcccacaccctgcaggagctgctggccagggacaccgtgcaggtggagctcattccggagaagaagggcctcttcctgaagcatgtggagtatgaggtttccagccagcgcttcaagtcctcggtatacagacggtacaatgacttcgtggtcttccaggagatgctcctgcacaagttcccctaccgtatggtgcctgccctgccacccaagagaatgctgggagctgacagggagttcatcgaggccaggaggagagccctgaagcgcttcgtcaacctggtggcgcgacaccccctgttctccgaggatgtggtcctcaagctcttcctgtccttcagcggctcggatgtgcagaacaagttaaaggagtcagcacagtgcgtcggggacgaattcctgaactgtaagctggctaccagggccaaggacttcctcccagctgacatccaggctcagtttgccatcagccgggagctgatccggaacatctacaatagctttcacaagcttcgcgacagggccgagcggatcgcgtcgcgggccatcgacaatgcggcagatcttctcatattcgggaaggagctaagtgcaatagggtctgacacgaccccgctgccctcctgggccgctctgaatagcagcacgtggggggtccctgaagcaggctctgaaaggcctgtctgtggaattcgcgctgctcgccgacaaggctgcacaacagggtaagcaggaagagaacgacgtggtggagaagctgaacctcttcttggatctgctgcagtcctataaggacctgtgcgagcggcatgagaagggcgtgttgcacaagcaccagcgggccctgcacaagtacagcctgatgaagaggcagatgatgagcgccaccgcgcagaaccgcgagccggagtccgtggagcagctggagtcccgcatcgtggagcaggagaacgcgattcagacgatggagctgcggaactacttctccctgtactgcctgcaccaggagacgcagctcatccacgtctacctgcccctcacctcccacatcctccgcgccttcgtcaactctcagatccaagggcacaaggagatgagcaaggtgtggaacgacctgaggcccaagctcagctgcctctttgcgggaccacacagcaccctgaccccaccgtgctccccgccggaggacggcctgtgtcctcactagcgcctgaggctgaggtggtgctccctgcggccgcactaaaacctctttcc

SEQ ID NO: 310124 - DNA, 249 bp, Homo sapiens
gactacttcaaaatagaaaaggaattcggggcgagccagagagggcccacacgactagaaggacgactgcctggcgcgatacaaaaatggtctccttgtgttgcccgggctggtctcgaactcctgacctcaagtgatctgcctgcctcggcctctgaaagtgtggggattacaggcatgacccgtcacaccgggctggaatgcacggatcttatatgctacaaattaaagaatcttcacagctacgca

SEQ ID NO: 310125 - DNA, 1839 bp, Homo sapiens
cggccgggtggcgcgggaggaagtcacgtgggagcgcgggctcacatgactggccgcgcgatggacccgctgcccgcggctgcagtcggggcggcagctgaggcggaggctgacgaggaggcggatcccccggcgtcagatctgccgacaccccaggccatcgagccccaggccatcgtgcagcaggtcccagcccccagtcgaatgcagatgccgcaggggaacccgctgctgctgtcccacaccctgcaggagctgctggccagggacaccgtgcaggtggagctcattccggagaagaagggcctcttcctgaagcatgtggagtatgaggtttccagccagcgcttcaagtcctcggtatacagacggtacaatgacttcgtggtcttccaggagatgctcctgcacaagttcccctaccgtatggtgcctgccctgccacccaagagaatgctgggagctgacagggagttcatcgaggccaggaggagagccctgaagcgcttcgtcaacctggtggcgcgacaccccctgttctccgaggatgtggtcctcaagctcttcctgtccttcagcggctcggatgtgcagaacaagttaaaggagtcagcacagtgcgtcggggacgaattcctgaactgtaagctggctaccagggccaaggacttcctcccagctgacatccaggctcagtttgccatcagccgggagctgatccggaacatctacaatagctttcacaagcttcgcgacagggccgagcggatcgcgtcgcgggccatcgacaatgcggcagatcttctcatattcgggaaggagctaagtgcaatagggtctgacacgaccccgctgccctcctgggccgctctgaatagcagcacgtggggggtccctgaagcaggctctgaaaggcctgtctgtggaattcgcgctgctcgccgacaaggctgcacaacagggtaagcaggaagagaacgacgtggtggagaagctgaacctcttcttggatctgctgcagtcctataaggacctgtgcgagcggcatgagaagggcgtgttgcacaagcaccagcgggccctgcacaagtacagcctgatgaagaggcagatgatgagcgccaccgcgcagaaccgcgagccggagtccgtggagcagctggagtcccgcatcgtggagcaggagaacgcgattcagacgatggagctgcggaactacttctccctgtactgcctgcaccaggagacgcagctcatccacgtctacctgcccctcacctcccacatcctccgcgccttcgtcaactctcagatccaagggcacaaggagatgagcaaggtgtggaacgacctgaggcccaagctcagctgcctctttgcgggaccacacagcaccctgaccccaccgtgctccccgccggaggacggcctgtgtcctcactagcgcctgaggctgaggtggtgctccctgcggccgcactaaaacctctttccaaacggtgtgtcccggtgtaattccctttggacggcagctcccctccccgccacgccccgtgctgcagctggagcagaggagctcacgcctgcgggtcgggaggcgcatccgtggaccatgggggcagctgggccacactgtccttcgccctgtggcctgctagcctggtcgagagaggtggtggggttctctggaatggtttcctcctgacacccagagctgtgcggggaggcagggatctctcatctcacagagattgtgcctgggggagcgtggaggcagggcctccaggtgctggaacagtcgggaggggcagcatcatggtgctcggtcagccgaggaga

SEQ ID NO: 310126 - DNA, 1448 bp, Homo sapiens
ccgggggattggtgggacggatggctctgatgtccttggctggctccgcttgtcccttgactctgatttgagtcagaggaaatcatctgagcgatctgccgacaccccaggccatcgagccccaggccatcgtgcagcaggtcccagcccccagtcgaatgcagatgccgcaggggaacccgctgctgctgtcccacaccctgcaggagctgctggccagggacaccgtgcaggtggagctcattccggagaagaagggcctcttcctgaagcatgtggagtatgaggtttccagccagcgcttcaagtcctcggtatacagacggtacaatgacttcgtggtcttccaggagatgctcctgcacaagttcccctaccgtatggtgcctgccctgccacccaagagaatgctgggagctgacagggagttcatcgaggccaggaggagagccctgaagcgcttcgtcaacctggtggcgcgacaccccctgttctccgaggatgtggtcctcaagctcttcctgtccttcagcggctcggatgtgcagaacaagttaaaggagtcagcacagtgcgtcggggacgaattcctgaactgtaagctggctaccagggccaaggacttcctcccagctgacatccaggctcagtttgccatcagccgggagctgatccggaacatctacaatagctttcacaagcttcgcgacagggccgagcggatcgcgtcgcgggccatcgacaatgcggcagatcttctcatattcgggaaggagctaagtgcaatagggtctgacacgaccccgctgccctcctgggccgctctgaatagcagcacgtggggggtccctgaagcaggctctgaaaggcctgtctgtggaattcgcgctgctcgccgacaaggctgcacaacagggtaagcaggaagagaacgacgtggtggagaagctgaacctcttcttggatctgctgcagtcctataaggacctgtgcgagcggcatgagaagggcgtgttgcacaagcaccagcgggccctgcacaagtacagcctgatgaagaggcagatgatgagcgccaccgcgcagaaccgcgagccggagtccgtggagcagctggagtcccgcatcgtggagcaggagaacgcgattcagacgatggagctgcggaactacttctccctgtactgcctgcaccaggagacgcagctcatccacgtctacctgcccctcacctcccacatcctccgcgccttcgtcaactctcagatccaagggcacaaggagatgagcaaggtgtggaacgacctgaggcccaagctcagctgcctctttgcgggaccacacagcaccctgaccccaccgtgctccccgccggaggacggcctgtgtcctcactagcgcctgaggctgaggtggtgctccctgcggccgcactaaaacctctttcc

SEQ ID NO: 310127 - DNA, 1443 bp, Homo sapiens
gactacttcaaaatagaaaaggaattcggggcgagccagagagggcccacacgactagaaggacgactgcctggcgcgatacaaaaatatctgccgacaccccaggccatcgagccccaggccatcgtgcagcaggtcccagcccccagtcgaatgcagatgccgcaggggaacccgctgctgctgtcccacaccctgcaggagctgctggccagggacaccgtgcaggtggagctcattccggagaagaagggcctcttcctgaagcatgtggagtatgaggtttccagccagcgcttcaagtcctcggtatacagacggtacaatgacttcgtggtcttccaggagatgctcctgcacaagttcccctaccgtatggtgcctgccctgccacccaagagaatgctgggagctgacagggagttcatcgaggccaggaggagagccctgaagcgcttcgtcaacctggtggcgcgacaccccctgttctccgaggatgtggtcctcaagctcttcctgtccttcagcggctcggatgtgcagaacaagttaaaggagtcagcacagtgcgtcggggacgaattcctgaactgtaagctggctaccagggccaaggacttcctcccagctgacatccaggctcagtttgccatcagccgggagctgatccggaacatctacaatagctttcacaagcttcgcgacagggccgagcggatcgcgtcgcgggccatcgacaatgcggcagatcttctcatattcgggaaggagctaagtgcaatagggtctgacacgaccccgctgccctcctgggccgctctgaatagcagcacgtggggggtccctgaagcaggctctgaaaggcctgtctgtggaattcgcgctgctcgccgacaaggctgcacaacagggtaagcaggaagagaacgacgtggtggagaagctgaacctcttcttggatctgctgcagtcctataaggacctgtgcgagcggcatgagaagggcgtgttgcacaagcaccagcgggccctgcacaagtacagcctgatgaagaggcagatgatgagcgccaccgcgcagaaccgcgagccggagtccgtggagcagctggagtcccgcatcgtggagcaggagaacgcgattcagacgatggagctgcggaactacttctccctgtactgcctgcaccaggagacgcagctcatccacgtctacctgcccctcacctcccacatcctccgcgccttcgtcaactctcagatccaagggcacaaggagatgagcaaggtgtggaacgacctgaggcccaagctcagctgcctctttgcgggaccacacagcaccctgaccccaccgtgctccccgccggaggacggcctgtgtcctcactagcgcctgaggctgaggtggtgctccctgcggccgcactaaaacctctttcc

SEQ ID NO: 310128 - DNA, 1462 bp, Homo sapiens
ctcggggctccttcacccctgccccgagccttcccctcttgcctgggcgacttccatgcaccctgggctcccatcaacccttacctgcagctgctcgctcatgtcagatctgccgacaccccaggccatcgagccccaggccatcgtgcagcaggtcccagcccccagtcgaatgcagatgccgcaggggaacccgctgctgctgtcccacaccctgcaggagctgctggccagggacaccgtgcaggtggagctcattccggagaagaagggcctcttcctgaagcatgtggagtatgaggtttccagccagcgcttcaagtcctcggtatacagacggtacaatgacttcgtggtcttccaggagatgctcctgcacaagttcccctaccgtatggtgcctgccctgccacccaagagaatgctgggagctgacagggagttcatcgaggccaggaggagagccctgaagcgcttcgtcaacctggtggcgcgacaccccctgttctccgaggatgtggtcctcaagctcttcctgtccttcagcggctcggatgtgcagaacaagttaaaggagtcagcacagtgcgtcggggacgaattcctgaactgtaagctggctaccagggccaaggacttcctcccagctgacatccaggctcagtttgccatcagccgggagctgatccggaacatctacaatagctttcacaagcttcgcgacagggccgagcggatcgcgtcgcgggccatcgacaatgcggcagatcttctcatattcgggaaggagctaagtgcaatagggtctgacacgaccccgctgccctcctgggccgctctgaatagcagcacgtggggggtccctgaagcaggctctgaaaggcctgtctgtggaattcgcgctgctcgccgacaaggctgcacaacagggtaagcaggaagagaacgacgtggtggagaagctgaacctcttcttggatctgctgcagtcctataaggacctgtgcgagcggcatgagaagggcgtgttgcacaagcaccagcgggccctgcacaagtacagcctgatgaagaggcagatgatgagcgccaccgcgcagaaccgcgagccggagtccgtggagcagctggagtcccgcatcgtggagcaggagaacgcgattcagacgatggagctgcggaactacttctccctgtactgcctgcaccaggagacgcagctcatccacgtctacctgcccctcacctcccacatcctccgcgccttcgtcaactctcagatccaagggcacaaggagatgagcaaggtgtggaacgacctgaggcccaagctcagctgcctctttgcgggaccacacagcaccctgaccccaccgtgctccccgccggaggacggcctgtgtcctcactagcgcctgaggctgaggtggtgctccctgcggccgcactaaaacctctttcc

SEQ ID NO: 310129 - DNA, 1674 bp, Homo sapiens
gctgcataggatatcttgagccagtctctcatccgtagaggacacgaatcacttcaaagtccgtacaagtcggaacagattttgccagaatttgtggttagcaagaaagtgatgtgttccgggtaggggaattctgttttggtattattttgtctttcctgagaaaagcatcacaaaaagagatgtttgcccatcctgtttgctggggtagtgggaagagaccgggggtgatggtggtgctggctggacgtgggtggtttcacaggacctgctgtgtctgagaggagccatgcggtgattagaagcttggaggctgcagatctgccgacaccccaggccatcgagccccaggccatcgtgcagcaggtcccagcccccagtcgaatgcagatgccgcaggggaacccgctgctgctgtcccacaccctgcaggagctgctggccagggacaccgtgcaggtggagctcattccggagaagaagggcctcttcctgaagcatgtggagtatgaggtttccagccagcgcttcaagtcctcggtatacagacggtacaatgacttcgtggtcttccaggagatgctcctgcacaagttcccctaccgtatggtgcctgccctgccacccaagagaatgctgggagctgacagggagttcatcgaggccaggaggagagccctgaagcgcttcgtcaacctggtggcgcgacaccccctgttctccgaggatgtggtcctcaagctcttcctgtccttcagcggctcggatgtgcagaacaagttaaaggagtcagcacagtgcgtcggggacgaattcctgaactgtaagctggctaccagggccaaggacttcctcccagctgacatccaggctcagtttgccatcagccgggagctgatccggaacatctacaatagctttcacaagcttcgcgacagggccgagcggatcgcgtcgcgggccatcgacaatgcggcagatcttctcatattcgggaaggagctaagtgcaatagggtctgacacgaccccgctgccctcctgggccgctctgaatagcagcacgtggggggtccctgaagcaggctctgaaaggcctgtctgtggaattcgcgctgctcgccgacaaggctgcacaacagggtaagcaggaagagaacgacgtggtggagaagctgaacctcttcttggatctgctgcagtcctataaggacctgtgcgagcggcatgagaagggcgtgttgcacaagcaccagcgggccctgcacaagtacagcctgatgaagaggcagatgatgagcgccaccgcgcagaaccgcgagccggagtccgtggagcagctggagtcccgcatcgtggagcaggagaacgcgattcagacgatggagctgcggaactacttctccctgtactgcctgcaccaggagacgcagctcatccacgtctacctgcccctcacctcccacatcctccgcgccttcgtcaactctcagatccaagggcacaaggagatgagcaaggtgtggaacgacctgaggcccaagctcagctgcctctttgcgggaccacacagcaccctgaccccaccgtgctccccgccggaggacggcctgtgtcctcactagcgcctgaggctgaggtggtgctccctgcggccgcactaaaacctctttcc

SEQ ID NO: 310130 - DNA, 1155 bp, Homo sapiens
cggccgggtggcgcgggaggaagtcacgtgggagcgcgggctcacatgactggccgcgcgatggacccgctgcccgcggctgcagtcggggcggcagctgaggcggaggctgacgaggaggcggatcccccggcgtcagatctgccgacaccccaggccatcgagccccaggccatcgtgcagcaggtcccagcccccagtcgaatgcagatgccgcaggggaacccgctgctgctgtcccacaccgatgtgcagaacaagttaaaggagtcagcacagtgcgtcggggacgaattcctgaactgtaagctggctaccagggccaaggacttcctcccagctgacatccaggctcagtttgccatcagccgggagctgatccggaacatctacaatagctttcacaagcttcgcgacagggccgagcggatcgcgtcgcgggccatcgacaatgcggcagatcttctcatattcgggaaggagctaagtgcaatagggtctgacacgaccccgctgccctcctgggccgctctgaatagcagcacgtggggggtccctgaagcaggctctgaaaggcctgtctgtggaattcgcgctgctcgccgacaaggctgcacaacagggtaagcaggaagagaacgacgtggtggagaagctgaacctcttcttggatctgctgcagtcctataaggacctgtgcgagcggcatgagaagggcgtgttgcacaagcaccagcgggccctgcacaagtacagcctgatgaagaggcagatgatgagcgccaccgcgcagaaccgcgagccggagtccgtggagcagctggagtcccgcatcgtggagcaggagaacgcgattcagacgatggagctgcggaactacttctccctgtactgcctgcaccaggagacgcagctcatccacgtctacctgcccctcacctcccacatcctccgcgccttcgtcaactctcagatccaagggcacaaggagatgagcaaggtgtggaacgacctgaggcccaagctcagctgcctctttgcgggaccacacagcaccctgaccccaccgtgctccccgccggaggacggcctgtgtcctcactagcgcctgaggctgaggtggtgctccctgcggccgcactaaaacctctttcc

SEQ ID NO: 310131 - DNA, 414 bp, Homo sapiens
tctcgggccctgtcacactagtttctgagattcaaatttctcacaatgttccatgccaagttcatatggtccaactcctccctagtacgatgatgtggagcaggagaacgcgattcagacgatggagctgcggaactacttctccctgtactgcctgcaccaggagacgcagctcatccacgtctacctgcccctcacctcccacatcctccgcgccttcgtcaactctcagatccaagggcacaaggagatgagcaaggtgtggaacgacctgaggcccaagctcagctgcctctttgcgggaccacacagcaccctgaccccaccgtgctccccgccggaggacggcctgtgtcctcactagcgcctgaggctgaggtggtgctccctgcggccgcactaaaacctctttcc

SEQ ID NO: 310132 - DNA, 2743 bp, Homo sapiens
gctcaggccccgcccctgccgccggaatcctgaagcccaaggctgcccgggggcggtccggcggcgccggcgatggggcataaaaccactggccacctgccgggctgctcctgcgtgcgctgccgtccccggatccaccgtgcctctgcggcctgcgtgcccggagtccccgcctgtgtcgtctctgtcgccgtccccgtctcctgccaggcgcggagccctgcgagccgcgggtgggccccaggcgcgcagacatgggctgctccgccaaagcgcgctgggctgccggggcgctgggcgtcgcggggctactgtgcgctgtgctgggcgctgtcatgatcgtgatggtgccgtcgctcatcaagcagcaggtccttaagaacgtgcgcatcgaccccagtagcctgtccttcaacatgtggaaggagatccctatccccttctatctctccgtctacttctttgacgtcatgaaccccagcgagatcctgaagggcgagaagccgcaggtgcgggagcgcgggccctacgtgtacagggagttcaggcacaaaagcaacatcaccttcaacaacaacgacaccgtgtccttcctcgagtaccgcaccttccagttccagccctccaagtcccacggctcggagagcgactacatcgtcatgcccaacatcctggtcttgggtgcggcggtgatgatggagaataagcccatgaccctgaagctcatcatgaccttggcattcaccaccctcggcgaacgtgccttcatgaaccgcactgtgggtgagatcatgtggggctacaaggacccccttgtgaatctcatcaacaagtactttccaggcatgttccccttcaaggacaagttcggattatttgctgagctcaacaactccgactctgggctcttcacggtgttcacgggggtccagaacatcagcaggatccacctcgtggacaagtggaacgggctgagcaaggttgacttctggcattccgatcagtgcaacatgatcaatggaacttctgggcaaatgtggccgcccttcatgactcctgagtcctcgctggagttctacagcccggaggcctgccgatccatgaagctaatgtacaaggagtcaggggtgtttgaaggcatccccacctatcgcttcgtggctcccaaaaccctgtttgccaacgggtccatctacccacccaacgaaggcttctgcccgtgcctggagtctggaattcagaacgtcagcacctgcaggttcagtgcccccttgtttctctcccatcctcacttcctcaacgccgacccggttctggcagaagcggtgactggcctgcaccctaaccaggaggcacactccttgttcctggacatccacccggtcacgggaatccccatgaactgctctgtgaaactgcagctgagcctctacatgaaatctgtcgcaggcattggacaaactgggaagattgagcctgtggtcctgccgctgctctggtttgcagagagcggggccatggagggggagactcttcacacattctacactcagctggtgttgatgcccaaggtgatgcactatgcccagtacgtcctcctggcgctgggctgcgtcctgctgctggtccctgtcatctgccaaatccggagccaagagaaatgctatttattttggagtagtagtaaaaagggctcaaaggataaggaggccattcaggcctattctgaatccctgatgacatcagctcccaagggctctgtgctgcaggaagcaaaactgtagggtcctgaggacaccgtgagccagccaggcctggccgctgggcctgaccggccccccagcccctacaccccgcttctcccggactctcccagcggacagccccccagccccacagcctgagcctcccagctgccatgtgcctgttgcacacctgcacacacgccctggcacacatacacacatgcgtgcaggcttgtgcagacactcagggatggagctgctgctgaagggacttgtagggagaggctcgtcaacaagcactgttctggaaccttctctccacgtggcccacaggcctgaccacaggggctgtgggtcctgcgtccccttcctcgggtgagcctggcctgtcccgttcagccgttgggcccaggcttcctcccctccaaggtgaaacactgcagtcccggtgtggtggctccccatgcaggacgggccaggctgggagtgccgccttcctgtgccaaattcagtggggactcagtgcccaggccctggccacgagctttggccttggtctacctgccaggccaggcaaagcgcctttacacaggcctcggaaaacaatggagtgagcacaagatgccctgtgcagctgcccgagggtctccgcccaccccggccggactttgatccccccgaagtcttcacaggcactgcatcgggttgtctggcgcccttttcctccagcctaaactgacatcatcctatggactgagccggccactctctggccgaagtggccgcaggctgtgcccccgagctgcccccaccccctcacagggtccctcagattataggtgcccaggctgaggtgaagaggcctgggggccctgccttccgggcgctcctggaccctggggcaaacctgtgacccttttctactggaatagaaatgagttttatcatctttgaaaaataattcactcttgaagtaataaacgtttaaaaaaatggga

SEQ ID NO: 310133 - DNA, 2645 bp, Homo sapiens
tgtacggtccgggtatttttatttcgaccagcggatccaccgtgcctctgcggcctgcgtgcccggagtccccgcctgtgtcgtctctgtcgccgtccccgtctcctgccaggcgcggagccctgcgagccgcgggtgggccccaggcgcgcagacatgggctgctccgccaaagcgcgctgggctgccggggcgctgggcgtcgcggggctactgtgcgctgtgctgggcgctgtcatgatcgtgatggtgccgtcgctcatcaagcagcaggtccttaagaacgtgcgcatcgaccccagtagcctgtccttcaacatgtggaaggagatccctatccccttctatctctccgtctacttctttgacgtcatgaaccccagcgagatcctgaagggcgagaagccgcaggtgcgggagcgcgggccctacgtgtacagggagttcaggcacaaaagcaacatcaccttcaacaacaacgacaccgtgtccttcctcgagtaccgcaccttccagttccagccctccaagtcccacggctcggagagcgactacatcgtcatgcccaacatcctggtcttgggtgcggcggtgatgatggagaataagcccatgaccctgaagctcatcatgaccttggcattcaccaccctcggcgaacgtgccttcatgaaccgcactgtgggtgagatcatgtggggctacaaggacccccttgtgaatctcatcaacaagtactttccaggcatgttccccttcaaggacaagttcggattatttgctgagctcaacaactccgactctgggctcttcacggtgttcacgggggtccagaacatcagcaggatccacctcgtggacaagtggaacgggctgagcaaggttgacttctggcattccgatcagtgcaacatgatcaatggaacttctgggcaaatgtggccgcccttcatgactcctgagtcctcgctggagttctacagcccggaggcctgccgatccatgaagctaatgtacaaggagtcaggggtgtttgaaggcatccccacctatcgcttcgtggctcccaaaaccctgtttgccaacgggtccatctacccacccaacgaaggcttctgcccgtgcctggagtctggaattcagaacgtcagcacctgcaggttcagtgcccccttgtttctctcccatcctcacttcctcaacgccgacccggttctggcagaagcggtgactggcctgcaccctaaccaggaggcacactccttgttcctggacatccacccggtcacgggaatccccatgaactgctctgtgaaactgcagctgagcctctacatgaaatctgtcgcaggcattggacaaactgggaagattgagcctgtggtcctgccgctgctctggtttgcagagagcggggccatggagggggagactcttcacacattctacactcagctggtgttgatgcccaaggtgatgcactatgcccagtacgtcctcctggcgctgggctgcgtcctgctgctggtccctgtcatctgccaaatccggagccaagagaaatgctatttattttggagtagtagtaaaaagggctcaaaggataaggaggccattcaggcctattctgaatccctgatgacatcagctcccaagggctctgtgctgcaggaagcaaaactgtagggtcctgaggacaccgtgagccagccaggcctggccgctgggcctgaccggccccccagcccctacaccccgcttctcccggactctcccagcggacagccccccagccccacagcctgagcctcccagctgccatgtgcctgttgcacacctgcacacacgccctggcacacatacacacatgcgtgcaggcttgtgcagacactcagggatggagctgctgctgaagggacttgtagggagaggctcgtcaacaagcactgttctggaaccttctctccacgtggcccacaggcctgaccacaggggctgtgggtcctgcgtccccttcctcgggtgagcctggcctgtcccgttcagccgttgggcccaggcttcctcccctccaaggtgaaacactgcagtcccggtgtggtggctccccatgcaggacgggccaggctgggagtgccgccttcctgtgccaaattcagtggggactcagtgcccaggccctggccacgagctttggccttggtctacctgccaggccaggcaaagcgcctttacacaggcctcggaaaacaatggagtgagcacaagatgccctgtgcagctgcccgagggtctccgcccaccccggccggactttgatccccccgaagtcttcacaggcactgcatcgggttgtctggcgcccttttcctccagcctaaactgacatcatcctatggactgagccggccactctctggccgaagtggccgcaggctgtgcccccgagctgcccccaccccctcacagggtccctcagattataggtgcccaggctgaggtgaagaggcctgggggccctgccttccgggcgctcctggaccctggggcaaacctgtgacccttttctactggaatagaaatgagttttatcatctttgaaaaataattcactcttgaagtaataaacgtttaaaaaaatggga

SEQ ID NO: 310134 - DNA, 2659 bp, Homo sapiens
tataaggctaggtaagctcgtgttaattggcgaggcctggatcaccggatccaccgtgcctctgcggcctgcgtgcccggagtccccgcctgtgtcgtctctgtcgccgtccccgtctcctgccaggcgcggagccctgcgagccgcgggtgggccccaggcgcgcagacatgggctgctccgccaaagcgcgctgggctgccggggcgctgggcgtcgcggggctactgtgcgctgtgctgggcgctgtcatgatcgtgatggtgccgtcgctcatcaagcagcaggtccttaagaacgtgcgcatcgaccccagtagcctgtccttcaacatgtggaaggagatccctatccccttctatctctccgtctacttctttgacgtcatgaaccccagcgagatcctgaagggcgagaagccgcaggtgcgggagcgcgggccctacgtgtacagggagttcaggcacaaaagcaacatcaccttcaacaacaacgacaccgtgtccttcctcgagtaccgcaccttccagttccagccctccaagtcccacggctcggagagcgactacatcgtcatgcccaacatcctggtcttgggtgcggcggtgatgatggagaataagcccatgaccctgaagctcatcatgaccttggcattcaccaccctcggcgaacgtgccttcatgaaccgcactgtgggtgagatcatgtggggctacaaggacccccttgtgaatctcatcaacaagtactttccaggcatgttccccttcaaggacaagttcggattatttgctgagctcaacaactccgactctgggctcttcacggtgttcacgggggtccagaacatcagcaggatccacctcgtggacaagtggaacgggctgagcaaggttgacttctggcattccgatcagtgcaacatgatcaatggaacttctgggcaaatgtggccgcccttcatgactcctgagtcctcgctggagttctacagcccggaggcctgccgatccatgaagctaatgtacaaggagtcaggggtgtttgaaggcatccccacctatcgcttcgtggctcccaaaaccctgtttgccaacgggtccatctacccacccaacgaaggcttctgcccgtgcctggagtctggaattcagaacgtcagcacctgcaggttcagtgcccccttgtttctctcccatcctcacttcctcaacgccgacccggttctggcagaagcggtgactggcctgcaccctaaccaggaggcacactccttgttcctggacatccacccggtcacgggaatccccatgaactgctctgtgaaactgcagctgagcctctacatgaaatctgtcgcaggcattggacaaactgggaagattgagcctgtggtcctgccgctgctctggtttgcagagagcggggccatggagggggagactcttcacacattctacactcagctggtgttgatgcccaaggtgatgcactatgcccagtacgtcctcctggcgctgggctgcgtcctgctgctggtccctgtcatctgccaaatccggagccaagagaaatgctatttattttggagtagtagtaaaaagggctcaaaggataaggaggccattcaggcctattctgaatccctgatgacatcagctcccaagggctctgtgctgcaggaagcaaaactgtagggtcctgaggacaccgtgagccagccaggcctggccgctgggcctgaccggccccccagcccctacaccccgcttctcccggactctcccagcggacagccccccagccccacagcctgagcctcccagctgccatgtgcctgttgcacacctgcacacacgccctggcacacatacacacatgcgtgcaggcttgtgcagacactcagggatggagctgctgctgaagggacttgtagggagaggctcgtcaacaagcactgttctggaaccttctctccacgtggcccacaggcctgaccacaggggctgtgggtcctgcgtccccttcctcgggtgagcctggcctgtcccgttcagccgttgggcccaggcttcctcccctccaaggtgaaacactgcagtcccggtgtggtggctccccatgcaggacgggccaggctgggagtgccgccttcctgtgccaaattcagtggggactcagtgcccaggccctggccacgagctttggccttggtctacctgccaggccaggcaaagcgcctttacacaggcctcggaaaacaatggagtgagcacaagatgccctgtgcagctgcccgagggtctccgcccaccccggccggactttgatccccccgaagtcttcacaggcactgcatcgggttgtctggcgcccttttcctccagcctaaactgacatcatcctatggactgagccggccactctctggccgaagtggccgcaggctgtgcccccgagctgcccccaccccctcacagggtccctcagattataggtgcccaggctgaggtgaagaggcctgggggccctgccttccgggcgctcctggaccctggggcaaacctgtgacccttttctactggaatagaaatgagttttatcatctttgaaaaataattcactcttgaagtaataaacgtttaaaaaaatggga

SEQ ID NO: 310135 - DNA, 2650 bp, Homo sapiens
gagcgcacgatagggctaggacgaggccgggtgtgacggatccaccgtgcctctgcggcctgcgtgcccggagtccccgcctgtgtcgtctctgtcgccgtccccgtctcctgccaggcgcggagccctgcgagccgcgggtgggccccaggcgcgcagacatgggctgctccgccaaagcgcgctgggctgccggggcgctgggcgtcgcggggctactgtgcgctgtgctgggcgctgtcatgatcgtgatggtgccgtcgctcatcaagcagcaggtccttaagaacgtgcgcatcgaccccagtagcctgtccttcaacatgtggaaggagatccctatccccttctatctctccgtctacttctttgacgtcatgaaccccagcgagatcctgaagggcgagaagccgcaggtgcgggagcgcgggccctacgtgtacagggagttcaggcacaaaagcaacatcaccttcaacaacaacgacaccgtgtccttcctcgagtaccgcaccttccagttccagccctccaagtcccacggctcggagagcgactacatcgtcatgcccaacatcctggtcttgggtgcggcggtgatgatggagaataagcccatgaccctgaagctcatcatgaccttggcattcaccaccctcggcgaacgtgccttcatgaaccgcactgtgggtgagatcatgtggggctacaaggacccccttgtgaatctcatcaacaagtactttccaggcatgttccccttcaaggacaagttcggattatttgctgagctcaacaactccgactctgggctcttcacggtgttcacgggggtccagaacatcagcaggatccacctcgtggacaagtggaacgggctgagcaaggttgacttctggcattccgatcagtgcaacatgatcaatggaacttctgggcaaatgtggccgcccttcatgactcctgagtcctcgctggagttctacagcccggaggcctgccgatccatgaagctaatgtacaaggagtcaggggtgtttgaaggcatccccacctatcgcttcgtggctcccaaaaccctgtttgccaacgggtccatctacccacccaacgaaggcttctgcccgtgcctggagtctggaattcagaacgtcagcacctgcaggttcagtgcccccttgtttctctcccatcctcacttcctcaacgccgacccggttctggcagaagcggtgactggcctgcaccctaaccaggaggcacactccttgttcctggacatccacccggtcacgggaatccccatgaactgctctgtgaaactgcagctgagcctctacatgaaatctgtcgcaggcattggacaaactgggaagattgagcctgtggtcctgccgctgctctggtttgcagagagcggggccatggagggggagactcttcacacattctacactcagctggtgttgatgcccaaggtgatgcactatgcccagtacgtcctcctggcgctgggctgcgtcctgctgctggtccctgtcatctgccaaatccggagccaagagaaatgctatttattttggagtagtagtaaaaagggctcaaaggataaggaggccattcaggcctattctgaatccctgatgacatcagctcccaagggctctgtgctgcaggaagcaaaactgtagggtcctgaggacaccgtgagccagccaggcctggccgctgggcctgaccggccccccagcccctacaccccgcttctcccggactctcccagcggacagccccccagccccacagcctgagcctcccagctgccatgtgcctgttgcacacctgcacacacgccctggcacacatacacacatgcgtgcaggcttgtgcagacactcagggatggagctgctgctgaagggacttgtagggagaggctcgtcaacaagcactgttctggaaccttctctccacgtggcccacaggcctgaccacaggggctgtgggtcctgcgtccccttcctcgggtgagcctggcctgtcccgttcagccgttgggcccaggcttcctcccctccaaggtgaaacactgcagtcccggtgtggtggctccccatgcaggacgggccaggctgggagtgccgccttcctgtgccaaattcagtggggactcagtgcccaggccctggccacgagctttggccttggtctacctgccaggccaggcaaagcgcctttacacaggcctcggaaaacaatggagtgagcacaagatgccctgtgcagctgcccgagggtctccgcccaccccggccggactttgatccccccgaagtcttcacaggcactgcatcgggttgtctggcgcccttttcctccagcctaaactgacatcatcctatggactgagccggccactctctggccgaagtggccgcaggctgtgcccccgagctgcccccaccccctcacagggtccctcagattataggtgcccaggctgaggtgaagaggcctgggggccctgccttccgggcgctcctggaccctggggcaaacctgtgacccttttctactggaatagaaatgagttttatcatctttgaaaaataattcactcttgaagtaataaacgtttaaaaaaatggga

SEQ ID NO: 310136 - DNA, 2601 bp, Homo sapiens
  misc_feature (17)..(17): n is a, c, g, or t
aacggccaggctggtangcgccccggattttaggcatcgtctctgtcgccgtccccgtctcctgccaggcgcggagccctgcgagccgcgggtgggccccaggcgcgcagacatgggctgctccgccaaagcgcgctgggctgccggggcgctgggcgtcgcggggctactgtgcgctgtgctgggcgctgtcatgatcgtgatggtgccgtcgctcatcaagcagcaggtccttaagaacgtgcgcatcgaccccagtagcctgtccttcaacatgtggaaggagatccctatccccttctatctctccgtctacttctttgacgtcatgaaccccagcgagatcctgaagggcgagaagccgcaggtgcgggagcgcgggccctacgtgtacagggagttcaggcacaaaagcaacatcaccttcaacaacaacgacaccgtgtccttcctcgagtaccgcaccttccagttccagccctccaagtcccacggctcggagagcgactacatcgtcatgcccaacatcctggtcttgggtgcggcggtgatgatggagaataagcccatgaccctgaagctcatcatgaccttggcattcaccaccctcggcgaacgtgccttcatgaaccgcactgtgggtgagatcatgtggggctacaaggacccccttgtgaatctcatcaacaagtactttccaggcatgttccccttcaaggacaagttcggattatttgctgagctcaacaactccgactctgggctcttcacggtgttcacgggggtccagaacatcagcaggatccacctcgtggacaagtggaacgggctgagcaaggttgacttctggcattccgatcagtgcaacatgatcaatggaacttctgggcaaatgtggccgcccttcatgactcctgagtcctcgctggagttctacagcccggaggcctgccgatccatgaagctaatgtacaaggagtcaggggtgtttgaaggcatccccacctatcgcttcgtggctcccaaaaccctgtttgccaacgggtccatctacccacccaacgaaggcttctgcccgtgcctggagtctggaattcagaacgtcagcacctgcaggttcagtgcccccttgtttctctcccatcctcacttcctcaacgccgacccggttctggcagaagcggtgactggcctgcaccctaaccaggaggcacactccttgttcctggacatccacccggtcacgggaatccccatgaactgctctgtgaaactgcagctgagcctctacatgaaatctgtcgcaggcattggacaaactgggaagattgagcctgtggtcctgccgctgctctggtttgcagagagcggggccatggagggggagactcttcacacattctacactcagctggtgttgatgcccaaggtgatgcactatgcccagtacgtcctcctggcgctgggctgcgtcctgctgctggtccctgtcatctgccaaatccggagccaagagaaatgctatttattttggagtagtagtaaaaagggctcaaaggataaggaggccattcaggcctattctgaatccctgatgacatcagctcccaagggctctgtgctgcaggaagcaaaactgtagggtcctgaggacaccgtgagccagccaggcctggccgctgggcctgaccggccccccagcccctacaccccgcttctcccggactctcccagcggacagccccccagccccacagcctgagcctcccagctgccatgtgcctgttgcacacctgcacacacgccctggcacacatacacacatgcgtgcaggcttgtgcagacactcagggatggagctgctgctgaagggacttgtagggagaggctcgtcaacaagcactgttctggaaccttctctccacgtggcccacaggcctgaccacaggggctgtgggtcctgcgtccccttcctcgggtgagcctggcctgtcccgttcagccgttgggcccaggcttcctcccctccaaggtgaaacactgcagtcccggtgtggtggctccccatgcaggacgggccaggctgggagtgccgccttcctgtgccaaattcagtggggactcagtgcccaggccctggccacgagctttggccttggtctacctgccaggccaggcaaagcgcctttacacaggcctcggaaaacaatggagtgagcacaagatgccctgtgcagctgcccgagggtctccgcccaccccggccggactttgatccccccgaagtcttcacaggcactgcatcgggttgtctggcgcccttttcctccagcctaaactgacatcatcctatggactgagccggccactctctggccgaagtggccgcaggctgtgcccccgagctgcccccaccccctcacagggtccctcagattataggtgcccaggctgaggtgaagaggcctgggggccctgccttccgggcgctcctggaccctggggcaaacctgtgacccttttctactggaatagaaatgagttttatcatctttgaaaaataattcactcttgaagtaataaacgtttaaaaaaatggga

SEQ ID NO: 310137 - DNA, 2808 bp, Homo sapiens
gctcaggccccgcccctgccgccggaatcctgaagcccaaggctgcccgggggcggtccggcggcgccggcgatggggcataaaaccactggccacctgccgggctgctcctgcgtgcgctgccgtccccggatccaccgtgcctctgcggcctgcgtgcccggagtccccgcctgtgtcgtctctgtcgccgtccccgtctcctgccaggcgcggagccctgcgagccgcgggtgggccccaggcgcgcagacatgggctgctccgccaaagcgcgctgggctgccggggcgctgggcgtcgcggggctactgtgcgctgtgctgggcgctgtcatgatcgtgatggtgccgtcgctcatcaagcagcaggtccttaagaacgtgcgcatcgaccccagtagcctgtccttcaacatgtggaaggagatccctatccccttctatctctccgtctacttctttgacgtcatgaaccccagcgagatcctgaagggcgagaagccgcaggtgcgggagcgcgggccctacgtgtacagggagttcaggcacaaaagcaacatcaccttcaacaacaacgacaccgtgtccttcctcgagtaccgcaccttccagttccagccctccaagtcccacggctcggagagcgactacatcgtcatgcccaacatcctggtcttgggtgcggcggtgatgatggagaataagcccatgaccctgaagctcatcatgaccttggcattcaccaccctcggcgaacgtgccttcatgaaccgcactgtgggtgagatcatgtggggctacaaggacccccttgtgaatctcatcaacaagtactttccaggcatgttccccttcaaggacaagttcggattatttgctgagctcaacaactccgactctgggctcttcacggtgttcacgggggtccagaacatcagcaggatccacctcgtggacaagtggaacgggctgagcaaggttgacttctggcattccgatcagtgcaacatgatcaatggaacttctgggcaaatgtggccgcccttcatgactcctgagtcctcgctggagttctacagcccggaggcctgccgatccatgaagctaatgtacaaggagtcaggggtgtttgaaggcatccccacctatcgcttcgtggctcccaaaaccctgtttgccaacgggtccatctacccacccaacgaaggcttctgcccgtgcctggagtctggaattcagaacgtcagcacctgcaggttcagtgcccccttgtttctctcccatcctcacttcctcaacgccgacccggttctggcagaagcggtgactggcctgcaccctaaccaggaggcacactccttgttcctggacatccacccggtcacgggaatccccatgaactgctctgtgaaactgcagctgagcctctacatgaaatctgtcgcaggcattggacaaactgggaagattgagcctgtggtcctgccgctgctctggtttgcagagagcggggccatggagggggagactcttcacacattctacactcagctggtgttgatgcccaaggtgatgcactatgcccagtacgtcctcctggcgctgggctgcgtcctgctgctggtccctgtcatctgccaaatccggagccaaaaccgtgtaaaaccatttttatgtggcttcaacgtcaactataaattagcttggttatcttctaggagaaatgctatttattttggagtagtagtaaaaagggctcaaaggataaggaggccattcaggcctattctgaatccctgatgacatcagctcccaagggctctgtgctgcaggaagcaaaactgtagggtcctgaggacaccgtgagccagccaggcctggccgctgggcctgaccggccccccagcccctacaccccgcttctcccggactctcccagcggacagccccccagccccacagcctgagcctcccagctgccatgtgcctgttgcacacctgcacacacgccctggcacacatacacacatgcgtgcaggcttgtgcagacactcagggatggagctgctgctgaagggacttgtagggagaggctcgtcaacaagcactgttctggaaccttctctccacgtggcccacaggcctgaccacaggggctgtgggtcctgcgtccccttcctcgggtgagcctggcctgtcccgttcagccgttgggcccaggcttcctcccctccaaggtgaaacactgcagtcccggtgtggtggctccccatgcaggacgggccaggctgggagtgccgccttcctgtgccaaattcagtggggactcagtgcccaggccctggccacgagctttggccttggtctacctgccaggccaggcaaagcgcctttacacaggcctcggaaaacaatggagtgagcacaagatgccctgtgcagctgcccgagggtctccgcccaccccggccggactttgatccccccgaagtcttcacaggcactgcatcgggttgtctggcgcccttttcctccagcctaaactgacatcatcctatggactgagccggccactctctggccgaagtggccgcaggctgtgcccccgagctgcccccaccccctcacagggtccctcagattataggtgcccaggctgaggtgaagaggcctgggggccctgccttccgggcgctcctggaccctggggcaaacctgtgacccttttctactggaatagaaatgagttttatcatctttgaaaaataattcactcttgaagtaataaacgtttaaaaaaatggga

SEQ ID NO: 310138 - DNA, 3203 bp, Homo sapiens
  misc_feature (2757)..(2757): n is a, c, g, or t
  misc_feature (2763)..(2763): n is a, c, g, or t
  misc_feature (2766)..(2766): n is a, c, g, or t
  misc_feature (2895)..(2895): n is a, c, g, or t
gctcaggccccgcccctgccgccggaatcctgaagcccaaggctgcccgggggcggtccggcggcgccggcgatggggcataaaaccactggccacctgccgggctgctcctgcgtgcgctgccgtccccggatccaccgtgcctctgcggcctgcgtgcccggagtccccgcctgtgtcgtctctgtcgccgtccccgtctcctgccaggcgcggagccctgcgagccgcgggtgggccccaggcgcgcagacatgggctgctccgccaaagcgcgctgggctgccggggcgctgggcgtcgcggggctactgtgcgctgtgctgggcgctgtcatgatcgtgatggtgccgtcgctcatcaagcagcaggtccttaagaacgtgcgcatcgaccccagtagcctgtccttcaacatgtggaaggagatccctatccccttctatctctccgtctacttctttgacgtcatgaaccccagcgagatcctgaagggcgagaagccgcaggtgcgggagcgcgggccctacgtgtacagggagttcaggcacaaaagcaacatcaccttcaacaacaacgacaccgtgtccttcctcgagtaccgcaccttccagttccagccctccaagtcccacggctcggagagcgactacatcgtcatgcccaacatcctggtcttgggtgcggcggtgatgatggagaataagcccatgaccctgaagctcatcatgaccttggcattcaccaccctcggcgaacgtgccttcatgaaccgcactgtgggtgagatcatgtggggctacaaggacccccttgtgaatctcatcaacaagtactttccaggcatgttccccttcaaggacaagttcggattatttgctgagctcaacaactccgactctgggctcttcacggtgttcacgggggtccagaacatcagcaggatccacctcgtggacaagtggaacgggctgagcaaggttgacttctggcattccgatcagtgcaacatgatcaatggaacttctgggcaaatgtggccgcccttcatgactcctgagtcctcgctggagttctacagcccggaggcctgccgatccatgaagctaatgtacaaggagtcaggggtgtttgaaggcatccccacctatcgcttcgtggctcccaaaaccctgtttgccaacgggtccatctacccacccaacgaaggcttctgcccgtgcctggagtctggaattcagaacgtcagcacctgcaggttcagtgcccccttgtttctctcccatcctcacttcctcaacgccgacccggttctggcagaagcggtgactggcctgcaccctaaccaggaggcacactccttgttcctggacatccacccggtcacgggaatccccatgaactgctctgtgaaactgcagctgagcctctacatgaaatctgtcgcaggcattggacaaactgggaagattgagcctgtggtcctgccgctgctctggtttgcagagagcggggccatggagggggagactcttcacacattctacactcagctggtgttgatgcccaaggtgatgcactatgcccagtacgtcctcctggcgctgggctgcgtcctgctgctggtccctgtcatctgccaaatccggagccaagagaaatgctatttattttggagtagtagtaaaaagggctcaaaggataaggaggccattcaggcctattctgaatccctgatgacatcagctcccaagggctctgtgctgcaggaagcaaaactgtagggtcctgaggacaccgtgagccagccaggcctggccgctgggcctgaccggccccccagcccctacaccccgcttctcccggactctcccagcggacagccccccagccccacagcctgagcctcccagctgccatgtgcctgttgcacacctgcacacacgccctggcacacatacacacatgcgtgcaggcttgtgcagacactcagggatggagctgctgctgaagggacttgtagggagaggctcgtcaacaagcactgttctggaaccttctctccacgtggcccacaggcctgaccacaggggctgtgggtcctgcgtccccttcctcgggtgagcctggcctgtcccgttcagccgttgggcccaggcttcctcccctccaaggtgaaacactgcagtcccggtgtggtggctccccatgcaggacgggccaggctgggagtgccgccttcctgtgccaaattcagtggggactcagtgcccaggccctggccacgagctttggccttggtctacctgccaggccaggcaaagcgcctttacacaggcctcggaaaacaatggagtgagcacaagatgccctgtgcagctgcccgagggtctccgcccaccccggccggactttgatccccccgaagtcttcacaggcactgcatcgggttgtctggcgcccttttcctccagcctaaactgacatcatcctatggactgagccggccactctctggccgaagtggccgcaggctgtgcccccgagctgcccccaccccctcacagggtccctcagattataggtgcccaggctgaggtgaagaggcctgggggccctgccttccgggcgctcctggaccctggggcaaacctgtgacccttttctactggaatagaaatgagttttatcatctttgaaaaataattcactcttgaagtaataaacgtttaaaaaaatgggaaaaaaaaaaaaaanaaaaanaanaaaaaaaaaaaaaaaaaaaaaaaaaaaaaaaaaaaaaaaaaaaaaaaaaaaaaaaaaaacaaaaaaaaaaaaaaaaaaaaacaaaaaaaaaaaaaaaaaaaaaaaaaaaaaaaaaaaaaaaaaaaaaanacctggggggggccccgggcccaattggcccctaatgggggggcgtaaaaaattagggggccgggttttaacacgttgggaaggggaaaaacccggcggatacccatataaagccccggggggaaaaccccctttttccacgggggggatattgcaaaaagcgcccgccatgtgcccttttcaaaaaggtggccaccttattggaagagggcaatttaacgccttaaatcttggaaaatcccgggaaacttttggaaaaaagctctttttaaccacaagcgccaatgggggaaatccctcttaaataa

SEQ ID NO: 310139 - DNA, 2614 bp, Homo sapiens
gctcaggccccgcccctgccgccggaatcctgaagcccaaggctgcccgggggcggtccggcggcgccggcgatggggcataaaaccactggccacctgccgggctgctcctgcgtgcgctgccgtccccggatccaccgtgcctctgcggcctgcgtgcccggagtccccgcctgtgtcgtctctgtcgccgtccccgtctcctgccaggcgcggagccctgcgagccgcgggtgggccccaggcgcgcagacatgggctgctccgccaaagcgcgctgggctgccggggcgctgggcgtcgcggggctactgtgcgctgtgctgggcgctgtcatgatcgtgatggtgccgtcgctcatcaagcagcaggtccttaagaacgtgcgcatcgaccccagtagcctgtccttcaacatgtggaaggagatccctatccccttctatctctccgtctacttctttgacgtcatgaaccccagcgagatcctgaagggcgagaagccgcaggtgcgggagcgcgggccctacgtgtacagggagttcaggcacaaaagcaacatcaccttcaacaacaacgacaccgtgtccttcctcgagtaccgcaccttccagttccagccctccaagtcccacggctcggagagcgactacatcgtcatgcccaacatcctggtcttgggtgcggcggtgatgatggagaataagcccatgaccctgaagctcatcatgaccttggcattcaccaccctcggcgaacgtgccttcatgaaccgcactgtgggtgagatcatgtggggctacaaggacccccttgtgaatctcatcaacaagtactttccaggcatgttccccttcaaggacaagttcggattatttgctgagctcaacaactccgactctgggctcttcacggtgttcacgggggtccagaacatcagcaggatccacctcgtggacaagtggaacgggctgagcaaggttgacttctggcattccgatcagtgcaacatgatcaatggaacttctgggcaaatgtggccgcccttcatgactcctgagtcctcgctggagttctacagcccggaggcctgccgatccatgaagctaatgtacaaggagtcaggggtgtttgaaggcatccccacctatcgcttcgtggctcccaaaaccctgtttgccaacgggtccatctacccacccaacgaaggcttctgcccgtgcctggagtctggaattcagaacgtcagcacctgcaggttcagtgcccccttgtttctctcccatcctcacttcctcaacgccgacccggttctggcagaagcggtgactggcctgcaccctaaccaggaggcacactccttgttcctggacatccacccggtcacgggaatccccatgaactgctctgtgaaactgcagctgagcctctacatgaaatctgtcgcaggcattggacaaactgggaagattgagcctgtggtcctgccgctgctctggtttgcagagagcggggccatggagggggagactcttcacacattctacactcagctggtgttgatgcccaaggtgatgcactatgcccagtacgtcctcctggcgctgggctgcgtcctgctgctggtccctgtcatctgccaaatccggagccaaggtcctgaggacaccgtgagccagccaggcctggccgctgggcctgaccggccccccagcccctacaccccgcttctcccggactctcccagcggacagccccccagccccacagcctgagcctcccagctgccatgtgcctgttgcacacctgcacacacgccctggcacacatacacacatgcgtgcaggcttgtgcagacactcagggatggagctgctgctgaagggacttgtagggagaggctcgtcaacaagcactgttctggaaccttctctccacgtggcccacaggcctgaccacaggggctgtgggtcctgcgtccccttcctcgggtgagcctggcctgtcccgttcagccgttgggcccaggcttcctcccctccaaggtgaaacactgcagtcccggtgtggtggctccccatgcaggacgggccaggctgggagtgccgccttcctgtgccaaattcagtggggactcagtgcccaggccctggccacgagctttggccttggtctacctgccaggccaggcaaagcgcctttacacaggcctcggaaaacaatggagtgagcacaagatgccctgtgcagctgcccgagggtctccgcccaccccggccggactttgatccccccgaagtcttcacaggcactgcatcgggttgtctggcgcccttttcctccagcctaaactgacatcatcctatggactgagccggccactctctggccgaagtggccgcaggctgtgcccccgagctgcccccaccccctcacagggtccctcagattataggtgcccaggctgaggtgaagaggcctgggggccctgccttccgggcgctcctggaccctggggcaaacctgtgacccttttctactggaatagaaatgagttttatcatctttgaaaaataattcactcttgaagtaataaacgtttaaaaaaatggga

SEQ ID NO: 310140 - DNA, 2725 bp, Homo sapiens
gctcaggccccgcccctgccgccggaatcctgaagcccaaggctgcccgggggcggtccggcggcgccggcgatggggcataaaaccactggccacctgccgggctgctcctgcgtgcgctgccgtccccggatccaccgtgcctctgcggcctgcgtgcccggagtccccgcctgtgtcgtctctgtcgccgtccccgtctcctgccaggcgcggagccctgcgagccgcgggtgggccccaggcgcgcagacatgggctgctccgccaaagcgcgctgggctgccggggcgctgggcgtcgcggggctactgtgcgctgtgctgggcgctgtcatgatcgtgatggtgccgtcgctcatcaagcagcaggtccttaagaacgtgcgcatcgaccccagtagcctgtccttcaacatgtggaaggagatccctatccccttctatctctccgtctacttctttgacgtcatgaaccccagcgagatcctgaagggcgagaagccgcaggtgcgggagcgcgggccctacgtgtacagggagttcaggcacaaaagcaacatcaccttcaacaacaacgacaccgtgtccttcctcgagtaccgcaccttccagttccagccctccaagtcccacggctcggagagcgactacatcgtcatgcccaacatcctggtcttgggtgcggcggtgatgatggagaataagcccatgaccctgaagctcatcatgaccttggcattcaccaccctcggcgaacgtgccttcatgaaccgcactgtgggtgagatcatgtggggctacaaggacccccttgtgaatctcatcaacaagtactttccaggcatgttccccttcaaggacaagttcggattatttgctgagctcaacaactccgactctgggctcttcacggtgttcacgggggtccagaacatcagcaggatccacctcgtggacaagtggaacgggctgagcaaggttgacttctggcattccgatcagtgcaacatgatcaatggaacttctgggcaaatgtggccgcccttcatgactcctgagtcctcgctggagttctacagcccggaggcctgccgatccatgaagctaatgtacaaggagtcaggggtgtttgaaggcatccccacctatcgcttcgtggctcccaaaaccctgtttgccaacgggtccatctacccacccaacgaaggcttctgcccgtgcctggagtctggaattcagaacgtcagcacctgcaggttcagtgcccccttgtttctctcccatcctcacttcctcaacgccgacccggttctggcagaagcggtgactggcctgcaccctaaccaggaggcacactccttgttcctggacatccacccggtcacgggaatccccatgaactgctctgtgaaactgcagctgagcctctacatgaaatctgtcgcaggcattggacaaactgggaagattgagcctgtggtcctgccgctgctctggtttgcagagagcggggccatggagggggagactcttcacacattctacactcagctggtgttgatgcccaaggtgatgcactatgcccagtacgtcctcctggcgctgggctgcgtcctgctgctggtccctgtcatctgccaaatccggagccaagagaaatgctatttattttggagtagtagtaaaaagggctcaaaggataaggaggccattcaggcctattctgaatccctgatgacatcagctcccaagggctctgtgctgcaggaagcaaaactgtagggtcctgaggacaccgtgagccagccaggcctggccgctgggcctgaccggcccggggggtcctagggccttagcgatctgaggaagggggggggtctgaaggcctcccagctgccatgtgcctgttgcacacctgcacacacgccctggcacacatacacacatgcgtgcaggcttgtgcagacactcagggatggagctgctgctgaagggacttgtagggagaggctcgtcaacaagcactgttctggaaccttctctccacgtggcccacaggcctgaccacaggggctgtgggtcctgcgtccccttcctcgggtgagcctggcctgtcccgttcagccgttgggcccaggcttcctcccctccaaggtgaaacactgcagtcccggtgtggtggctccccatgcaggacgggccaggctgggagtgccgccttcctgtgccaaattcagtggggactcagtgcccaggccctggccacgagctttggccttggtctacctgccaggccaggcaaagcgcctttacacaggcctcggaaaacaatggagtgagcacaagatgccctgtgcagctgcccgagggtctccgcccaccccggccggactttgatccccccgaagtcttcacaggcactgcatcgggttgtctggcgcccttttcctccagcctaaactgacatcatcctatggactgagccggccactctctggccgaagtggccgcaggctgtgcccccgagctgcccccaccccctcacagggtccctcagattataggtgcccaggctgaggtgaagaggcctgggggccctgccttccgggcgctcctggaccctggggcaaacctgtgacccttttctactggaatagaaatgagttttatcatctttgaaaaataattcactcttgaagtaataaacgtttaaaaaaatggga

SEQ ID NO: 310141 - DNA, 3201 bp, Homo sapiens
gctcaggccccgcccctgccgccggaatcctgaagcccaaggctgcccgggggcggtccggcggcgccggcgatggggcataaaaccactggccacctgccgggctgctcctgcgtgcgctgccgtccccggatccaccgtgcctctgcggcctgcgtgcccggagtccccgcctgtgtcgtctctgtcgccgtccccgtctcctgccaggcgcggagccctgcgagccgcgggtgggccccaggcgcgcagacatgggctgctccgccaaagcgcgctgggctgccggggcgctgggcgtcgcggggctactgtgcgctgtgctgggcgctgtcatgatcgtgatggtgccgtcgctcatcaagcagcaggtccttaagaacgtgcgcatcgaccccagtagcctgtccttcaacatgtggaaggagatccctatccccttctatctctccgtctacttctttgacgtcatgaaccccagcgagatcctgaagggcgagaagccgcaggtgcgggagcgcgggccctacgtgtacagggagttcaggcacaaaagcaacatcaccttcaacaacaacgacaccgtgtccttcctcgagtaccgcaccttccagttccagccctccaagtcccacggctcggagagcgactacatcgtcatgcccaacatcctggtcttgggtgcggcggtgatgatggagaataagcccatgaccctgaagctcatcatgaccttggcattcaccaccctcggcgaacgtgccttcatgaaccgcactgtgggtgagatcatgtggggctacaaggacccccttgtgaatctcatcaacaagtactttccaggcatgttccccttcaaggacaagttcggattatttgctgagctcaacaactccgactctgggctcttcacggtgttcacgggggtccagaacatcagcaggatccacctcgtggacaagtggaacgggctgagcaaggttgacttctggcattccgatcagtgcaacatgatcaatggaacttctgggcaaatgtggccgcccttcatgactcctgagtcctcgctggagttctacagcccggaggcctgccgatccatgaagctaatgtacaaggagtcaggggtgtttgaaggcatccccacctatcgcttcgtggctcccaaaaccctgtttgccaacgggtccatctacccacccaacgaaggcttctgcccgtgcctggagtctggaattcagaacgtcagcacctgcaggttcagtgcccccttgtttctctcccatcctcacttcctcaacgccgacccggttctggcagaagcggtgactggcctgcaccctaaccaggaggcacactccttgttcctggacatccacccggtcacgggaatccccatgaactgctctgtgaaactgcagctgagcctctacatgaaatctgtcgcaggcattggacaaactgggaagattgagcctgtggtcctgccgctgctctggtttgcagagagcggggccatggagggggagactcttcacacattctacactcagctggtgttgatgcccaaggtgatgcactatgcccagtacgtcctcctggcgctgggctgcgtcctgctgctggtccctgtcatctgccaaatccggagccaagagaaatgctatttattttggagtagtagtaaaaagggctcaaaggataaggaggccattcaggcctattctgaatccctgatgacatcagctcccaagggctctgtgctgcaggaagcaaaactgtagggtcctgaggacaccgtgagccagccaggcctggccgctgggcctgaccggccccccagcccctacaccccgcttctcccggactctcccagcggacagccccccagccccacagcctgagcctcccagctgccatgtgcctgttgcacacctgcacacacgccctggcacacatacacacatgcgtgcaggcttgtgcagacactcagggatggagctgctgctgaagggacttgtagggagaggctcgtcaacaagcactgttctggaaccttctctccacgtggcccacaggcctgaccacaggggctgtgggtcctgcgtccccttcctcgggtgagcctggcctgtcccgttcagccgttgggcccaggcttcctcccctccaaggtgaaacactgcagtcccggtgtggtggctccccatgcaggacgggccaggctgggagtgccgccttcctgtgccaaattcagtggggactcagtgcccaggccctggccacgagctttggccttggtctacctgccaggccaggcaaagcgcctttacacaggcctcggaaaacaatggagtgagcacaagatgccctgtgcagctgcccgagggtctccgcccaccccggccggactttgatccccccgaagtcttcacaggcactgcatcgggttgtctggcgcccttttcctccagcctaaactgacatcatcctatggactgagccggccactctctggccgaagtggccgcaggctgtgcccccgagctgcccccaccccctcacagggtccctcagattataggtgcccaggctgaggtgaagaggcctgggggccctgccttccgggcgctcctggaccctggggcaaacctgtgacccttttctactggaatagaaatgagttttatcatctttgaaaaataattcactcttgaagtaataaacgtttaaaaaaatgggatgcctgcctctgtgacagccttgtttgctgaggtcgtgggggtgggggcctctgggaagttccgggctcctcttctcttggtcaatagctcctttctggtggctgccaagagcgtctctcccagggccgggctgctggcttaccttcctgttgttttcaaatttcaaccttgtgcaatgttgagtttcatagaaatactgcatgagtacgcccttgtttagaagcagcagggtctgagtcccatcccacagcccccagtgcagacgcttttgccacttttgcatggggccccctggatgtgtttctgtgcatttatctacaaatcctggtgcccgtaggacatgccccgtgttgttctaaggcctttgctttctgctcgttacataaatggtgaagaagagaagcgggtaagagaacagattggagccatctaaaagttctcatcttaagtgtagatc

SEQ ID NO: 310142 - DNA, 2728 bp, Homo sapiens
gctcaggccccgcccctgccgccggaatcctgaagcccaaggctgcccgggggcggtccggcggcgccggcgatggggcataaaaccactggccacctgccgggctgctcctgcgtgcgctgccgtccccggatccaccgtgcctctgcggcctgcgtgcccggagtccccgcctgtgtcgtctctgtcgccgtccccgtctcctgccaggcgcggagccctgcgagccgcgggtgggccccaggcgcgcagacatgggctgctccgccaaagcgcgctgggctgccggggcgctgggcgtcgcggggctactgtgcgctgtgctgggcgctgtcatgatcgtgatggtgccgtcgctcatcaagcagcaggtccttaagaacgtgcgcatcgaccccagtagcctgtccttcaacatgtggaaggagatccctatccccttctatctctccgtctacttctttgacgtcatgaaccccagcgagatcctgaagggcgagaagccgcaggtgcgggagcgcgggccctacgtgtacagggagttcaggcacaaaagcaacatcaccttcaacaacaacgacaccgtgtccttcctcgagtaccgcaccttccagttccagccctccaagtcccacggctcggagagcgactacatcgtcatgcccaacatcctggtcttgggtgcggcggtgatgatggagaataagcccatgaccctgaagctcatcatgaccttggcattcaccaccctcggcgaacgtgccttcatgaaccgcactgtgggtgagatcatgtggggctacaaggacccccttgtgaatctcatcaacaagtactttccaggcatgttccccttcaaggacaagttcggattatttgctgagctcaacaactccgactctgggctcttcacggtgttcacgggggtccagaacatcagcaggatccacctcgtggacaagtggaacgggctgagcaaggttgacttctggcattccgatcagtgcaacatgatcaatggaacttctgggcaaatgtggccgcccttcatgactcctgagtcctcgctggagttctacagcccggaggcctgccgatccatgaagctaatgtacaaggagtcaggggtgtttgaaggcatccccacctatcgcttcgtggctcccaaaaccctgtttgccaacgggtccatctacccacccaacgaaggcttctgcccgtgcctggagtctggaattcagaacgtcagcacctgcaggttcagtgcccccttgtttctctcccatcctcacttcctcaacgccgacccggttctggcagaagcggtgactggcctgcaccctaaccaggaggcacactccttgttcctggacatccacccggtcacgggaatccccatgaactgctctgtgaaactgcagctgagcctctacatgaaatctgtcgcaggcattggacaaactgggaagattgagcctgtggtcctgccgctgctctggtttgcagagagcggggccatggagggggagactcttcacacattctacactcagctggtgttgatgcccaaggtgatgcactatgcccagtacgtcctcctggcgctgggctgcgtcctgctgctggtccctgtcatctgccaaatccggagccaagagaaatgctatttattttggagtagtagtaaaaagggctcaaaggataaggaggccattcaggcctattctgaatccctgatgacatcagctcccaagggctctgtgctgcaggaagcaaaactgtagggtcctgaggacaccgtgagccagccaggcctggccgctgggcctgaccggccccccagcccctacaccccgcttctcccggactctcccagcggacagccccccagccccacagcctgagcctcccagctgccatgtgcctgttgcacacctgcacacacgccctggcacacatacacacatgcgtgcaggcttgtgcagacactcagggatggagctgctgctgaagggacttgtagggagaggctcgtcaacaagcactgttctggaaccttctctccacgtggcccacaggcctgaccacaggggctgtgggtcctgcgtccccttcctcgggtgagcctggcctgtcccgttcagccgttgggcccaggcttcctcccctccaaggtgaaacactgcagtcccggtgtggtggctccccatgcaggacgggccaggctgggagtgccgccttcctgtgccaaattcagtggggactcagtgcccaggccctggccacgagctttggccttggtctacctgccaggccaggcaaagcgcctttacacaggcctcggaaaacaatggagtgagcacaagatgccctgtgcagctgcccgagggtctccgcccaccccggccggactttgatccccccgaagtcttcacaggcactgcatcgggttgtctggcgcccttttcctccagcctaaactgacatcatcctatggactgagccggccactctctggccgaagtggccgcaggctgtgcccccgagctgcccccaccccctcacagggtccctcagattataggtgcccaggctgaggtgaagaggcctgggggccctgccttccgggcgctcctggaccctggggcaaacctgtgacccttttctactggaatagaaatgagttttatcatctttgaatatatagagcaggagagtttccttttca

SEQ ID NO: 310143 - DNA, 2689 bp, Homo sapiens
gctcaggccccgcccctgccgccggaatcctgaagcccaaggctgcccgggggcggtccggcggcgccggcgatggggcataaaaccactggccacctgccgggctgctcctgcgtgcgctgccgtccccggatccaccgtgcctctgcggcctgcgtgcccggagtccccgcctgtgtcgtctctgtcgccgtccccgtctcctgccaggcgcggagccctgcgagccgcgggtgggccccaggcgcgcagacatgggctgctccgccaaagcgcgctgggctgccggggcgctgggcgtcgcggggctactgtgcgctgtgctgggcgctgtcatgatcgtgatggtgccgtcgctcatcaagcagcaggtccttaagaacgtgcgcatcgaccccagtagcctgtccttcaacatgtggaaggagatccctatccccttctatctctccgtctacttctttgacgtcatgaaccccagcgagatcctgaagggcgagaagccgcaggtgcgggagcgcgggccctacgtgtacagggagttcaggcacaaaagcaacatcaccttcaacaacaacgacaccgtgtccttcctcgagtaccgcaccttccagttccagccctccaagtcccacggctcggagagcgactacatcgtcatgcccaacatcctggtcttgggtgcggcggtgatgatggagaataagcccatgaccctgaagctcatcatgaccttggcattcaccaccctcggcgaacgtgccttcatgaaccgcactgtgggtgagatcatgtggggctacaaggacccccttgtgaatctcatcaacaagtactttccaggcatgttccccttcaaggacaagttcggattatttgctgagctcaacaactccgactctgggctcttcacggtgttcacgggggtccagaacatcagcaggatccacctcgtggacaagtggaacgggctgagcaaggttgacttctggcattccgatcagtgcaacatgatcaatggaacttctgggcaaatgtggccgcccttcatgactcctgagtcctcgctggagttctacagcccggaggcctgccgatccatgaagctaatgtacaaggagtcaggggtgtttgaaggcatccccacctatcgcttcgtggctcccaaaaccctgtttgccaacgggtccatctacccacccaacgaaggcttctgcccgtgcctggagtctggaattcagaacgtcagcacctgcaggttcagtgcccccttgtttctctcccatcctcacttcctcaacgccgacccggttctggcagaagcggtgactggcctgcaccctaaccaggaggcacactccttgttcctggacatccacccggtcacgggaatccccatgaactgctctgtgaaactgcagctgagcctctacatgaaatctgtcgcaggcattggacaaactgggaagattgagcctgtggtcctgccgctgctctggtttgcagagagcggggccatggagggggagactcttcacacattctacactcagctggtgttgatgcccaaggtgatgcactatgcccagtacgtcctcctggcgctgggctgcgtcctgctgctggtccctgtcatctgccaaatccggagccaagagaaatgctatttattttggagtagtagtaaaaagggctcaaaggataaggaggccattcaggcctattctgaatccctgatgacatcagctcccaagggctctgtgctgcaggaagcaaaactgtagggtcctgaggacaccgtgagccagccaggcctggccgctgggcctgaccggccccccagcccctacaccccgcttctcccggactctcccagcggacagccccccagccccacagcctgagcctcccagctgccatgtgcctgttgcacacctgcacacacgccctggcacacatacacacatgcgtgcaggcttgtgcagacactcagggatggagctgctgctgaagggacttgtagggagaggctcgtcaacaagcactgttctggaaccttctctccacgtggcccacaggcctgaccacaggggctgtgggtcctgcgtccccttcctcgggtgagcctggcctgtcccgttcagccgttgggcccaggcttcctcccctccaaggtgaaacactgcagtcccggtgtggtggctccccatgcaggacgggccaggctgggagtgccgccttcctgtgccaaattcagtggggactcagtgcccaggccctggccacgagctttggccttggtctacctgccaggccaggcaaagcgcctttacacaggcctcggaaacccggccggactttgatccccccgaagtcttcacaggcactgcatcgggttgtctggcgcccttttcctccagcctaaactgacatcatcctatggactgagccggccactctctggccgaagtggccgcaggctgtgcccccgagctgcccccaccccctcacagggtccctcagattataggtgcccaggctgaggtgaagaggcctgggggccctgccttccgggcgctcctggaccctggggcaaacctgtgacccttttctactggaatagaaatgagttttatcatctttgaaaaataattcactcttgaagtaataaacgtttaaaaaaatggga

SEQ ID NO: 310144 - DNA, 2633 bp, Homo sapiens
gctcaggccccgcccctgccgccggaatcctgaagcccaaggctgcccgggggcggtccggcggcgccggcgatggggcataaaaccactggccacctgccgggctgctcctgcgtgcgctgccgtccccggatccaccgtgcctctgcggcctgcgtgcccggagtccccgcctgtgtcgtctctgtcgccgtccccgtctcctgccaggcgcggagccctgcgagccgcgggtgggccccaggcgcgcagacatgggctgctccgccaaagcgcgctgggctgccggggcgctgggcgtcgcggggctactgtgcgctgtgctgggcgctgtcatgatcgtgatggtgccgtcgctcatcaagcagcaggtccttaagaacgtgcgcatcgaccccagtagcctgtccttcaacatgtggaaggagatccctatccccttctatctctccgtctacttctttgacgtcatgaaccccagcgagatcctgaagggcgagaagccgcaggtgcgggagcgcgggccctacgtgtacagggagttcaggcacaaaagcaacatcaccttcaacaacaacgacaccgtgtccttcctcgagtaccgcaccttccagttccagccctccaagtcccacggctcggagagcgactacatcgtcatgcccaacatcctggtcttgggtgcggcggtgatgatggagaataagcccatgaccctgaagctcatcatgaccttggcattcaccaccctcggcgaacgtgccttcatgaaccgcactgtgggtgagatcatgtggggctacaaggacccccttgtgaatctcatcaacaagtactttccaggcatgttccccttcaaggacaagttcggattatttgctgagctcaacaactccgactctgggctcttcacggtgttcacgggggtccagaacatcagcaggatccacctcgtggacaagtggaacgggctgagcaaggttgacttctggcattccgatcagtgcaacatgatcaatggaacttctgggcaaatgtggccgcccttcatgactcctgagtcctcgctggagttctacagcccggaggcctgccgatccatgaagctaatgtacaaggagtcaggggtgtttgaaggcatccccacctatcgcttcgtggctcccaaaaccctgtttgccaacgggtccatctacccacccaacgaaggcttctgcccgtgcctggagtctggaattcagaacgtcagcacctgcaggttcagtgcccccttgtttctctcccatcctcacttcctcaacgccgacccggttctggcagaagcggtgactggcctgcaccctaaccaggaggcacactccttgttcctggacatccacccggtcacgggaatccccatgaactgctctgtgaaactgcagctgagcctctacatgaaatctgtcgcaggcattggacaaactgggaagattgagcctgtggtcctgccgctgctctggtttgcagagagcggggccatggagggggagactcttcacacattctacactcagctggtgttgatgcccaaggtgatgcactatgcccagtacgtcctcctggcgctgggctgcgtcctgctgctggtccctgtcatctgccaaatccggagccaagagaaatgctatttattttggagtagtagtaaaaagggctcaaaggataaggaggccattcaggcctattctgaatccctgatgacatcagctcccaagggctctgtgctgcaggaagcaaaactgtagggtcctgaggacaccgtgagccagccaggcctggccgctgggcctgaccggccccccagcccctacaccccgcttctcccggactctcccagcggacagccccccagccccacagcctgagcctcccagctgccatgtgcctgttgcacacctgcacacacgccctggcacacatacacacatgcgtgcaggcttgtgcagacactcagggatggagctgctgctgaagggacttgtagggagaggctcgtcaacaagcactgttctggaaccttctctccacgtggcccacaggcctgaccacaggggctgtgggtcctgcgtccccttcctcgggtgagcctggcctgtcccgttcagccgttgggcccaggcttcctcccctccaaggtgaaacactgcagtcccggtgtggtggctccccatgcaggacgggccaggctgggagtgccgccttcctgtgccaaattcagtggggactcagtgcccaggccctggccacgagctttggccttggtctacctgccaggccaggcaaagcgcctttacacaggcctcggaaaacaatggagtgagcacaagatgccctgtgcagctgcccgagggtctccgcccactctctggccgaagtggccgcaggctgtgcccccgagctgcccccaccccctcacagggtccctcagattataggtgcccaggctgaggtgaagaggcctgggggccctgccttccgggcgctcctggaccctggggcaaacctgtgacccttttctactggaatagaaatgagttttatcatctttgaaaaataattcactcttgaagtaataaacgtttaaaaaaatggga

SEQ ID NO: 310145 - DNA, 1978 bp, Homo sapiens
gctcaggccccgcccctgccgccggaatcctgaagcccaaggctgcccgggggcggtccggcggcgccggcgatggggcataaaaccactggccacctgccgggctgctcctgcgtgcgctgccgtccccggatccaccgtgcctctgcggcctgcgtgcccggagtccccgcctgtgtcgtctctgtcgccgtccccgtctcctgccaggcgcggagccctgcgagccgcgggtgggccccaggcgcgcagacatgggctgctccgccaaagcgcgctgggctgccggggcgctgggcgtcgcggggctactgtgcgctgtgctgggcgctgtcatgatcgtgatggtgccgtcgctcatcaagcagcaggtccttaagaacgtgcgcatcgaccccagtagcctgtccttcaacatgtggaaggagatccctatccccttctatctctccgtctacttctttgacgtcatgaaccccagcgagatcctgaagggcgagaagccgcaggtgcgggagcgcgggccctacgtgtacagggagttcaggcacaaaagcaacatcaccttcaacaacaacgacaccgtgtccttcctcgagtaccgcaccttccagttccagccctccaagtcccacggctcggagagcgactacatcgtcatgcccaacatcctggtcttgggtgcggcggtgatgatggagaataagcccatgaccctgaagctcatcatgaccttggcattcaccaccctcggcgaacgtgccttcatgaaccgcactgtgggtgagatcatgtggggctacaaggacccccttgtgaatctcatcaacaagtactttccaggcatgttccccttcaaggacaagttcggattatttgctgagctcaacaactccgactctgggctcttcacggtgttcacgggggtccagaacatcagcaggatccacctcgtggacaagtggaacgggctgagcaaggttgacttctggcattccgatcagtgcaacatgatcaatggaacttctgggcaaatgtggccgcccttcatgactcctgagtcctcgctggagttctacagcccggaggcctgccgatccatgaagctaatgtacaaggagtcaggggtgtttgaaggcatccccacctatcgcttcgtggctcccaaaaccctgtttgccaacgggtccatctacccacccaacgaaggcttctgcccgtgcctggagtctggaattcagaacgtcagcacctgcaggttcagtgcccccttgtttctctcccatcctcacttcctcaacgccgacccggttctggcagaagcggtgactggcctgcaccctaaccaggaggcacactccttgttcctggacatccacccggtcacgggaatccccatgaactgctctgtgaaactgcagctgagcctctacatgaaatctgtcgcaggcattggacaaactgggaagattgagcctgtggtcctgccgctgctctggtttgcagagagcggggccatggagggggagactcttcacacattctacactcagctggtgttgatgcccaaggtgatgcactatgcccagtacgtcctcctggcgctgggctgcgtcctgctgctggtccctgtcatctgccaaatccggagccaagtaggtgctggccagagggcagcccgggctgacagccattcgcttttcctccagcctaaactgacatcatcctatggactgagccggccactctctggccgaagtggccgcaggctgtgcccccgagctgcccccaccccctcacagggtccctcagattataggtgcccaggctgaggtgaagaggcctgggggccctgccttccgggcgctcctggaccctggggcaaacctgtgacccttttctactggaatagaaatgagttttatcatctttgaaaaataattcactcttgaagtaataaacgtttaaaaaaatggga

SEQ ID NO: 310146 - DNA, 2310 bp, Homo sapiens
gctcaggccccgcccctgccgccggaatcctgaagcccaaggctgcccgggggcggtccggcggcgccggcgatggggcataaaaccactggccacctgccgggctgctcctgcgtgcgctgccgtccccggatccaccgtgcctctgcggcctgcgtgcccggagtccccgcctgtgtcgtctctgtcgccgtccccgtctcctgccaggcgcggagccctgcgagccgcgggtgggccccaggcgcgcagacatgggctgctccgccaaagcgcgctgggctgccggggcgctgggcgtcgcggggctactgtgcgctgtgctgggcgctgtcatgatcgtgatggtgccgtcgctcatcaagcagcaggtccttaagaacgtgcgcatcgaccccagtagcctgtccttcaacatgtggaaggagatccctatccccttctatctctccgtctacttctttgacgtcatgaaccccagcgagatcctgaagggcgagaagccgcaggtgcgggagcgcgggccctacgtgtacagggagttcaggcacaaaagcaacatcaccttcaacaacaacgacaccgtgtccttcctcgagtaccgcaccttccagttccagccctccaagtcccacggctcggagagcgactacatcgtcatgcccaacatcctggtcttgggtgcggcggtgatgatggagaataagcccatgaccctgaagctcatcatgaccttggcattcaccaccctcggcgaacgtgccttcatgaaccgcactgtgggtgagatcatgtggggctacaaggacccccttgtgaatctcatcaacaagtactttccaggcatgttccccttcaaggacaagttcggattatttgctgagctcaacaactccgactctgggctcttcacggtgttcacgggggtccagaacatcagcaggatccacctcgtggacaagtggaacgggctgagcaaggttgacttctggcattccgatcagtgcaacatgatcaatggaacttctgggcaaatgtggccgcccttcatgactcctgagtcctcgctggagttctacagcccggaggcctgccgatccatgaagctaatgtacaaggagtcaggggtgtttgaaggcatccccacctatcgcttcgtggctcccaaaaccctgtttgccaacgggtccatctacccacccaacgaaggcttctgcccgtgcctggagtctggaattcagaacgtcagcacctgcaggttcagtgcccccttgtttctctcccatcctcacttcctcaacgccgacccggttctggcagaagcggtgactggcctgcaccctaaccaggaggcacactccttgttcctggacatccacccggtcacgggaatccccatgaactgctctgtgaaactgcagctgagcctctacatgaaatctgtcgcaggcattggacaaactgggaagattgagcctgtggtcctgccgctgctctggtttgcagagagcggggccatggagggggagactcttcacacattctacactcagctggtgttgatgcccaaggtgatgcactatgcccagtacgtcctcctggcgctgggctgcgtcctgctgctggtccctgtcatctgccaaatccggagccaagagaaatgctatttattttggagtagtagtaaaaagggctcaaaggataaggaggccattcaggcctattctgaatccctgatgacatcagctcccaagggctctgtgctgcaggaagcaaaactgtaggtgggtaccaggtaatgccgtgcgcctccccgccccctcccatatcaagtagaatgctggcggcttaaaacatttggggtcctgctcattccttcagcctcaacttcacctggagtgtctacagactgaagatgcatatttgtgtattttgcttttggagaaactgcccttcctatgttctgagtgaatagcagtttttttgatcccagagggcaacttgtattctgtgggctggtgcctatttgcaaggtcacattagaaagacaggagcaaggcttaggcctgctgcttctggaatctcttgtgcaatagactcccctggggaagtctgctagaaatgcagatccctgggcagccttctagccttctggaataggatcatggtgggaccctggaatctgtattttaatggaccctaatgagattctgatgtagaaacatgtttgagaggcaaagttctgggattacaggtgtgagccactgtgcctggccggccttatcagtttttatgtaatttgtcctgatt

SEQ ID NO: 310147 - DNA, 2379 bp, Homo sapiens
gctcaggccccgcccctgccgccggaatcctgaagcccaaggctgcccgggggcggtccggcggcgccggcgatggggcataaaaccactggccacctgccgggctgctcctgcgtgcgctgccgtccccggatccaccgtgcctctgcggcctgcgtgcccggagtccccgcctgtgtcgtctctgtcgccgtccccgtctcctgccaggcgcggagccctgcgagccgcgggtgggccccaggcgcgcagacatgggctgctccgccaaagcgcgctgggctgccggggcgctgggcgtcgcggggctactgtgcgctgtgctgggcgctgtcatgatcgtgatggtgccgtcgctcatcaagcagcaggtccttaagaacgtgcgcatcgaccccagtagcctgtccttcaacatgtggaaggagatccctatccccttctatctctccgtctacttctttgacgtcatgaaccccagcgagatcctgaagggcgagaagccgcaggtgcgggagcgcgggccctacgtgtacagggagttcaggcacaaaagcaacatcaccttcaacaacaacgacaccgtgtccttcctcgagtaccgcaccttccagttccagccctccaagtcccacggctcggagagcgactacatcgtcatgcccaacatcctggtcttgggtgcggcggtgatgatggagaataagcccatgaccctgaagctcatcatgaccttggcattcaccaccctcggcgaacgtgccttcatgaaccgcactgtgggtgagatcatgtggggctacaaggacccccttgtgaatctcatcaacaagtactttccaggcatgttccccttcaaggacaagttcggattatttgctgagctcaacaactccgactctgggctcttcacggtgttcacgggggtccagaacatcagcaggatccacctcgtggacaagtggaacgggctgagcaaggttgacttctggcattccgatcagtgcaacatgatcaatggaacttctgggcaaatgtggccgcccttcatgactcctgagtcctcgctggagttctacagcccggaggcctgccgatccatgaagctaatgtacaaggagtcaggggtgtttgaaggcatccccacctatcgcttcgtggctcccaaaaccctgtttgccaacgggtccatctacccacccaacgaaggcttctgcccgtgcctggagtctggaattcagaacgtcagcacctgcaggttcagtgcccccttgtttctctcccatcctcacttcctcaacgccgacccggttctggcagaagcggtgactggcctgcaccctaaccaggaggcacactccttgttcctggacatccacccggtcacgggaatccccatgaactgctctgtgaaactgcagctgagcctctacatgaaatctgtcgcaggcattggacaaactgggaagattgagcctgtggtcctgccgctgctctggtttgcagagagcggggccatggagggggagactcttcacacattctacactcagctggtgttgatgcccaaggtgatgcactatgcccagtacgtcctcctggcgctgggctgcgtcctgctgctggtccctgtcatctgccaaatccggagccaagagaaatgctatttattttggagtagtagtaaaaagggctcaaaggataaggaggccattcaggcctattctgaatccctgatgacatcagctcccaagggctctgtgctgcaggaagcaaaactgtaggtgggtaccaggtaatgccgtgcgcctccccgccccctcccatatcaagtagaatgctggcggcttaaaacatttggggtcctgctcattccttcagcctcaacttcacctggagtgtctacagactgaagatgcatatttgtgtattttgcttttggagaaactgcccttcctatgttctgagtgaatagcagtttttttgatcccagagggcaacttgtattctgtgggctggtgcctatttgcaaggtcacattagaaagacaggagcaaggcttaggcctgctgcttctggaatctcttgtgcaatagactcccctggggaagtctgctagaaatgcagatccctgggcagccttctagccttctggaataggatcatggtgggaccctggaatctgtattttaatggaccctaatgagattctgatgtagaaacatgtttgagaggcattgatctaaatctgggatgactggccaggtgcggtggctcacacctgtaatccagcactttgggaggccgaagcaggtggatcatttgaggtcaggagttcaagaccagcctggccaacatggtgaaaacctgtctctacta

SEQ ID NO: 310148 - DNA, 2166 bp, Homo sapiens
gccttatcagtttttatgtaatttgtcctgatttaaaaaaaaaaaaatcacatgcgggtaaactcaacatattttaatttctctttagagaaattttccacttgagccaggtatggtggctcttgcctgtggtctgagctgctcgggaggttgaggtgggaggatcactgcaacctccacctcccgggttcaagtgggagcctcagcctcagcctcagcctcagcctcccgagcagttgggattacaggcacctgccaccatgcctggctaatttttgtatattgagtagaggcggggtttcaccatgttggccaggctggtcttgaactcctgacctcatgatctgccgccttggcctcccaaagttctgggattacaggtgtgagccactgtgcctggccggccttatcagtttttatgtaatttgtcctgatttaaaaaaaaaaaatcacatgcgggtaaactcaacatattttaatttctctttagagaaattttccacttgagccaggtatggtggctcttgcctgtaatctgagctactcgggaggttgaggtgggaggatcacttgagcccaggagttggaggctgcagtgagccatgatcgcaccattgcactccagcctggacaacagagtgagatcctgtctcaaaaattaaaaaaagcagtaattttttcttctcaagtcattcttttaaaataaatcaaaagtattttaacagaacaatctgttcctcgttgattttaaacagccccccagctaagtccactggttgtcggtctccatggcccatctccccaccttgcttcctcgctggcttaaattttcaagtggacgagcccttttcagcttggcttgtccacctcccaggtgtgtttcctgaagatgcttgtacttatgtctaagagcggcagctccccacatctcagccacctgcaatcgttgagggttgttggactctaaacttatgtgcctttcctgtttcctctttgccttttgcaaattgaagaaccgtgtaaaaccatttttatgtggcttcaacgtcaactataaattagcttggttatcttctaggagaaatgctatttattttggagtagtagtaaaaagggctcaaaggataaggaggccattcaggcctattctgaatccctgatgacatcagctcccaagggctctgtgctgcaggaagcaaaactgtagggtcctgaggacaccgtgagccagccaggcctggccgctgggcctgaccggccccccagcccctacaccccgcttctcccggactctcccagcggacagccccccagccccacagcctgagcctcccagctgccatgtgcctgttgcacacctgcacacacgccctggcacacatacacacatgcgtgcaggcttgtgcagacactcagggatggagctgctgctgaagggacttgtagggagaggctcgtcaacaagcactgttctggaaccttctctccacgtggcccacaggcctgaccacaggggctgtgggtcctgcgtccccttcctcgggtgagcctggcctgtcccgttcagccgttgggcccaggcttcctcccctccaaggtgaaacactgcagtcccggtgtggtggctccccatgcaggacgggccaggctgggagtgccgccttcctgtgccaaattcagtggggactcagtgcccaggccctggccacgagctttggccttggtctacctgccaggccaggcaaagcgcctttacacaggcctcggaaaacaatggagtgagcacaagatgccctgtgcagctgcccgagggtctccgcccaccccggccggactttgatccccccgaagtcttcacaggcactgcatcgggttgtctggcgcccttttcctccagcctaaactgacatcatcctatggactgagccggccactctctggccgaagtggccgcaggctgtgcccccgagctgcccccaccccctcacagggtccctcagattataggtgcccaggctgaggtgaagaggcctgggggccctgccttccgggcgctcctggaccctggggcaaacctgtgacccttttctactggaatagaaatgagttttatcatctttgaaaaataattcactcttgaagtaataaacgtttaaaaaaatggga

SEQ ID NO: 310149 - DNA, 2049 bp, Homo sapiens
acttgtattctgtggctggtgcctatttgcaaggtcacattagaaagacaggagcaaggcttaggcctgctgcttctggaatctcttgtgcaatagactcccctggggaagtctgctagaaatgcagatccctgggcagccttctagccttctggaataggatcatggtgggaccctggaatctgtattttaatggaccctaatgagattctgatgtagaaacatgtttgagaggcattactcccaaagttctgggattacaggtgtgagccactgtgcctggccggccttatcagtttttatgtaatttgtcctgatttaaaaaaaaaaaatcacatgcgggtaaactcaacatattttaatttctctttagagaaattttccacttgagccaggtatggtggctcttgcctgtaatctgagctactcgggaggttgaggtgggaggatcacttgagcccaggagttggaggctgcagtgagccatgatcgcaccattgcactccagcctggacaacagagtgagatcctgtctcaaaaattaaaaaaagcagtaattttttcttctcaagtcattcttttaaaataaatcaaaagtattttaacagaacaatctgttcctcgttgattttaaacagccccccagctaagtccactggttgtcggtctccatggcccatctccccaccttgcttcctcgctggcttaaattttcaagtggacgagcccttttcagcttggcttgtccacctcccaggtgtgtttcctgaagatgcttgtacttatgtctaagagcggcagctccccacatctcagccacctgcaatcgttgagggttgttggactctaaacttatgtgcctttcctgtttcctctttgccttttgcaaattgaagaaccgtgtaaaaccatttttatgtggcttcaacgtcaactataaattagcttggttatcttctaggagaaatgctatttattttggagtagtagtaaaaagggctcaaaggataaggaggccattcaggcctattctgaatccctgatgacatcagctcccaagggctctgtgctgcaggaagcaaaactgtagggtcctgaggacaccgtgagccagccaggcctggccgctgggcctgaccggccccccagcccctacaccccgcttctcccggactctcccagcggacagccccccagccccacagcctgagcctcccagctgccatgtgcctgttgcacacctgcacacacgccctggcacacatacacacatgcgtgcaggcttgtgcagacactcagggatggagctgctgctgaagggacttgtagggagaggctcgtcaacaagcactgttctggaaccttctctccacgtggcccacaggcctgaccacaggggctgtgggtcctgcgtccccttcctcgggtgagcctggcctgtcccgttcagccgttgggcccaggcttcctcccctccaaggtgaaacactgcagtcccggtgtggtggctccccatgcaggacgggccaggctgggagtgccgccttcctgtgccaaattcagtggggactcagtgcccaggccctggccacgagctttggccttggtctacctgccaggccaggcaaagcgcctttacacaggcctcggaaaacaatggagtgagcacaagatgccctgtgcagctgcccgagggtctccgcccaccccggccggactttgatccccccgaagtcttcacaggcactgcatcgggttgtctggcgcccttttcctccagcctaaactgacatcatcctatggactgagccggccactctctggccgaagtggccgcaggctgtgcccccgagctgcccccaccccctcacagggtccctcagattataggtgcccaggctgaggtgaagaggcctgggggccctgccttccgggcgctcctggaccctggggcaaacctgtgacccttttctactggaatagaaatgagttttatcatctttgaaaaataattcactcttgaagtaataaacgtttaaaaaaatggga

SEQ ID NO: 310150 - DNA, 982 bp, Homo sapiens
cccagctttgcctttctccacagggtcctgaggacaccgtgagccagccaggcctggccgctgggcctgaccggccccccagcccctacaccccgcttctcccggactctcccagcggacagccccccagccccacagcctgagcctcccagctgccatgtgcctgttgcacacctgcacacacgccctggcacacatacacacatgcgtgcaggcttgtgcagacactcagggatggagctgctgctgaagggacttgtagggagaggctcgtcaacaagcactgttctggaaccttctctccacgtggcccacaggcctgaccacaggggctgtgggtcctgcgtccccttcctcgggtgagcctggcctgtcccgttcagccgttgggcccaggcttcctcccctccaaggtgaaacactgcagtcccggtgtggtggctccccatgcaggacgggccaggctgggagtgccgccttcctgtgccaaattcagtggggactcagtgcccaggccctggccacgagctttggccttggtctacctgccaggccaggcaaagcgcctttacacaggcctcggaaaacaatggagtgagcacaagatgccctgtgcagctgcccgagggtctccgcccaccccggccggactttgatccccccgaagtcttcacaggcactgcatcgggttgtctggcgcccttttcctccagcctaaactgacatcatcctatggactgagccggccactctctggccgaagtggccgcaggctgtgcccccgagctgcccccaccccctcacagggtccctcagattataggtgcccaggctgaggtgaagaggcctgggggccctgccttccgggcgctcctggaccctggggcaaacctgtgacccttttctactggaatagaaatgagttttatcatctttgaaaaataattcactcttgaagtaataaacgtttaaaaaaatggga

SEQ ID NO: 310151 - DNA, 1748 bp, Homo sapiens
gccttatcagtttttatgtaatttgtcctgatttaaaaaaaaaaaaatcacatgcgggtaaactcaacatattttaatttctctttagagaaattttccacttgagccaggtatggtggctcttgcctgtggtctgagctgctcgggaggttgaggtgggaggatcactgcaacctccacctcccgggttcaagtgggagcctcagcctcagcctcagcctcagcctcccgagcagttgggattacaggcacctgccaccatgcctggctaatttttgtatattgagtagaggcggggtttcaccatgttggccaggctggtcttgaactcctgacctcatgatctgccgccttggcctcccaaagttctgggattacaggtgtgagccactgtgcctggccggccttatcagtttttatgtaatttgtcctgatttaaaaaaaaaaaatcacatgcgggtaaactcaacatattttaatttctctttagagaaattttccacttgagccaggtatggtggctcttgcctgtaatctgagctactcgggaggttgaggtgggaggatcacttgagcccaggagttggaggctgcagtgagccatgatcgcaccattgcactccagcctggacaacagagtgagatcctgtctcaaaaattaaaaaaagcagtaattttttcttctcaagtcattcttttaaaataaatcaaaagtattttaacagaacaatctgttcctcgttgattttaaacagccccccagctaagtccactggttgtcggtctccatggcccatctccccaccttgcttcctcgctggcttaaattttcaagtggacgagcccttttcagcttggcttgtccacctcccaggtgtgtttcctgaagatgcttgtacttatgtctaagagcggcagctccccacatctcagccacctgcaatcgttgagggttgttggactctaaacttatgtgcctttcctgtttcctctttgccttttgcaaattgaagaaccgtgtaaaaccatttttatgtggcttcaacgtcaactataaattagcttggttatcttctaggagaaatgctatttattttggagtagtagtaaaaagggctcaaaggataaggaggccattcaggcctattctgaatccctgatgacatcagctcccaagggctctgtgctgcaggaagcaaaactgtaggtgggtaccaggtaatgccgtgcgcctccccgccccctcccatatcaagtagaatgctggcggcttaaagactgaagatgcatatttgtgtattttgcttttggagaaactgcccttcctatgttctgagtgaatagcagtttttttgatcccagagggcaacttgtattctgtgggctggtgcctatttgcaaggtcacattagaaagacaggagcaaggcttaggcctgctgcttctggaatctcttgtgcaatagactcccctggggaagtctgctagaaatgcagatccctgggcagccttctagccttctggaataggatcatggtgggaccctggaatctgtattttaatggaccctaatgagattctgatgtagaaacatgtttgagaggcattgatctaaatctgggatgactggccaggtgcggtggctcacacctgtaatccagcactttgggaggccgaagcaggtggatcatttgaggtcaggagttcaagaccagcctggccaacatggtgaaaacctgtctctacta

SEQ ID NO: 310152 - DNA, 541 bp, Homo sapiens
ttcattttgagtttaaaattttgttttatgaaatggaaagtgataatactcttggtgggcttataaattgggaagagttttggattacccctgaaacgtctctggaagcttctgttaaccctcttttttttttttttaaagtcagacaatggtatataacttttaactctcgataggaactaattctgaagcatcaaatgcttctgaaacagaatctgaccacagagacgaactcagtgattggtcattagctccaacagaggaagagagggagagcttcctgcgcagaggagacggacggcggcgtggagggggaggaagaggacaaggaggaagaggacgtggaggaggcttcaaaggaaacgacgatcactcccgaacagataatcgtccacgtaatccaagagaggctaaaggaagaacaacagatggatcccttcaggtaaaacctgtctgcctcttttcatcttaattgtttgaatatggtagtttgagatttatgagtttattttactttattaaaaacatgttcaaagattac

SEQ ID NO: 310153 - DNA, 4055 bp, Homo sapiens
cgctagcagggctgaagagaagatggaggagctggtggtggaagtgcggggctccaatggcgctttctacaaggcatttgtaaaggatgttcatgaagattcaataacagttgcatttgaaaacaactggcagcctgataggcagattccatttcatgatgtcagattcccacctcctgtaggttataataaagatataaatgaaagtgatgaagttgaggtgtattccagagcaaatgaaaaagagccttgctgttggtggttagctaaagtgaggatgataaagggtgagttttatgtgatagaatatgcagcatgtgatgcaacttacaatgaaattgtcacaattgaacgtctaagatctgttaatcccaacaaacctgccacaaaagatactttccataagatcaagctggatgtgccagaagacttacggcaaatgtgtgccaaagaggcggcacataaggattttaaaaaggcagttggtgccttttctgtaacttatgatccagaaaattatcagcttgtcattttgtccatcaatgaagtcacctcaaagcgagcacatatgctgattgacatgcactttcggagtctgcgcactaagttgtctctgataatgagaaatgaagaagctagtaagcagctggagagttcaaggcagcttgcctcgagatttcatgaacagtttatcgtaagagaagatctgatgggtctagctattggtactcatggtgctaatattcagcaagctagaaaagtacctggggtcactgctattgatctagatgaagatacctgcacatttcatatttatggagaggatcaggatgcagtgaaaaaagctagaagctttctcgaatttgctgaagatgtaatacaagttccaaggaacttagtaggcaaagtaataggaaaaaatggaaagctgattcaggagattgtggacaagtcaggagttgtgagggtgaggattgaggctgaaaatgagaaaaatgttccacaagaagaggaaattatgccaccaaattcccttccttccaataattcaagggttggacctaatgccccagaagaaaaaaaacatttagatataaaggaaaacagcacccatttttctcaacctaacagtacaaaagtccagaggggtatggtaccatttgtttttgtgggaacaaaggacagcatcgctaatgccactgttcttttggattatcacctgaactatttaaaggaagtagaccagttgcgtttggagagattacaaattgatgagcagttgcgacagattggagctagttctagaccaccaccaaatcgtacagataaggaaaaaagctatgtgactgatgatggtcaaggaatgggtcgaggtagtagaccttacagaaatagggggcacggcagacgcggtcctggatatacttcagaatctgaccacagagacgaactcagtgattggtcattagctccaacagaggaagagagggagagcttcctgcgcagaggagacggacggcggcgtggagggggaggaagaggacaaggaggaagaggacgtggaggaggcttcaaaggaaacgacgatcactcccgaacagataatcgtccacgtaatccaagagaggctaaaggaagaacaacagatggatcccttcagaatacctccagtgaaggtagtcggctgcgcacgggtaaagatcgtaaccagaagaaagagaagccagacagcgtggatggtcagcaaccactcgtgaatggagtaccctaaactgcataattctgaagttatatttcctataccatttccgtaattcttattccatattagaaaactttgttaggccaaagacaaatagtaggcaagatggcacagggcatgaaatgaacacaaattatgctaagaattttttattttttggtattggccataagcaacaattttcagatttgcacaaaaagataccttaaaatttgaaacattgcttttaaaactacttagcacttcagggcagattttagttttattttctaaagtactgagcagtgatattctttgttaatttggaccattttcctgcattgggtgatcattcaccagtacattctcagtttttcttaatatatagcatttatggtaatcatattagacttctgttttcaatctcgtatagaagtcttcatgaaatgctatgtcatttcatgtcctgtgtcagtttatgttttggtccacttttccagtattttagtggaccctgaaatgtgtgtgatgtgacatttgtcattttcattagcaaaaaaagttgtatgatctgtgccttttttatatcttggcaggtaggaatattatatttggatgcagagttcagggaagataagttggaaacactaaatgttaaagatgtagcaaaccctgtcaaacattagtactttatagaagaatgcatgctttccatatttttttccttacataaacatcaggttaggcagtataaagaataggacttgtttttgtttttgttttgttgcactgaagtttgataaatagtgttattgagagagatgtgtaatttttctgtatagacaggagaagaaagaactatcttcatctgagagaggctaaaatgttttcagctaggaacaaatcttcctggtcgaaagttagtaggatatgcctgctctttggcctgatgaccaattttaacttagagctttttttttttaattttgtctgccccaagttttgtgaaatttttcatattttaatttcaagcttattttggagagataggaaggtcatttccatgtatgcataataatcctgcaaagtacaggtactttgtctaagaaacattggaagcaggttaaatgttttgtaaactttgaaatatatggtctaatgtttaagcagaattggaaaagactaagatcggttaacaaataacaacttttttttctttttttcttttgttttttgaagtgttggggtttggttttgttttttgagtcttttttttttaagtgaaatttattgaggaaaaatatgtgaaggaccttcactctaagatgttatatttttcttaaaaagtaactcctagtaggggtaccactgaatctgtacagagccgtaaaaactgaagttctgcctctgatgtattttgtgagtttgtttctttgaattttcattttacagttacttttccttgcatacaaacaagcatataaaatggcaacaaactgcacatgatttcacaaatattaaaaagtcttttaaaaagtattgccaaacattaatgttgatttctagttatttattctgggaatgtatagtatttgaaaacagaaattggtaccttgcacacatcatctgtaagctgtttggttttaaaatactgtagataattaaccaaggtagaatgaccttgtaatgtaactgctcttgggcaatattctctgtacatattagcgacaacagattggattttatgttgacatttgtttggttatagtgcaatatattttgtatgcaagcagtttcaataaagtttgatcttcctctgctaaattgatgttgatgcaatccttacaaatgattgcttttaaaattttaagctaggaaaagaaatctatagaaagtgttctgttacaaaatgtaactgttaccattggaaatttcacgtcataggaagttagcctttatctaccaactttcaagaacttgtttaataaagcgaaaaactcaaccaaatggtacaaaaccacagtgtaccattaaaatatgcactaagtctcttttttacaaaggctgtattcagcaaggcgctaacttgcttaaatgtgaattactaacttctaaaactgtactttgattcacatgttttcaaatggagttggagttcattcatattacaatatttgtgtgctaaacgtgtatgtttttcagttcaaagtcatgatgtttttaaaatcttattaaagtttcaaaaatctgaagattgtttatctagatgtaaatttttattaaaaagttgcacttatgaaaaagcaaaaaaaaa

SEQ ID NO: 310154 - DNA, 4091 bp, Homo sapiens
cgctagcagggctgaagagaagatggaggagctggtggtggaagtgcggggctccaatggcgctttctacaaggcatttgtaaaggatgttcatgaagattcaataacagttgcatttgaaaacaactggcagcctgataggcagattccatttcatgatgtcagattcccacctcctgtaggttataataaagatataaatgaaagtgatgaagttgaggtgtattccagagcaaatgaaaaagagccttgctgttggtggttagctaaagtgaggatgataaagggtgagttttatgtgatagaatatgcagcatgtgatgcaacttacaatgaaattgtcacaattgaacgtctaagatctgttaatcccaacaaacctgccacaaaagatactttccataagatcaagctggatgtgccagaagacttacggcaaatgtgtgccaaagaggcggcacataaggattttaaaaaggcagttggtgccttttctgtaacttatgatccagaaaattatcagcttgtcattttgtccatcaatgaagtcacctcaaagcgagcacatatgctgattgacatgcactttcggagtctgcgcactaagttgtctctgataatgagaaatgaagaagctagtaagcagctggagagttcaaggcagcttgcctcgagatttcatgaacagtttatcgtaagagaagatctgatgggtctagctattggtactcatggtgctaatattcagcaagctagaaaagtacctggggtcactgctattgatctagatgaagatacctgcacatttcatatttatggagaggatcaggatgcagtgaaaaaagctagaagctttctcgaatttgctgaagatgtaatacaagttccaaggaacttagtaggcaaagtaataggaaaaaatggaaagctgattcaggagattgtggacaagtcaggagttgtgagggtgaggattgaggctgaaaatgagaaaaatgttccacaagaagaggaaattatgccaccaaattcccttccttccaataattcaagggttggacctaatgccccagaagaaaaaaaacatttagatataaaggaaaacagcacccatttttctcaacctaacagtacaaaagtccagaggggtatggtaccatttgtttttgtgggaacaaaggacagcatcgctaatgccactgttcttttggattatcacctgaactatttaaaggaagtagaccagttgcgtttggagagattacaaattgatgagcagttgcgacagattggagctagttctagaccaccaccaaatcgtacagataaggaaaaaagctatgtgactgatgatggtcaaggaatgggtcgaggtagtagaccttacagaaatagggggcacggcagacgcggtcctggatatacttcaggaactaattctgaagcatcaaatgcttctgaaacagaatctgaccacagagacgaactcagtgattggtcattagctccaacagaggaagagagggagagcttcctgcgcagaggagacggacggcggcgtggagggggaggaagaggacaaggaggaagaggacgtggaggaggcttcaaaggaaacgacgatcactcccgaacagataatcgtccacgtaatccaagagaggctaaaggaagaacaacagatggatcccttcagaatacctccagtgaaggtagtcggctgcgcacgggtaaagatcgtaaccagaagaaagagaagccagacagcgtggatggtcagcaaccactcgtgaatggagtaccctaaactgcataattctgaagttatatttcctataccatttccgtaattcttattccatattagaaaactttgttaggccaaagacaaatagtaggcaagatggcacagggcatgaaatgaacacaaattatgctaagaattttttattttttggtattggccataagcaacaattttcagatttgcacaaaaagataccttaaaatttgaaacattgcttttaaaactacttagcacttcagggcagattttagttttattttctaaagtactgagcagtgatattctttgttaatttggaccattttcctgcattgggtgatcattcaccagtacattctcagtttttcttaatatatagcatttatggtaatcatattagacttctgttttcaatctcgtatagaagtcttcatgaaatgctatgtcatttcatgtcctgtgtcagtttatgttttggtccacttttccagtattttagtggaccctgaaatgtgtgtgatgtgacatttgtcattttcattagcaaaaaaagttgtatgatctgtgccttttttatatcttggcaggtaggaatattatatttggatgcagagttcagggaagataagttggaaacactaaatgttaaagatgtagcaaaccctgtcaaacattagtactttatagaagaatgcatgctttccatatttttttccttacataaacatcaggttaggcagtataaagaataggacttgtttttgtttttgttttgttgcactgaagtttgataaatagtgttattgagagagatgtgtaatttttctgtatagacaggagaagaaagaactatcttcatctgagagaggctaaaatgttttcagctaggaacaaatcttcctggtcgaaagttagtaggatatgcctgctctttggcctgatgaccaattttaacttagagctttttttttttaattttgtctgccccaagttttgtgaaatttttcatattttaatttcaagcttattttggagagataggaaggtcatttccatgtatgcataataatcctgcaaagtacaggtactttgtctaagaaacattggaagcaggttaaatgttttgtaaactttgaaatatatggtctaatgtttaagcagaattggaaaagactaagatcggttaacaaataacaacttttttttctttttttcttttgttttttgaagtgttggggtttggttttgttttttgagtcttttttttttaagtgaaatttattgaggaaaaatatgtgaaggaccttcactctaagatgttatatttttcttaaaaagtaactcctagtaggggtaccactgaatctgtacagagccgtaaaaactgaagttctgcctctgatgtattttgtgagtttgtttctttgaattttcattttacagttacttttccttgcatacaaacaagcatataaaatggcaacaaactgcacatgatttcacaaatattaaaaagtcttttaaaaagtattgccaaacattaatgttgatttctagttatttattctgggaatgtatagtatttgaaaacagaaattggtaccttgcacacatcatctgtaagctgtttggttttaaaatactgtagataattaaccaaggtagaatgaccttgtaatgtaactgctcttgggcaatattctctgtacatattagcgacaacagattggattttatgttgacatttgtttggttatagtgcaatatattttgtatgcaagcagtttcaataaagtttgatcttcctctgctaaattgatgttgatgcaatccttacaaatgattgcttttaaaattttaagctaggaaaagaaatctatagaaagtgttctgttacaaaatgtaactgttaccattggaaatttcacgtcataggaagttagcctttatctaccaactttcaagaacttgtttaataaagcgaaaaactcaaccaaatggtacaaaaccacagtgtaccattaaaatatgcactaagtctcttttttacaaaggctgtattcagcaaggcgctaacttgcttaaatgtgaattactaacttctaaaactgtactttgattcacatgttttcaaatggagttggagttcattcatattacaatatttgtgtgctaaacgtgtatgtttttcagttcaaagtcatgatgtttttaaaatcttattaaagtttcaaaaatctgaagattgtttatctagatgtaaatttttattaaaaagttgcacttatgaaaaagcaaaaaaaaa

SEQ ID NO: 310155 - DNA, 4106 bp, Homo sapiens
cgctagcagggctgaagagaagatggaggagctggtggtggaagtgcggggctccaatggcgctttctacaaggcatttgtaaaggatgttcatgaagattcaataacagttgcatttgaaaacaactggcagcctgataggcagattccatttcatgatgtcagattcccacctcctgtaggttataataaagatataaatgaaagtgatgaagttgaggtgtattccagagcaaatgaaaaagagccttgctgttggtggttagctaaagtgaggatgataaagggtgagttttatgtgatagaatatgcagcatgtgatgcaacttacaatgaaattgtcacaattgaacgtctaagatctgttaatcccaacaaacctgccacaaaagatactttccataagatcaagctggatgtgccagaagacttacggcaaatgtgtgccaaagaggcggcacataaggattttaaaaaggcagttggtgccttttctgtaacttatgatccagaaaattatcagcttgtcattttgtccatcaatgaagtcacctcaaagcgagcacatatgctgattgacatgcactttcggagtctgcgcactaagttgtctctgataatgagaaatgaagaagctagtaagcagctggagagttcaaggcagcttgcctcgagatttcatgaacagtttatcgtaagagaagatctgatgggtctagctattggtactcatggtgctaatattcagcaagctagaaaagtacctggggtcactgctattgatctagatgaagatacctgcacatttcatatttatggagaggatcaggatgcagtgaaaaaagctagaagctttctcgaatttgctgaagatgtaatacaagttccaaggaacttagtaggcaaagtaataggaaaaaatggaaagctgattcaggagattgtggacaagtcaggagttgtgagggtgaggattgaggctgaaaatgagaaaaatgttccacaagaagaggaaattatgccaccaaattcccttccttccaataattcaagggttggacctaatgccccagaagaaaaaaaacatttagatataaaggaaaacagcacccatttttctcaacctaacagtacaaaagtccagaggggtatggtaccatttgtttttgtgggaacaaaggacagcatcgctaatgccactgttcttttggattatcacctgaactatttaaaggaagtagaccagttgcgtttggagagattacaaattgatgagcagttgcgacagattggagctagttctagaccaccaccaaatcgtacagataaggaaaaaagctatgtgactgatgatggtcaaggaatgggtcgaggtagtagaccttacagaaatagggggcacggcagacgcggtcctggatatacttcagaatctgaccacagagacgaactcagtgattggtcattagctccaacagaggaagagagggagagcttcctgcgcagaggagacggacggcggcgtggagggggaggaagaggacaaggaggaagaggacgtggaggaggcttcaaaggaaacgacgatcactcccgaacagataatcgtccacgtaatccaagagaggctaaaggaagaacaacagatggatcccttcagatcagagttgactgcaataatgaaaggagtgtccacactaaaacattacagaatacctccagtgaaggtagtcggctgcgcacgggtaaagatcgtaaccagaagaaagagaagccagacagcgtggatggtcagcaaccactcgtgaatggagtaccctaaactgcataattctgaagttatatttcctataccatttccgtaattcttattccatattagaaaactttgttaggccaaagacaaatagtaggcaagatggcacagggcatgaaatgaacacaaattatgctaagaattttttattttttggtattggccataagcaacaattttcagatttgcacaaaaagataccttaaaatttgaaacattgcttttaaaactacttagcacttcagggcagattttagttttattttctaaagtactgagcagtgatattctttgttaatttggaccattttcctgcattgggtgatcattcaccagtacattctcagtttttcttaatatatagcatttatggtaatcatattagacttctgttttcaatctcgtatagaagtcttcatgaaatgctatgtcatttcatgtcctgtgtcagtttatgttttggtccacttttccagtattttagtggaccctgaaatgtgtgtgatgtgacatttgtcattttcattagcaaaaaaagttgtatgatctgtgccttttttatatcttggcaggtaggaatattatatttggatgcagagttcagggaagataagttggaaacactaaatgttaaagatgtagcaaaccctgtcaaacattagtactttatagaagaatgcatgctttccatatttttttccttacataaacatcaggttaggcagtataaagaataggacttgtttttgtttttgttttgttgcactgaagtttgataaatagtgttattgagagagatgtgtaatttttctgtatagacaggagaagaaagaactatcttcatctgagagaggctaaaatgttttcagctaggaacaaatcttcctggtcgaaagttagtaggatatgcctgctctttggcctgatgaccaattttaacttagagctttttttttttaattttgtctgccccaagttttgtgaaatttttcatattttaatttcaagcttattttggagagataggaaggtcatttccatgtatgcataataatcctgcaaagtacaggtactttgtctaagaaacattggaagcaggttaaatgttttgtaaactttgaaatatatggtctaatgtttaagcagaattggaaaagactaagatcggttaacaaataacaacttttttttctttttttcttttgttttttgaagtgttggggtttggttttgttttttgagtcttttttttttaagtgaaatttattgaggaaaaatatgtgaaggaccttcactctaagatgttatatttttcttaaaaagtaactcctagtaggggtaccactgaatctgtacagagccgtaaaaactgaagttctgcctctgatgtattttgtgagtttgtttctttgaattttcattttacagttacttttccttgcatacaaacaagcatataaaatggcaacaaactgcacatgatttcacaaatattaaaaagtcttttaaaaagtattgccaaacattaatgttgatttctagttatttattctgggaatgtatagtatttgaaaacagaaattggtaccttgcacacatcatctgtaagctgtttggttttaaaatactgtagataattaaccaaggtagaatgaccttgtaatgtaactgctcttgggcaatattctctgtacatattagcgacaacagattggattttatgttgacatttgtttggttatagtgcaatatattttgtatgcaagcagtttcaataaagtttgatcttcctctgctaaattgatgttgatgcaatccttacaaatgattgcttttaaaattttaagctaggaaaagaaatctatagaaagtgttctgttacaaaatgtaactgttaccattggaaatttcacgtcataggaagttagcctttatctaccaactttcaagaacttgtttaataaagcgaaaaactcaaccaaatggtacaaaaccacagtgtaccattaaaatatgcactaagtctcttttttacaaaggctgtattcagcaaggcgctaacttgcttaaatgtgaattactaacttctaaaactgtactttgattcacatgttttcaaatggagttggagttcattcatattacaatatttgtgtgctaaacgtgtatgtttttcagttcaaagtcatgatgtttttaaaatcttattaaagtttcaaaaatctgaagattgtttatctagatgtaaatttttattaaaaagttgcacttatgaaaaagcaaaaaaaaa

SEQ ID NO: 310156 - DNA, 3942 bp, Homo sapiens
cgctagcagggctgaagagaagatggaggagctggtggtggaagtgcggggctccaatggcgctttctacaaggcatttgtaaaggatgttcatgaagattcaataacagttgcatttgaaaacaactggcagcctgataggcagattccatttcatgatgtcagattcccacctcctgtaggttataataaagatataaatgaaagtgatgaagttgaggtgtattccagagcaaatgaaaaagagccttgctgttggtggttagctaaagtgaggatgataaagggtgagttttatgtgatagaatatgcagcatgtgatgcaacttacaatgaaattgtcacaattgaacgtctaagatctgttaatcccaacaaacctgccacaaaagatactttccataagatcaagctggatgtgccagaagacttacggcaaatgtgtgccaaagaggcggcacataaggattttaaaaaggcagttggtgccttttctgtaacttatgatccagaaaattatcagcttgtcattttgtccatcaatgaagtcacctcaaagcgagcacatatgctgattgacatgcactttcggagtctgcgcactaagttgtctctgataatgagaaatgaagaagctagtaagcagctggagagttcaaggcagcttgcctcgagatttcatgaacagtttatcgtaagagaagatctgatgggtctagctattggtactcatggtgctaatattcagcaagctagaaaagtacctggggtcactgctattgatctagatgaagatacctgcacatttcatatttatggagaggatcaggatgcagtgaaaaaagctagaagctttctcgaatttgctgaagatgtaatacaagttccaaggaacttagtaggcaaagtaataggaaaaaatggaaagctgattcaggagattgtggacaagtcaggagttgtgagggtgaggattgaggctgaaaatgagaaaaatgttccacaagaagaggaaattatgccaccaaattcccttccttccaataattcaagggttggacctaatgccccagaagaaaaaaaacatttagatataaaggaaaacagcacccatttttctcaacctaacagtacaaaagtccagaggggtatggtaccatttgtttttgtgggaacaaaggacagcatcgctaatgccactgttcttttggattatcacctgaactatttaaaggaagtagaccagttgcgtttggagagattacaaattgatgagcagttgcgacagattggagctagttctagaccaccaccaaatcgtacagataaggaaaaaagctatgtgactgatgatggtcaaggaatgggtcgaggtagtagaccttacagaaatagggggcacggcagacgcggtcctggatatacttcagaatctgaccacagagacgaactcagtgattggtcattagctccaacagaggaagagagggagagcttcctgcgcagaggagacggacggcggcgtggagggggaggaagaggacaaggaggaagaggacgtggaggaggcttcaaaggaaacgacgatcactcccgaacagataatcgtccacgtaatccaagagaggctaaaggaagaacaacagatggatcccttcagaatacctccagtgaaggtagtcggctgcgcacgggtaaagatcgtaaccagaagaaagagaagccagacagcgtggatggtcagcaaccactcgtgaatggagtaccctaaactgcataattctgaagttatatttcctataccatttccgtaattcttattccatattagaaaactttgttaggccaaagacaaatagtaggcaagatggcacagggcatgaaatgaacacaaattatgctaagaattttttattttttggtattggccataagcaacaattttcagatttgcacaaaaagataccttaaaatttgaaacattgcttttaaaactacttagcacttcagggcagattttagttttattttctaaagtactgagcagtgatattctttgttaatttggaccattttcctgcattgggtgatcattcaccagtacattctcagtttttcttaatatatagcatttatggtaatcatattagacttctgttttcaatctcgtatagaagtcttcatgaaatgctatgtcatttcatgtcctgtgtcagtttatgttttggtccacttttccagtattttagtggaccctgaaatgtgtgtgatgtgacatttgtcattttcattagcaaaaaaagttgtatgatctgtgccttttttatatcttggcaggtaggaatattatatttggatgcagagttcagggaagataagttggaaacactaaatgttaaagatgtagcaaaccctgtcaaacattagtactttatagaagaatgcatgctttccatatttttttccttacataaacatcaggttaggcagtataaagaataggacttgtttttgtttttgttttgttgcactgaagtttgataaatagtgttattgagagagatgtgtaatttttctgtatagacaggagaagaaagaactatcttcatctgagagaggctaaaatgttttcagctaggaacaaatcttcctggtcgaaagttagtaggatatgcctgctctttggcctgatgaccaattttaacttagagctttttttttttaattttgtctgccccaagttttgtgaaatttttcatattttaatttcaagcttattttggagagataggaaggtcatttccatgtatgcataataatcctgcaaagtacaggtactttgtctaagaaacattggaagcaggttaaatgttttgtaaactttgaaatatatggtctaatgtttaagcagaattggaaaagactaagatcggttaacaaataacaacttttttttctttttttcttttgttttttgaagtgttggggtttggttttgttttttgagtcttttttttttaagtgaaatttattgaggaaaaatatgtgaaggaccttcactctaagatgttatatttttcttaaaaagtaactcctagtaggggtaccactgaatctgtacagagccgtaaaaactgaagttctgcctctgatgtattttgtgagtttgtttctttgaattttcattttacagttacttttccttgcatacaaacaagcatataaaatggcaacaaactgcacatgatttcacaaatattaaaaagtcttttaaaaatactgtagataattaaccaaggtagaatgaccttgtaatgtaactgctcttgggcaatattctctgtacatattagcgacaacagattggattttatgttgacatttgtttggttatagtgcaatatattttgtatgcaagcagtttcaataaagtttgatcttcctctgctaaattgatgttgatgcaatccttacaaatgattgcttttaaaattttaagctaggaaaagaaatctatagaaagtgttctgttacaaaatgtaactgttaccattggaaatttcacgtcataggaagttagcctttatctaccaactttcaagaacttgtttaataaagcgaaaaactcaaccaaatggtacaaaaccacagtgtaccattaaaatatgcactaagtctcttttttacaaaggctgtattcagcaaggcgctaacttgcttaaatgtgaattactaacttctaaaactgtactttgattcacatgttttcaaatggagttggagttcattcatattacaatatttgtgtgctaaacgtgtatgtttttcagttcaaagtcatgatgtttttaaaatcttattaaagtttcaaaaatctgaagattgtttatctagatgtaaatttttattaaaaagttgcacttatgaaaaagcaaaaaaaaa

SEQ ID NO: 310157 - DNA, 3563 bp, Homo sapiens
cgctagcagggctgaagagaagatggaggagctggtggtggaagtgcggggctccaatggcgctttctacaaggcatttgtaaaggatgttcatgaagattcaataacagttgcatttgaaaacaactggcagcctgataggcagattccatttcatgatgtcagattcccacctcctgtaggttataataaagatataaatgaaagtgatgaagttgaggtgtattccagagcaaatgaaaaagagccttgctgttggtggttagctaaagtgaggatgataaagggtgagttttatgtgatagaatatgcagcatgtgatgcaacttacaatgaaattgtcacaattgaacgtctaagatctgttaatcccaacaaacctgccacaaaagatactttccataagatcaagctggatgtgccagaagacttacggcaaatgtgtgccaaagaggcggcacataaggattttaaaaaggcagttggtgccttttctgtaacttatgatccagaaaattatcagcttgtcattttgtccatcaatgaagtcacctcaaagcgagcacatatgctgattgacatgcactttcggagtctgcgcactaagttgtctctgataatgagaaatgaagaagctagtaagcagctggagagttcaaggcagcttgcctcgagatttcatgaacagtttatcgtaagagaagatctgatgggtctagctattggtactcatggtgctaatattcagcaagctagaaaagtacctggggtcactgctattgatctagatgaagatacctgcacatttcatatttatggagaggatcaggatgcagtgaaaaaagctagaagctttctcgaatttgctgaagatgtaatacaagttccaaggaacttagtaggcaaagtaataggaaaaaatggaaagctgattcaggagattgtggacaagtcaggagttgtgagggtgaggattgaggctgaaaatgagaaaaatgttccacaagaagaggaaattatgccaccaaattcccttccttccaataattcaagggttggacctaatgccccagaagaaaaaaaacatttagatataaaggaaaacagcacccatttttctcaacctaacagtacaaaagtccagaggggtatggtaccatttgtttttgtgggaacaaaggacagcatcgctaatgccactgttcttttggattatcacctgaactatttaaaggaagtagaccagttgcgtttggagagattacaaattgatgagcagttgcgacagattggagctagttctagaccaccaccaaatcgtacagataaggaaaaaagctatgtgactgatgatggtcaaggaatgggtcgaggtagtagaccttacagaaatagggggcacggcagacgcggtcctggatatacttcagaatctgaccacagagacgaactcagtgattggtcattagctccaacagaggaagagagggagagcttcctgcgcagaggagacggacggcggcgtggagggggaggaagaggacaaggaggaagaggacgtggaggaggcttcaaaggaaacgacgatcactcccgaacagataatcgtccacgtaatccaagagaggctaaaggaagaacaacagatggatcccttcagaatacctccagtgaaggtagtcggctgcgcacgggtaaagatcgtaaccagaagaaagagaagccagacagcgtggatggtcagcaaccactcgtgaatggagtaccctaaactgcataattctgaagttatatttcctataccatttccgtaattcttattccatattagaaaactttgttaggccaaagacaaatagtaggcaagatggcacagggcatgaaatgaacacaaattatgctaagaattttttattttttggtattggccataagcaacaattttcagatttgcacaaaaagataccttaaaatttgaaacattgcttttaaaactacttagcacttcagggcagattttagttttattttctaaagtactgagcagtgatattctttgttaatttggaccattttcctgcattgggtgatcattcaccagtacattctcagtttttcttaatatatagcatttatggtaatcatattagacttctgttttcaatctcgtatagaagtcttcatgaaatgctatgtcatttcatgtcctgtgtcagtttatgttttggtccacttttccagtattttagtggaccctgaaatgtgtgtgatgtgacatttgtcattttcattagcaaaaaaagttgtatgatctgtgccttttttatatcttggcaggtaggaatattatatttggatgcagagttcagggaagataagttggaaacactaaatgttaaagatgtagcaaaccctgtcaaacattagtactttatagaagaatgcatgctttccatatttttttccttacataaacatcaggttaggcagtataaagaataggacttgtttttgtttttgttttgttgcactgaagtttgataaatagtgttattgagagagatgtgtaatttttctgtatagacaggagaagaaagaactatcttcatctgagagaggctaaaatgttttcagctaggaacaaatcttcctggtcgaaagttagtaggatatgcctgctctttggcctgatgaccaattttaacttagagctttttttttttaattttgtctgccccaagttttgtgaaatttttcatattttaatttcaagcttattttggagagataggaaggtcatttccatgtatgcataataatcctgcaaagtacaggtactttgtctaagaaacattggaagcaggttaaatgttttgtaaactttgaaatatatggtctaatgtttaagcagaattggaaaagactaagatcggttaacaaataacaacttttttttctttttttcttttgttttttgaagtgttggggtttggttttgttttttgagtcttttttttttaagtgaaatttattgaggaaaaatatgtgaaggaccttcactctaagatgttatatttttcttaaaaagtaactcctagtaggggtaccactgaatctgtacagagccgtaaaaactgaagttctgcctctgatgtattttgtgagtttgtttctttgaattttcattttacagttacttttccttgcatacaaacaagcatataaaatggcaacaaactgcacatgatttcacaaatattaaaaagtcttttaaaaagtattgccaaacattaatgttgatttctagttatttattctgggaatgtatagtatttgaaaacagaaattggtaccttgcacacatcatctgtaagctgtttggttttaaaatactgtagataattaaccaaggtagaatgaccttgtaatgtaactgctcttgggcaatattctctgtacatattagcgacaacagattggattttatgttgacatttgtttggttatagtgcaatatattttgtatgcaagcagtttcaataaagtttgatcttcctctgcta

SEQ ID NO: 310158 - DNA, 3450 bp, Homo sapiens
cgctagcagggctgaagagaagatggaggagctggtggtggaagtgcggggctccaatggcgctttctacaaggcatttgtaaaggatgttcatgaagattcaataacagttgcatttgaaaacaactggcagcctgataggcagattccatttcatgatgtcagattcccacctcctgtaggttataataaagatataaatgaaagtgatgaagttgaggtgtattccagagcaaatgaaaaagagccttgctgttggtggttagctaaagtgaggatgataaagggtgagttttatgtgatagaatatgcagcatgtgatgcaacttacaatgaaattgtcacaattgaacgtctaagatctgttaatcccaacaaacctgccacaaaagatactttccataagatcaagctggatgtgccagaagacttacggcaaatgtgtgccaaagaggcggcacataaggattttaaaaaggcagttggtgccttttctgtaacttatgatccagaaaattatcagcttgtcattttgtccatcaatgaagtcacctcaaagcgagcacatatgctgattgacatgcactttcggagtctgcgcactaagttgtctctgataatgagaaatgaagaagctagtaagcagctggagagttcaaggcagcttgcctcgagatttcatgaacagtttatcgtaagagaagatctgatgggtctagctattggtactcatggtgctaatattcagcaagctagaaaagtacctggggtcactgctattgatctagatgaagatacctgcacatttcatatttatggagaggatcaggatgcagtgaaaaaagctagaagctttctcgaatttgctgaagatgtaatacaagttccaaggaacttagtaggcaaagtaataggaaaaaatggaaagctgattcaggagattgtggacaagtcaggagttgtgagggtgaggattgaggctgaaaatgagaaaaatgttccacaagaagaggaaattatgccaccaaattcccttccttccaataattcaagggttggacctaatgccccagaagaaaaaaaacatttagatataaaggaaaacagcacccatttttctcaacctaacagtacaaaagtccagaggggtatggtaccatttgtttttgtgggaacaaaggacagcatcgctaatgccactgttcttttggattatcacctgaactatttaaaggaagtagaccagttgcgtttggagagattacaaattgatgagcagttgcgacagattggagctagttctagaccaccaccaaatcgtacagataaggaaaaaagctatgtgactgatgatggtcaaggaatgggtcgaggtagtagaccttacagaaatagggggcacggcagacgcggtcctggatatacttcagaatctgaccacagagacgaactcagtgattggtcattagctccaacagaggaagagagggagagcttcctgcgcagaggagacggacggcggcgtggagggggaggaagaggacaaggaggaagaggacgtggaggaggcttcaaaggaaacgacgatcactcccgaacagataatcgtccacgtaatccaagagaggctaaaggaagaacaacagatggatcccttcagaatacctccagtgaaggtagtcggctgcgcacgggtaaagatcgtaaccagaagaaagagaagccagacagcgtggatggtcagcaaccactcgtgaatggagtaccctaaactgcataattctgaagttatatttcctataccatttccgtaattcttattccatattagaaaactttgttaggccaaagacaaatagtaggcaagatggcacagggcatgaaatgaacacaaattatgctaagaattttttattttttggtattggccataagcaacaattttcagatttgcacaaaaagataccttaaaatttgaaacattgcttttaaaactacttagcacttcagggcagattttagttttattttctaaagtactgagcagtgatattctttgttaatttggaccattttcctgcattgggtgatcattcaccagtacattctcagtttttcttaatatatagcatttatggtaatcatattagacttctgttttcaatctcgtatagaagtcttcatgaaatgctatgtcatttcatgtcctgtgtcagtttatgttttggtccacttttccagtattttagtggaccctgaaatgtgtgtgatgtgacatttgtcattttcattagcaaaaaaagttgtatgatctgtgccttttttatatcttggcaggtaggaatattatatttggatgcagagttcagggaagataagttggaaacactaaatgttaaagatgtagcaaaccctgtcaaacattagtactttatagaagaatgcatgctttccatatttttttccttacataaacatcaggttaggcagtataaagaataggacttgtttttgtttttgttttgttgcactgaagtttgataaatagtgttattgagagagatgtgtaatttttctgtatagacaggagaagaaagaactatcttcatctgagagaggctaaaatgttttcagctaggaacaaatcttcctggtcgaaagttagtaggatatgcctgctctttggcctgatgaccaattttaacttagagctttttttttttaattttgtctgccccaagttttgtgaaatttttcatattttaatttcaagcttattttggagagataggaaggtcatttccatgtatgcataataatcctgcaaagtacaggtactttgtctaagaaacattggaagcaggttaaatgttttgtaaactttgaaatatatggtctaatgtttaagcagaattggaaaagactaagatcggttaacaaataacaacttttttttctttttttcttttgttttttgaagtgttggggtttggttttgttttttgagtcttttttttttaagtgaaatttattgaggaaaaatatgtgaaggaccttcactctaagatgttatatttttcttaaaaagtaactcctagtaggggtaccactgaatctgtacagagccgtaaaaactgaagttctgcctctgatgtattttgtgagtttgtttctttgaattttcattttacagttacttttccttgcatacaaacaagcatataaaatggcaacaaactgcacatgatttcacaaatattaaaaagtcttttaaaaatactgtagataattaaccaaggtagaatgaccttgtaatgtaactgctcttgggcaatattctctgtacatattagcgacaacagattggattttatgttgacatttgtttggttatagtgcaatatattttgtatgcaagcagtttcaataaagtttgatcttcctctgcta

SEQ ID NO: 310159 - DNA, 1822 bp, Homo sapiens
cgctagcagggctgaagagaagatggaggagctggtggtggaagtgcggggctccaatggcgctttctacaaggcatttgtaaaggatgttcatgaagattcaataacagttgcatttgaaaacaactggcagcctgataggcagattccatttcatgatgtcagattcccacctcctgtaggttataataaagatataaatgaaagtgatgaagttgaggtgtattccagagcaaatgaaaaagagccttgctgttggtggttagctaaagtgaggatgataaagggtgagttttatgtgatagaatatgcagcatgtgatgcaacttacaatgaaattgtcacaattgaacgtctaagatctgttaatcccaacaaacctgccacaaaagatactttccataagatcaagctggatgtgccagaagacttacggcaaatgtgtgccaaagaggcggcacataaggattttaaaaaggcagttggtgccttttctgtaacttatgatccagaaaattatcagcttgtcattttgtccatcaatgaagtcacctcaaagcgagcacatatgctgattgacatgcactttcggagtctgcgcactaagttgtctctgataatgagaaatgaagaagctagtaagcagctggagagttcaaggcagcttgcctcgagatttcatgaacagtttatcgtaagagaagatctgatgggtctagctattggtactcatggtgctaatattcagcaagctagaaaagtacctggggtcactgctattgatctagatgaagatacctgcacatttcatatttatggagaggatcaggatgcagtgaaaaaagctagaagctttctcgaatttgctgaagatgtaatacaagttccaaggaacttagtaggcaaagtaataggaaaaaatggaaagctgattcaggagattgtggacaagtcaggagttgtgagggtgaggattgaggctgaaaatgagaaaaatgttccacaagaagaggaaattatgccaccaaattcccttccttccaataattcaagggttggacctaatgccccagaagaaaaaaaacatttagatataaaggaaaacagcacccatttttctcaacctaacagtacaaaagtccagaggggtatggtaccatttgtttttgtgggaacaaaggacagcatcgctaatgccactgttcttttggattatcacctgaactatttaaaggaagtagaccagttgcgtttggagagattacaaattgatgagcagttgcgacagattggagctagttctagaccaccaccaaatcgtacagataaggaaaaaagctatgtgactgatgatggtcaaggaatgggtcgaggtagtagaccttacagaaatagggggcacggcagacgcggtcctggatatacttcaggaactaattctgaagcatcaaatgcttctgaaacagaatctgaccacagagacgaactcagtgattggtcattagctccaacagaggaagagagggagagcttcctgcgcagaggagacggacggcggcgtggagggggaggaagaggacaaggaggaagaggacgtggaggaggcttcaaaggaaacgacgatcactcccgaacagataatcgtccacgtaatccaagagaggctaaaggaagaacaacagatggatcccttcagaagaagacatgataggattgtgagtttttctctaactttggatgcagtgagatgaccagtgtgttccagttaaagaagaagagtgttttaaaatcataaaccaaataaagaatcctaccttacatt

SEQ ID NO: 310160 - DNA, 2126 bp, Homo sapiens
  misc_feature (22)..(22): n is a, c, g, or t
  misc_feature (75)..(75): n is a, c, g, or t
  misc_feature (714)..(714): n is a, c, g, or t
  misc_feature (1467)..(1467): n is a, c, g, or t
  misc_feature (2119)..(2120): n is a, c, g, or t
  misc_feature (2123)..(2123): n is a, c, g, or t
  misc_feature (2125)..(2126): n is a, c, g, or t
ggtggaccgcgcttaccgctgncctcttggaagacttgagggcgtggcctgtagagccaggtgcgccaagtgacnggcgagctagcggaaagccgcctcagggacttggaggatgtagaagtgggaggagaccgagggtcaacacgaattgtccgtgctcactccaactgccctgttgaggaggattttcaccagctatcaaagcagaggaacataataaaagacaaaaggaaagaaatgtcaccacacaggtatcagcgaacgaaatcaaacaatatttatcacacatattggaacaaagaacatctagtaatgtaatcaataaaagagaaaatctcctggagaaaaagaagaatcaacgtaaaataagaataaaaggaattcaaaataaagatatcttgaagagaaataagaatcatttacaaaagcaagcagagaaaaattttacagatgaaggagaccagctatttaagatgggcatcaaggttctccagcagtctaaaagccaaaaacaaaaagaagaagcctacctactttttgccaaagcagctgacatgggaaacttgaaagctatggagaaaatggctgacgctttgctatttggaaattttggcgtgcaaaatataacagcagctatccaattatatgagtccttggctaaagaaggatcatgtaaagcccaaaacgcattaggatttttgtcttcttatggantaggaatggaatatgatcaagctaaggcactgatatattacacctttggaagtgctggaggaaacatgatgtcccagatgattttggggtacagatatttgtcgggaatcaatgttctacagaattgtgaagttgccctaagttattacaagaaagtggcagattatattgctgacacatttgaaaaaagtgaaggtgttccagtggaaaaagtgagactaacggaaagacctgaaaatctgagttctaacagtgagattttggattgggacatataccaatactataaatttttggcagaaagaggagatgttcagatacaagtctctcttggacaattacatctaattggcaggaaaggtctagatcaggattactacaaagcattacactacttcttaaaggcagcaaaggccgggagtgcaaatgccatggcatttataggaaagatgtatttagaggggaatgctgccgtgccgcaaaataacgctactgccttcaagtacttttccatggcagccagtaagggcaatgcaatcggccttcatgggcttggtcttctttactttcatggaaaaggagttcccctgaattatgccgaagcacttaaatactttcagaaagctgcggaaaaagggtgcccgacgcacattccagttaggcttcatgtactactctggctctggaatatggaaggattataaacttgccttcaaatatttttacctggcatctcagagtgggcagcccctngccatttattatctggccaagatgtatgcaacaggaacaggagtagtaagatcatgcagaactgctgtggagaaaaggctaacattcttgaaaaagagaagatgtatccaatggcgcttctcctatggaatcgagctgccattcaaggcaatgcatttgctagagtaaaaattggagattaccattactatggctatgggactaagaaagactatcaaacagcagccacacactacagcattgcagccaacaaataccacaacgcgcaagccatgttcaatctggcttatatgtatgaacacggcttaggcatcacaaaggacattcacttggccagaagattgtacgacatggctgctcaaacgagtccagatgcccacatacctgtgctctttgccgtcatgaaactggaaactacgcatttgctccgggatatcctgttttttaatttcacaacgagatggaactggctgaaactggacaacaccattggaccacactgggacttatttgtgattggcctcattgttcctgggctgattttgttgcttagaaatcaccatgggtaggatgcggatcacaggaaaacctgctcacgggaatcagttcactccaaggtatccccactaaataaacagtttcccatccaaannaanann

SEQ ID NO: 310161 - DNA, 1143 bp, Homo sapiens
  misc_feature (22)..(22): n is a, c, g, or t
  misc_feature (75)..(75): n is a, c, g, or t
ggtggaccgcgcttaccgctgncctcttggaagacttgagggcgtggcctgtagagccaggtgcgccaagtgacnggcgagctagcggaaagccgcctcagggacttggaggatgtagaagtgggaggagaccgagggtcaacacgaattgtccgtgctcactccaactgccctgttgaggaggattttcaccagctatcaaagcagaggaacataataaaagacaaaaggaaagaaatgtcaccacacaggtatcagcgaacgaaatcaaacaatatttatcacacatattggaacaaagaacatctagtaatgtaatcaataaaagagaaaatctcctggagaaaaagaagaatcaacgtaaaataagaataaaaggaattcaaaataaagatatcttgaagagaaataagaatcatttacaaaagcaagcagagaaaaattttacagatgaaggagaccagctatttaagatgggcatcaaggttctccagcagtctaaaagccaaaaacaaaaagaagagattctaatgcctacctggatgtttctctgtctgaggtccttcttgcctggactactctgctccagcttctgcccaagagcagcttattttagcctcagcatggatgggctgtacataaagagcctacctactttttgccaaagcagctgacatgggaaacttgaaagctatggagaaaatggctgacgctttgctatttggaaattttggcgtgcaaaatataacagcagctatccaattatatgagtccttggctaaagaaggatcatgtaaagcccaaaacgtgagttttgaaggaaaatgaaaccttaaatagctccatcctgaaataactatagacagcatgtgaaaggagttgagcaatagtattccagctctgctgcatgaacccagtctagggaggttaccataatgcactgaaacagtggtgtcagggcaggagtacagcagaagcctccgaacccccaacagctaaattttatataaaatgtattcacctatatgaagaaatatgaaactgtctattatcttagggtgacatgtttgcatgatttttacttttcaaatattttataagctaaatgtaattcctttctatttaataaatgccgatcgcaag

SEQ ID NO: 310162 - DNA, 420 bp, Homo sapiens
  misc_feature (22)..(22): n is a, c, g, or t
  misc_feature (75)..(75): n is a, c, g, or t
ggtggaccgcgcttaccgctgncctcttggaagacttgagggcgtggcctgtagagccaggtgcgccaagtgacnggcgagctagcggaaagccgcctcagggacttggaggatgtagaagtgggaggagaccgagggtcaacacgaattgtccgtgctcactccaactgccctgttgaggaggattttcaccagctatcaaagcagaggaacataataaaagacaaaaggaaagaaatgtcaccacacaggtatcagcgaacgaaatcaaacaatatttatcacacatattggaacaaagaacatctagtaatgtaatcaataaaagagaaaatctcctggagaaaaagaagaatcaacgtaaaataagaataaaaggaattcaaaataaagatatcttgaagagaaataagaatcatt

SEQ ID NO: 310163 - DNA, 656 bp, Homo sapiens
  misc_feature (22)..(22): n is a, c, g, or t
  misc_feature (75)..(75): n is a, c, g, or t
ggtggaccgcgcttaccgctgncctcttggaagacttgagggcgtggcctgtagagccaggtgcgccaagtgacnggcgagctagcggaaagccgcctcagggacttggaggatgtagaagtgggaggagaccgagggtcaacacgaattgtccgtgctcactccaactgccctgttgaggaggattttcaccagctatcaaagcagaggaacataataaaagacaaaaggaaagaaatgtcaccacacaggtatcagcgaacgaaatcaaacaatatttatcacacatattggaacaaagaacatctagtaatgtaatcaataaaagagaaaatctcctggagaaaaagaagaatcaacgtaaaataagaataaaaggaattcaaaataaagatatcttgaagagaaataagaatcattggtgagaagaaaagaacaggagaagaactatgaaaacagcagatgtgaggagcaagaaagatggtgattggctgcgctaaactgaaaagttagtgaaacttcaaagttgggggattccaactgatatttttaaatcagcaatgtctaaggtgaccattaaaaattgtttttgttcctaggataactcatcttctcttctgctctatgaaatcttagataaaatgtgtattcctcat

SEQ ID NO: 310164 - DNA, 600 bp, Homo sapiens
  misc_feature (22)..(22): n is a, c, g, or t
  misc_feature (75)..(75): n is a, c, g, or t
ggtggaccgcgcttaccgctgncctcttggaagacttgagggcgtggcctgtagagccaggtgcgccaagtgacnggcgagctagcggaaagccgcctcagggacttggaggatgtagaagtgggaggagaccgagggtcaacacgaattgtccgtgctcactccaactgccctgttgaggaggattttcaccagctatcaaagcagaggaacataataaaagacaaaaggaaagaaatgtcaccacacaggtatcagcgaacgaaatcaaacaatatttatcacacatattggaacaaagaacatctagtaatgtaatcaataaaagagaaaatctcctggagaaaaagaagaatcaacgtaaaataagaataaaaggaattcaaaataaagatatcttgaagagaaataagaatcattggtgagaagaaaagaacaggagaagaactatgaaaacagcagatgtgaggagcaagaaagatggtgattggctgcgctaaactgaaaagttagtgaaacttcaaagttgggggattccaactgatatttttaaatcagcaatgtctaaggtgaccattaaaaattgtttttgttcctagg

SEQ ID NO: 310165 - DNA, 750 bp, Homo sapiens
  misc_feature (22)..(22): n is a, c, g, or t
  misc_feature (75)..(75): n is a, c, g, or t
ggtggaccgcgcttaccgctgncctcttggaagacttgagggcgtggcctgtagagccaggtgcgccaagtgacnggcgagctagcggaaagccgcctcagggacttggaggatgtagaagtgggaggagaccgagggtcaacacgaattgtccgtgctcactccaactgccctgttgaggaggattttcaccagctatcaaagcagaggaacataataaaagacaaaaggaaagaaatgtcaccacacaggtatcagcgaacgaaatcaaacaatatttatcacacatattggaacaaagaacatctagtaatgtaatcaataaaagagaaaatctcctggagaaaaagaagaatcaacgtaaaataagaataaaaggaattcaaaataaagatatcttgaagagaaataagaatcattaagcctggtgtcagctgatgccaagtcttcaaggatggaaagacattgccctacagaactagggagaggaacgttgacattttgtttttgaaagggtgagaagaaaagaacaggagaagaactatgaaaacagcagatgtgaggagcaagaaagatggtgattggctgcgctaaactgaaaagttagtgaaacttcaaagttgggggattccaactgatatttttaaatcagcaatgtctaaggtgaccattaaaaattgtttttgttcctaggataactcatcttctcttctgctctatgaaatcttagataaaatgtgtattcctcat

SEQ ID NO: 310166 - DNA, 872 bp, Homo sapiens
  misc_feature (47)..(47): n is a, c, g, or t
  misc_feature (55)..(55): n is a, c, g, or t
  misc_feature (61)..(61): n is a, c, g, or t
  misc_feature (98)..(98): n is a, c, g, or t
gtttttttgcaaaaagccttacacatttaaatgtaaccaatcagtgnttttaccnacaatntgaacttaagtcgaggcttctttaattaacccccgcncaggaatccaaatgagactcagaacaatagcacaagctggcctgtcttcaaaagcactgaacaaaaatatctaaccttgaatacagagtcaacaagaataatgacgaaactacgtgctcaacaatgtcgattctggacatcattttttccaaaagtcttggaaatgacaggaaatattgatgaagcagaatgggagtggaaagcaggattccatcgctggaacaattacatgatggactggaaaaatcaatttaacgattacactagcaagaaagaaagttgtgtgggtctctaattaatagatttaccctttatagaacatattttcctttagatcaaggcaaaaatatcaggagcttttttacacacctactaaaaaagttattatgtagctgaaacaaaaatgccagaaggataatattgattcctcacatctttaacttagtattttacctagcatttcaaaacccaaatggctagaacatgtttaattaaatttcacaatataaagttctacagttaattatgtgcatattaaaacaatggcctggttcaatttctttctttccttaataaatttaagttttttccccccaaaattatcagtgctctgcttttagtcacgtgtattttcattaccactcgtaaaaaggtatcttttttaaatgaattaaatattgaaacactgtacaccatagtttacaatattatgtttcctaattaaaataagaattgaatgtcaatatgagatattaaaataagcacagaaaatca

SEQ ID NO: 310167 - DNA, 908 bp, Homo sapiens
  misc_feature (47)..(47): n is a, c, g, or t
  misc_feature (55)..(55): n is a, c, g, or t
  misc_feature (61)..(61): n is a, c, g, or t
  misc_feature (98)..(98): n is a, c, g, or t
gtttttttgcaaaaagccttacacatttaaatgtaaccaatcagtgnttttaccnacaatntgaacttaagtcgaggcttctttaattaacccccgcncaggaatccaaatgagactcagaacaatagcacaagctggcctgtcttcaaaagcactgaacaaaaatatctaaccttgaatacagagtcaacaagaataatgacgaaactacgtgctcaacaatgtcgattctggacatcattttttccaaaagtcttggaaatgacaggaaatattgatgaagcagaatgggagtggaaagcaggattccatcgctggaacaattacatgatggactggaaaaatcaatttaacgattacactagcaagaaagaaagttgtgtgggtctctaattaatagatttaccctttatagaacatattttcctttagatcaaggcaaaaatatcaggagcttttttacacacctactaaaaaagttattatgtagctgaaacaaaaatgccagaaggataatattgattcctcacatctttaacttagtattttacctagcatttcaaaacccaaatggctagaacatgtttaattaaatttcacaatataaagttctacagttaattatgtgcatattaaaacaatggcctggttcaatttctttctttccttaataaatttaagttttttccccccaaaattatcagtgctctgcttttagtcacgtgtattttcattaccactcgtaaaaaggtatcttttttaaatgaattaaatattgaaacactgtacaccatagtttacaatattatgtttcctaattaaaataagaattgaatgtcaatatgagatattaaaataagcacagaaaatcataaaaaaaaaatggatggttggctggctaagagcga

SEQ ID NO: 310168 - DNA, 2445 bp, Homo sapiens
agtaacagttgattgttacattcagtaacactgaatgtcagtgcagtccaatttacaggctggagcagcagctgcatcctgcatttccccgaagtattacatgattttcactccttgcaaactttgccatctttgttgcagagaatcggaaatcaatatgcatagcaaagtcacaatcatatgcatcagatttctcttttggtttcttttgctctgcatgcttattgggaagtcacatactgaagatgacatcataattgcaacaaagaatggaaaagtcagagggatgaacttgacagtttttggtggcacggtaacagcctttcttggaattccctatgcacagccacctcttggtagacttcgattcaaaaagccacagtctctgaccaagtggtctgatatttggaatgccacaaaatatgcaaattcttgctgtcagaacatagatcaaagttttccaggcttccatggatcagagatgtggaacccaaacactgacctcagtgaagactgtttatatctaaatgtatggattccagcacctaaaccaaaaaatgccactgtattgatatggatttatggtggtggttttcaaactggaacatcatctttacatgtttatgatggcaagtttctggctcgggttgaaagagttattgtagtgtcaatgaactatagggtgggtgccctaggattcttagctttgccaggaaatcctgaggctccagggaacatgggtttatttgatcaacagttggctcttcagtgggttcaaaaaaatatagcagcctttggtggaaatcctaaaagtgtaactctctttggagaaagtgcaggagcagcttcagttagcctgcatttgctttctcctggaagccattcattgttcaccagagccattctgcaaagtggatcctttaatgctccttgggcggtaacatctctttatgaagctaggaacagaacgttgaacttagctaaattgactggttgctctagagagaatgagactgaaataatcaagtgtcttagaaataaagatccccaagaaattcttctgaatgaagcatttgttgtcccctatgggactcctttgtcagtaaactttggtccgaccgtggatggtgattttctcactgacatgccagacatattacttgaacttggacaatttaaaaaaacccagattttggtgggtgttaataaagatgaagggacagcttttttagtctatggtgctcctggcttcagcaaagataacaatagtatcataactagaaaagaatttcaggaaggtttaaaaatattttttccaggagtgagtgagtttggaaaggaatccatcctttttcattacacagactgggtagatgatcagagacctgaaaactaccgtgaggccttgggtgatgttgttggggattataatttcatatgccctgccttggagttcaccaagaagttctcagaatggggaaataatgcctttttctactattttgaacaccgatcctccaaacttccgtggccagaatggatgggagtgatgcatggctatgaaattgaatttgtctttggtttacctctggaaagaagagataattacacaaaagccgaggaaattttgagtagatccatagtgaaacggtgggcaaattttgcaaaatatgggaatccaaatgagactcagaacaatagcacaagctggcctgtcttcaaaagcactgaacaaaaatatctaaccttgaatacagagtcaacaagaataatgacgaaactacgtgctcaacaatgtcgattctggacatcattttttccaaaagtcttggaaatgacaggaaatattgatgaagcagaatgggagtggaaagcaggattccatcgctggaacaattacatgatggactggaaaaatcaatttaacgattacactagcaagaaagaaagttgtgtgggtctctaattaatagatttaccctttatagaacatattttcctttagatcaaggcaaaaatatcaggagcttttttacacacctactaaaaaagttattatgtagctgaaacaaaaatgccagaaggataatattgattcctcacatctttaacttagtattttacctagcatttcaaaacccaaatggctagaacatgtttaattaaatttcacaatataaagttctacagttaattatgtgcatattaaaacaatggcctggttcaatttctttctttccttaataaatttaagttttttccccccaaaattatcagtgctctgcttttagtcacgtgtattttcattaccactcgtaaaaaggtatcttttttaaatgaattaaatattgaaacactgtacaccatagtttacaatattatgtttcctaattaaaataagaattgaatgtcaatatgagatattaaaataagcacagaaaatca

SEQ ID NO: 310169 - DNA, 880 bp, Homo sapiens
tcatggctccaataatacgactcccaaagggcatcaggaatccaaatgagactcagaacaatagcacaagctggcctgtcttcaaaagcactgaacaaaaatatctaaccttgaatacagagtcaacaagaataatgacgaaactacgtgctcaacaatgtcgattctggacatcattttttccaaaagtcttggaaatgacaggaaatattgatgaagcagaatgggagtggaaagcaggattccatcgctggaacaattacatgatggactggaaaaatcaatttaacgattacactagcaagaaagaaagttgtgtgggtctctaattaatagatttaccctttatagaacatattttcctttagatcaaggcaaaaatatcaggagcttttttacacacctactaaaaaagttattatgtagctgaaacaaaaatgccagaaggataatattgattcctcacatctttaacttagtattttacctagcatttcaaaacccaaatggctagaacatgtttaattaaatttcacaatataaagttctacagttaattatgtgcatattaaaacaatggcctggttcaatttctttctttccttaataaatttaagttttttccccccaaaattatcagtgctctgcttttagtcacgtgtattttcattaccactcgtaaaaaggtatcttttttaaatgaattaaatattgaaacactgtacaccatagtttacaatattatgtttcctaattaaaataagaattgaatgtcaatatgagatattaaaataagcacagaaaatcacatctttttacctatcaactggctggtgatctgatattttcagctcccaccggaccccccacgacaagacat

SEQ ID NO: 310170 - DNA, 997 bp, Homo sapiens
  misc_feature (997)..(997): n is a, c, g, or t
agtaacagttgattgttacattcagtaacactgaatgtcagtgcagtccaatttacaggctggagcagcagctgcatcctgcatttccccgaagtattacatgattttcactccttgcaaactttgccatctttgttgcagagaatcgggaatccaaatgagactcagaacaatagcacaagctggcctgtcttcaaaagcactgaacaaaaatatctaaccttgaatacagagtcaacaagaataatgacgaaactacgtgctcaacaatgtcgattctggacatcattttttccaaaagtcttggaaatgacaggaaatattgatgaagcagaatgggagtggaaagcaggattccatcgctggaacaattacatgatggactggaaaaatcaatttaacgattacactagcaagaaagaaagttgtgtgggtctctaattaatagatttaccctttatagaacatattttcctttagatcaaggcaaaaatatcaggagcttttttacacacctactaaaaaagttattatgtagctgaaacaaaaatgccagaaggataatattgattcctcacatctttaacttagtattttacctagcatttcaaaacccaaatggctagaacatgtttaattaaatttcacaatataaagttctacagttaattatgtgcatattaaaacaatggcctggttcaatttctttctttccttaataaatttaagttttttccccccaatagaaaaaacacccactagacctttctggcctctcgcggggcaccctttcaggcgtttatctctagtcgcgggcagattatggacctcgttgcgctgaccctaacgaccttcctcaaagctgagcacgacgctccaccccgcctagtccaccccaccaaccccttattgctattccgccaccccacaccaccctcccttaccacacccagcagaataccgactttacactgcccgacactcgtgcccccgctcn

SEQ ID NO: 310171 - DNA, 631 bp, Homo sapiens
tcatggctccaataatacgactcccaaagggcatcaggaatccaaatgagactcagaacaatagcacaagctggcctgtcttcaaaagcactgaacaaaaatatctaaccttgaatacagagtcaacaagaataatgacgaaactacgtgctcaacaatgtcgattctggacatcattttttccaaaagtcttggaaatgacaggaaatattgatgaagcagaatgggagtggaaagcaggattccatcgctggaacaattacatgatggactggaaaaatcaatttaacgattacactagcaagaaagaaagttgtgtgggtctctaattaatagatttaccctttatagaacatattttcctttagatcaaggcaaaaatatcaggagcttttttacacacctactaaaaaagttattatgtagctgaaacaaaaatgccagaaggataatattgattcctcacatctttaacttagtattttacctagcatttcaaaacccaaatggctagaacatgtttaattaaatttcacaatataaagttctacagttaattatgtgcatattaaaacaatggcctggttcaatttctttctttccttaataaatttaagttttttccccccaa

SEQ ID NO: 310172 - DNA, 1017 bp, Homo sapiens
  misc_feature (31)..(32): n is a, c, g, or t
  misc_feature (41)..(41): n is a, c, g, or t
  misc_feature (53)..(53): n is a, c, g, or t
  misc_feature (72)..(72): n is a, c, g, or t
  misc_feature (92)..(92): n is a, c, g, or t
  misc_feature (100)..(100): n is a, c, g, or t
ctgtaaaatcagggtgcatccacgattttgnncaaaggccntccaagttaatnttaacccagtagggctttnacacaagtttggaactaagntccaatantttcttattacccccggtacaggaatccaaatgagactcagaacaatagcacaagctggcctgtcttcaaaagcactgaacaaaaatatctaaccttgaatacagagtcaacaagaataatgacgaaactacgtgctcaacaatgtcgattctggacatcattttttccaaaagtcttggaaatgacaggaaatattgatgaagcagaatgggagtggaaagcaggattccatcgctggaacaattacatgatggactggaaaaatcaatttaacgattacactagcaagaaagaaagttgtgtgggtctctaattaatagatttaccctttatagaacatattttcctttagatcaaggcaaaaatatcaggagcttttttacacacctactaaaaaagttattatgtagctgaaacaaaaatgccagaaggataatattgattcctcacatctttaacttagtattttacctagcatttcaaaacccaaatggctagaacatgtttaattaaatttcacaatataaagttctacagttaattatgtgcatattaaaacaatggcctggttcaatttctttctttccttaataaatttaagttttttccccccaaaattatcagtgctctgcttttagtcacgtgtattttcattaccactcgtaaaaaggtatcttttttaaatgaattaaatattgaaacactgtacaccatagtttacaatattatgtttcctaattaaaataagaattgaatgtcaatatgagatattaaaataagcacagaaaatcaatattaaaataaacacagaatgcggctcaaatctgtttgttttttatataaaggcaagaaagaatcttaaaatgagaggctcagccactttaaaacaccttataatagaaacagaatgctgcta

SEQ ID NO: 310173 - DNA, 1027 bp, Homo sapiens
agtaacagttgattgttacattcagtaacactgaatgtcagtgcagtccaatttacaggctggagcagcagctgcatcctgcatttccccgaagtattacatgattttcactccttgcaaactttgccatctttgttgcagagaatcgggaatccaaatgagactcagaacaatagcacaagctggcctgtcttcaaaagcactgaacaaaaatatctaaccttgaatacagagtcaacaagaataatgacgaaactacgtgctcaacaatgtcgattctggacatcattttttccaaaagtcttggaaatgacaggaaatattgatgaagcagaatgggagtggaaagcaggattccatcgctggaacaattacatgatggactggaaaaatcaatttaacgattacactagcaagaaagaaagttgtgtgggtctctaattaatagatttaccctttatagaacatattttcctttagatcaaggcaaaaatatcaggagcttttttacacacctactaaaaaagttattatgtagctgaaacaaaaatgccagaaggataatattgattcctcacatctttaacttagtattttacctagcatttcaaaacccaaatggctagaacatgtttaattaaatttcacaatataaagttctacagttaattatgtgcatattaaaacaatggcctggttcaatttctttctttccttaataaatttaagttttttccccccaaaattatcagtgctctgcttttagtcacgtgtattttcattaccactcgtaaaaagccccaaccaaattcggcccctcgccaccccactccccacacttccgttcttattaacacgacctgacggcactccgaccgtcacccccgccacctccccccctcccatcccccgcccctcctgactcggggggagtctttaggccttcctacacggggtaatcaaagccccgcctgcccagccccggctgccctccggacacgcccaccccgccccggcgctcctcccc

SEQ ID NO: 310174 - DNA, 1103 bp, Homo sapiens
cgttgttagcatacacgcaaccctcaatcttcaccatgaatatccgtggaccatgattttgcaagagccccccaaacttttagtcaacatgtttccacccttatagaccgagttatgtcacagtcaggcatacgtccggagcaacaagccatggtcaggtaatcgactccctataggcgccaggaatccaatgatatagacataccaggaatccaaatgagactcagaacaatagcacaagctggcctgtcttcaaaagcactgaacaaaaatatctaaccttgaatacagagtcaacaagaataatgacgaaactacgtgctcaacaatgtcgattctggacatcattttttccaaaagtcttggaaatgacaggaaatattgatgaagcagaatgggagtggaaagcaggattccatcgctggaacaattacatgatggactggaaaaatcaatttaacgattacactagcaagaaagaaagttgtgtgggtctctaattaatagatttaccctttatagaacatattttcctttagatcaaggcaaaaatatcaggagcttttttacacacctactaaaaaagttattatgtagctgaaacaaaaatgccagaaggataatattgattcctcacatctttaacttagtattttacctagcatttcaaaacccaaatggctagaacatgtttaattaaatttcacaatataaagttctacagttaattatgtgcatattaaaacaatggcctggttcaatttctttctttccttaataaatttaagttttttccccccaaaattatcagtgctctgcttttagtcacgtgtattttcattaccactcgtaaaaaggtatcttttttaaatgaattaaatattgaaacactgtacaccatagtttacaatattatgtttcctaattaaaataagaattgaatgtcaatatgagatattaaaataagcacagaaaatcaatattaaaataaacacagaatgcggctcaaatctgtttgttttttatataaaggcaagaaagaatcttaaaatgagaggctcagccactttaaaacaccttataatagaaacagaatgctgcta

SEQ ID NO: 310175 - DNA, 939 bp, Homo sapiens
  misc_feature (802)..(802): n is a, c, g, or t
  misc_feature (822)..(822): n is a, c, g, or t
  misc_feature (826)..(826): n is a, c, g, or t
  misc_feature (831)..(833): n is a, c, g, or t
  misc_feature (836)..(836): n is a, c, g, or t
  misc_feature (840)..(840): n is a, c, g, or t
  misc_feature (842)..(842): n is a, c, g, or t
agtaacagttgattgttacattcagtaacactgaatgtcagtgcagtccaatttacaggctggagcagcagctgcatcctgcatttccccgaagtattacatgattttcactccttgcaaactttgccatctttgttgcagagaatcgggaatccaaatgagactcagaacaatagcacaagctggcctgtcttcaaaagcactgaacaaaaatatctaaccttgaatacagagtcaacaagaataatgacgaaactacgtgctcaacaatgtcgattctggacatcattttttccaaaagtcttggaaatgacaggaaatattgatgaagcagaatgggagtggaaagcaggattccatcgctggaacaattacatgatggactggaaaaatcaatttaacgattacactagcaagaaagaaagttgtgtgggtctctaattaatagatttaccctttatagaacatattttcctttagatcaaggcaaaaatatcaggagcttttttacacacctactaaaaaagttattatgtagctgaaacaaaaatgccagaaggataatattgattcctcacatctttaacttagtattttacctagcatttcaaaacccaaatggctagaacatgtttaattaaatttcacaatataaagttctacagttaattatgtgcatattaaaacaatggcctggttcaatttctttctttccttaataaatttaagttttttccccccaaaaaaaaaataatggcccttaacaaaaaaaaaaatggcctcgttggcctcaacggtgganctctgcgccgcttccctaangagngtatnnngancctncncagtgactggctacgctccgccgtccgcctctggagatcggttgatctctgctcacggcggcgctcgtgagccccggtgtgggacggccgacagcgg

SEQ ID NO: 310176 - DNA, 809 bp, Homo sapiens
  misc_feature (15)..(15): n is a, c, g, or t
  misc_feature (21)..(21): n is a, c, g, or t
  misc_feature (24)..(24): n is a, c, g, or t
gtcatgagcaacgangctctnaanctccacgggtacacgaatccaaatgagactcagaacaatagcacaagctggcctgtcttcaaaagcactgaacaaaaatatctaaccttgaatacagagtcaacaagaataatgacgaaactacgtgctcaacaatgtcgattctggacatcattttttccaaaagtcttggaaatgacaggaaatattgatgaagcagaatgggagtggaaagcaggattccatcgctggaacaattacatgatggactggaaaaatcaatttaacgattacactagcaagaaagaaagttgtgtgggtctctaattaatagatttaccctttatagaacatattttcctttagatcaaggcaaaaatatcaggagcttttttacacacctactaaaaaagttattatgtagctgaaacaaaaatgccagaaggataatattgattcctcacatctttaacttagtattttacctagcatttcaaaacccaaatggctagaacatgtttaattaaatttcacaatataaagttctacagttaattatgtgcatattaaaacaatggcctggttcaatttctttctttccttaataaatttaagttttttccccccaaaattatcagtgctctgcttttagtcacgtgtattttcattaccactcgtaaaaaggtatcttttttaaatgaattaaatattgaaacactgtacaccatagtttacaatattatgtttcctaattaaaataagaattgaatgtcaatatgagatattaaaataagcacagaaaatca

SEQ ID NO: 310177 - DNA, 884 bp, Homo sapiens
ttatcagcatgctgatcaccgcaccagtgaacagacacgccacagccgcttggaatccaaatgagactcagaacaatagcacaagctggcctgtcttcaaaagcactgaacaaaaatatctaaccttgaatacagagtcaacaagaataatgacgaaactacgtgctcaacaatgtcgattctggacatcattttttccaaaagtcttggaaatgacaggaaatattgatgaagcagaatgggagtggaaagcaggattccatcgctggaacaattacatgatggactggaaaaatcaatttaacgattacactacagcgtgcgcgcgtttctatttaaagcatcaacccttcatccaactcttgtcctcttaagcaggcccccatccgatgaactctcctacatacccactaccttctctcttttccatcgcacaagaatcatcacgcacgataaatcccatactcaccactagtaaacgccatcccgcccagaatcattaaaacttctacccttatcccgcaccctcctttccccccccaccaaactgctgtacttcctcctataatcccacaacacacacgccttttacaatccactcctatttctgcccaccaacttcttcctccccctcttataacgatatagagaacctaccagtcttaaatacgctccctctcctccacaaccctctaataacacacctcccgacaatctatttctctcccaacactcacttcatcgtcgcctaccgccgtgtatcgcctacgcacccgtctcttcggatatttttcatttttccatatgtaccccccccacctacaccatatgaccctcgttttattccccatcacgcccgctctctcctgaattttatatattat

SEQ ID NO: 310178 - DNA, 944 bp, Homo sapiens
  misc_feature (42)..(42): n is a, c, g, or t
accttcctactcccccgattcgcattacttaaaaacttcccncgcctcagaatccaaatgagactcagaacaatagcacaagctggcctgtcttcaaaagcactgaacaaaaatatctaaccttgaatacagagtcaacaagaataatgacgaaactacgtgctcaacaatgtcgattctggacatcattttttccaaaagtcttggaaatgacaggaaatattgatgaagcagaatgggagtggaaagcaggattccatcgctggaacaattacatgatggactggaaaaatcaatttaacgattacactagcaagaaagaaagttgtgtgggtctctaattaatagatttaccctttatagaacatattttcctttagatcaaggcaaaaatatcaggagcttttttacacacctactaaaaaagttattatgtagctgaaacaaaaatgccagaaggataatattgattcctcacatctttaacttagtattttacctagcatttcaaaacccaaatggctagaacatgtttaattaaatttcacaatataaagttctacagttaattatgtgcatattaaaacaatggcctggttcaatttctttctttccttaataaatttaagttttttccccccaaaattatcagtgctctgcttttagtcacgtgtattttcattaccactcgtaaaaaggtatcttttttaaatgaattaaatattgaaacactgtacaccatagtttacaatattatgtttcctaattaaaataagaattgaatgtcaatatgagatattaaaataagcacagaaaatcaatattaaaataaacacagaatgcggctcaaatctgtttgttttttatataaaggcaagaaagaatcttaaaatgagaggctcagccactttaaaacaccttataatagaaacagaatgctgcta

SEQ ID NO: 310179 - DNA, 878 bp, Homo sapiens
ctacggcagcgcatcaccaagacgcgccacacccagaacatgtcctagaatccaaatgagactcagaacaatagcacaagctggcctgtcttcaaaagcactgaacaaaaatatctaaccttgaatacagagtcaacaagaataatgacgaaactacgtgctcaacaatgtcgattctggacatcattttttccaaaagtcttggaaatgacaggaaatattgatgaagcagaatgggagtggaaagcaggattccatcgctggaacaattacatgatggactggaaaaatcaatttaacgattacactagcaagaaagaaagttgtgtgggtctctaattaatagatttaccctttatagaacatattttcctttagatcaaggcaaaaatatcaggagcttttttacacacctactaaaaaagttattatgtagctgaaacaaaaatgccagaaggataatattgattcctcacatctttaacttagtattttacctagcatttcaaaacccaaatggctagaacatcaaacatgtcgacttacaccgcccactctatatgtactccattcctcacgctccccataaaacttttgactgattcaagcaatttcttatcgtatacatacagttcgattcccagaaaagaacaccatgcattatttgcggcacgaagctcttccgcccctctgtttcatcatatcctatctcactaaattgagcatcgcgcgtctgacacgtttatcaccacacagccttattttctatgtatccgaaattatataccccccaatccttttcagtattgcatcagctatatatccgccgttacacgacacaagaaatcctcagtcctctaaccttaacccccccgcac

SEQ ID NO: 310180 - DNA, 970 bp, Homo sapiens
aacatttccgtatgtattttccccaattgcttcaggaatccaaatgagactcagaacaatagcacaagctggcctgtcttcaaaagcactgaacaaaaatatctaaccttgaatacagagtcaacaagaataatgacgaaactacgtgctcaacaatgtcgattctggacatcattttttccaaaagtcttggaaatgacaggaaatattgatgaagcagaatgggagtggaaagcaggattccatcgctggaacaattacatgatggactggaaaaatcaatttaacgattacactagcaagaaagaaagttgtgtgggtctctaattaatagatttaccctttatagaacatattttcctttagatcaaggcaaaaatatcaggagcttttttacacacctactaaaaaagttattatgtagctgaaacaaaaatgccagaaggataatattgattcctcacatctttaacttagtattttacctagcatttcaaaacccaaatggctagaacatgtttaattaaatttcacaatataaagttctacagttaattatgtgcatattaaaacaatggcctggttcaatttctttctttccttaataaatttaagttttttccccccaaaattatcagtgctctgcttttagtcacgtgtattttcattaccactcgtaaaaaggtatcttttttaaatgaattaaatattgaaacactgtacaccatagtttacaatattatgtttcctaattaaaataagaattgaatgtcaatatgagatattaaaataagcacagaaaatcatgcacttgaaattttaatagcacgaatcacaaaaaaaaaatggcctcgttggcctcaacggggaccttaggccgttccttaagaggttattcagagcccggtactacttatgccttggtgtagttaagcaacgctcacccattaagcggtcacgtattaaaaag

SEQ ID NO: 310181 - DNA, 635 bp, Homo sapiens
  misc_feature (27)..(29): n is a, c, g, or t
ggggcccggcccgccccggcccttggnnnggggttttccgagaatccaaatgagactcagaacaatagcacaagctggcctgtcttcaaaagcactgaacaaaaatatctaaccttgaatacagagtcaacaagaataatgacgaaactacgtgctcaacaatgtcgattctggacatcattttttccaaaagtcttggaaatgacaggaaatattgatgaagcagaatgggagtggaaagcaggattccatcgctggaacaattacatgatggactggaaaaatcaatttaacgattacactagcaagaaagaaagttgtgtgggtctctaattaatagatttaccctttatagaacatattttcctttagatcaaggcaaaaatatcaggagcttttttacacacctactaaaaaagttattatgtagctgaaacaaaaatgccagaaggataatattgattcctcacatctttaacttagtattttacctagcatttcaaaacccaaatggctagaacatgtttaattaaatttcacaatataaagttctacagttaattatgtgcatattaaaacaatggcctggttcaatttctttctttccttaataaatttaagttttttccccccaa

SEQ ID NO: 310182 - DNA, 987 bp, Homo sapiens
  misc_feature (1)..(1): n is a, c, g, or t
nttttacaccagctagtgtttttccaccaaattttgaattataactcaggtcattttttaattaccccccctcgcgggattccaattaggctgaatccaaatgagactcagaacaatagcacaagctggcctgtcttcaaaagcactgaacaaaaatatctaaccttgaatacagagtcaacaagaataatgacgaaactacgtgctcaacaatgtcgattctggacatcattttttccaaaagtcttggaaatgacaggaaatattgatgaagcagaatgggagtggaaagcaggattccatcgctggaacaattacatgatggactggaaaaatcaatttaacgattacactagcaagaaagaaagttgtgtgggtctctaattaatagatttaccctttatagaacatattttcctttagatcaaggcaaaaatatcaggagcttttttacacacctactaaaaaagttattatgtagctgaaacaaaaatgccagaaggataatattgattcctcacatctttaacttagtattttacctagcatttcaaaacccaaatggctagaacatgtttaattaaatttcacaatataaagttctacagttaattatgtgcatattaaaacaatggcctggttcaatttctttctttccttaataaatttaagttttttccccccaaaattatcagtgctctgcttttagtcacgtgtattttcattaccactcgtaaaaaggtatcttttttaaatgaattaaatattgaaacactgtacaccatagtttacaatattatgtttcctaattaaaataagaattgaatgtcaatatgagatattaaaataagcacagaaaatcaatattaaaataaacacagaatgcggctcaaatctgtttgttttttatataaaggcaagaaagaatcttaaaatgagaggctcagccactttaaaacaccttataatagaaacagaatgctgcta

SEQ ID NO: 310183 - DNA, 1043 bp, Homo sapiens
  misc_feature (1)..(1): n is a, c, g, or t
ngcaatatatccgcagagcccgaggctctccgggtccagaatttattagcatatacccagccacccggagaggcccaaggcaaaagtgtgtccttgcactttaacccggttccatcccatgttatttatttgtcccgggaaggctaaagaatccaaatgagactcagaacaatagcacaagctggcctgtcttcaaaagcactgaacaaaaatatctaaccttgaatacagagtcaacaagaataatgacgaaactacgtgctcaacaatgtcgattctggacatcattttttccaaaagtcttggaaatgacaggaaatattgatgaagcagaatgggagtggaaagcaggattccatcgctggaacaattacatgatggactggaaaaatcaatttaacgattacactagcaagaaagaaagttgtgtgggtctctaattaatagatttaccctttatagaacatattttcctttagatcaaggcaaaaatatcaggagcttttttacacacctactaaaaaagttattatgtagctgaaacaaaaatgccagaaggataatattgattcctcacatctttaacttagtattttacctagcatttcaaaacccaaatggctagaacatgtttaattaaatttcacaatataaagttctacagttaattatgtgcatattaaaacaatggcctggttcaatttctttctttccttaataaatttaagttttttccccccaaaattatcagtgctctgcttttagtcacgtgtattttcattaccactcgtaaaaaggtatcttttttaaatgaattaaatattgaaacactgtacaccatagtttacaatattatgtttcctaattaaaataagaattgaatgtcaatatgagatattaaaataagcacagaaaatcaatattaaaataaacacagaatgcggctcaaatctgtttgttttttatataaaggcaagaaagaatcttaaaatgagaggctcagccactttaaaacaccttataatagaaacagaatgctgcta

SEQ ID NO: 310184 - DNA, 1008 bp, Homo sapiens
ccaatagggctttcaaagttaatttccaagcaagtgatgctttgcccaaccagtttggacataagttaaatactttttttattaacacccgcgcagggatcccaataaaattagaatccaaatgagactcagaacaatagcacaagctggcctgtcttcaaaagcactgaacaaaaatatctaaccttgaatacagagtcaacaagaataatgacgaaactacgtgctcaacaatgtcgattctggacatcattttttccaaaagtcttggaaatgacaggaaatattgatgaagcagaatgggagtggaaagcaggattccatcgctggaacaattacatgatggactggaaaaatcaatttaacgattacactagcaagaaagaaagttgtgtgggtctctaattaatagatttaccctttatagaacatattttcctttagatcaaggcaaaaatatcaggagcttttttacacacctactaaaaaagttattatgtagctgaaacaaaaatgccagaaggataatattgattcctcacatctttaacttagtattttacctagcatttcaaaacccaaatggctagaacatgtttaattaaatttcacaatataaagttctacagttaattatgtgcatattaaaacaatggcctggttcaatttctttctttccttaataaatttaagttttttccccccaaaattatcagtgctctgcttttagtcacgtgtattttcattaccactcgtaaaaaggtatcttttttaaatgaattaaatattgaaacactgtacaccatagtttacaatattatgtttcctaattaaaataagaattgaatgtcaatatgagatattaaaataagcacagaaaatcaatattaaaataaacacagaatgcggctcaaatctgtttgttttttatataaaggcaagaaagaatcttaaaatgagaggctcagccactttaaaacaccttataatagaaacagaatgctgcta

SEQ ID NO: 310185 - DNA, 919 bp, Homo sapiens
  misc_feature (44)..(45): n is a, c, g, or t
  misc_feature (48)..(48): n is a, c, g, or t
  misc_feature (57)..(58): n is a, c, g, or t
  misc_feature (74)..(74): n is a, c, g, or t
  misc_feature (849)..(849): n is a, c, g, or t
gaggggtgaagcacaaaagggaaaggaccagccacggttttggnnggntgttcgggnnaaccatgaatcatcanagaatccaaatgagactcagaacaatagcacaagctggcctgtcttcaaaagcactgaacaaaaatatctaaccttgaatacagagtcaacaagaataatgacgaaactacgtgctcaacaatgtcgattctggacatcattttttccaaaagtcttggaaatgacaggaaatattgatgaagcagaatgggagtggaaagcaggattccatcgctggaacaattacatgatggactggaaaaatcaatttaacgattacactagcaagaaagaaagttgtgtgggtctctaattaatagatttaccctttatagaacatattttcctttagatcaaggcaaaaatatcaggagcttttttacacacctactaaaaaagttattatgtagctgaaacaaaaatgccagaaggataatattgattcctcacatctttaacttagtattttacctagcatttcaaaacccaaatggctagaacatgtttaattaaatttcacaatataaagttctacagttaattatgtgcatattaaaacaatggcctggttcaatttctttctttccttaataaatttaagttttttccccccaaaattatcagtgctctgcttttagtcacgtgtattttcattaccactcgtaaaaaggtatcttttttaaatgaattaaatattgaaacactgtacaccatagtttacaatattatgtttcctaattaaaataagaattgaatgtcaatatgagatattaaaataagcacagaaaatcactnccctcaagaataataaaaaataaaaaatgggcttgtctgagcctatcgtgggagttttgcgcacagtatc

SEQ ID NO: 310186 - DNA, 822 bp, Homo sapiens
  misc_feature (822)..(822): n is a, c, g, or t
ccaaatataataactcattccaaaaccccccgcttagatcacagcaatactgaatccaaatgagactcagaacaatagcacaagctggcctgtcttcaaaagcactgaacaaaaatatctaaccttgaatacagagtcaacaagaataatgacgaaactacgtgctcaacaatgtcgattctggacatcattttttccaaaagtcttggaaatgacaggaaatattgatgaagcagaatgggagtggaaagcaggattccatcgctggaacaattacatgatggactggaaaaatcaatttaacgattacactagcaagaaagaaagttgtgtgggtctctaattaatagatttaccctttatagaacatattttcctttagatcaaggcaaaaatatcaggagcttttttacacacctactaaaaaagttattatgtagcccccacaatgtccctacgacaatagagattacctatatatttaacttattcttcgacttactactataaaaaccaaatggctataacatgtcaaattcaacttccacaatttaaagccctacagtaaaatatgtgcatactaaaacaagggcccatatcaatctcgtttccccccttaacgattcaatttcctctatcaccaactacccctcgctttacttttaacatcccgctctttgttcaccactctaaaataggtacttgccttaatgcgaccaatattgtaacactctcatcatataaccacgaactattgtccctctccaacaacgcaaccaaaaatatattaaaaatctcaatatcacataatcgcctcacaan

SEQ ID NO: 310187 - DNA, 672 bp, Homo sapiens
aacaagaacaatagaaagacacaaagacaaaaaaagaaaaccagaacgtttgaataacaatgaaaactaaaattttaggaatccaaatgagactcagaacaatagcacaagctggcctgtcttcaaaagcactgaacaaaaatatctaaccttgaatacagagtcaacaagaataatgacgaaactacgtgctcaacaatgtcgattctggacatcattttttccaaaagtcttggaaatgacaggaaatattgatgaagcagaatgggagtggaaagcaggattccatcgctggaacaattacatgatggactggaaaaatcaatttaacgattacactagcaagaaagaaagttgtgtgggtctctaattaatagatttaccctttatagaacatattttcctttagatcaaggcaaaaatatcaggagcttttttacacacctactaaaaaagttattatgtagctgaaacaaaaatgccagaaggataatattgattcctcacatctttaacttagtattttacctagcatttcaaaacccaaatggctagaacatgtttaattaaatttcacaatataaagttctacagttaattatgtgcatattaaaacaatggcctggttcaatttctttctttccttaataaatttaagttttttccccccaa

SEQ ID NO: 310188 - DNA, 950 bp, Homo sapiens
tcctatcggagcgtacacaaagacgcggcaacagaacacaaaggggctgggaggcacagaggatcaaacttcaggaatccaaatgagactcagaacaatagcacaagctggcctgtcttcaaaagcactgaacaaaaatatctaaccttgaatacagagtcaacaagaataatgacgaaactacgtgctcaacaatgtcgattctggacatcattttttccaaaagtcttggaaatgacagctgcccccgaaatcccgttgaaataaccgtgggatcggaccagccgctcttatcaaccgtactcttaaccggcctgttctggaaaaacaaattcatccacactcctcttattgatcataagcgccccacggccccacgatcattcacagagcctttaataacttccaccgccccttacacccgcagctaaaccccttgccggtgaaagcgcagtccctactcatgccccttctcatcaacacactcgatccaatacccaacaacggcccgtaatgcctaggcgattcacaaactgcaaaccaccccttgcacttccctaaaaaagccagctgatatagttcgggctcagtataaggcaacaatggaggacgcatcgtgaaccggtgtgtggcccggtagcagttgaactctcacccgctttacccttcctccacaccatattggtcgctgccaaatcgtttagcagcgtggcggctccgccacgcacaacataaccacgccagaactcgatcccgcagcgatataggaaaacagccacaaatagccgctcgctcctgcgatacatacgacaaaccaccataatgccctccgagcgccgcgtatctagagtaggacaggacgcccgcgtaaccgcaccgctacactataatatacactcctcatattataccctctcgccccccccactgcaacgaaaagttcaacgtat

SEQ ID NO: 310189 - DNA, 675 bp, Homo sapiens
  misc_feature (40)..(41): n is a, c, g, or t
  misc_feature (44)..(44): n is a, c, g, or t
agcgggcgggaccgccggggctgccccgcaccggtttggnnggngtttcgagcctaccaagcgataacataaataagccaggaatccaaatgagactcagaacaatagcacaagctggcctgtcttcaaaagcactgaacaaaaatatctaaccttgaatacagagtcaacaagaataatgacgaaactacgtgctcaacaatgtcgattctggacatcattttttccaaaagtcttggaaatgacaggaaatattgatgaagcagaatgggagtggaaagcaggattccatcgctggaacaattacatgatggactggaaaaatcaatttaacgattacactagcaagaaagaaagttgtgtgggtctctaattaatagatttaccctttatagaacatattttcctttagatcaaggcaaaaatatcaggagcttttttacacacctactaaaaaagttattatgtagctgaaacaaaaatgccagaaggataatattgattcctcacatctttaacttagtattttacctagcatttcaaaacccaaatggctagaacatgtttaattaaatttcacaatataaagttctacagttaattatgtgcatattaaaacaatggcctggttcaatttctttctttccttaataaatttaagttttttccccccaa

SEQ ID NO: 310190 - DNA, 894 bp, Homo sapiens
  misc_feature (40)..(41): n is a, c, g, or t
  misc_feature (44)..(44): n is a, c, g, or t
agcgggcgggaccgccggggctgccccgcaccggtttggnnggngtttcgagcctaccaagcgataacataaataagccaggaatccaaatgagactcagaacaatagcacaagctggcctgtcttcaaaagcactgaacaaaaatatctaaccttgaatacagagtcaacaagaataatgacgaaactacgtgctcaacaatgtcgattctggacatcattttttccaaaagtcttggaaatgacaggaaatattgatgaagcagaatgggagtggaaagcaggattccatcgctggaacaattacatgatggactggaaaaatcaatttaacgattacactagcaagaaagaaagttgtgtgggtctctaattaatagatttaccctttatagaacatattttcctttagatcaaggcaaaaatatcaggagcttttttacacacctactaaaaaagttattatgtagctgaaacaaaaatgccagaaggataatattgattcctcacatctttaacttagtattttacctagcatttcaaaacccaaatggctagaacatgtttaattaaatttcacaatataaagttctacagttaattatgtgcatattaaaacaatggcctggttcaatttctttctttccttaataaatttaagttttttccccccaagcagaacataaatcaccacccgccaagacatgtacactaataaatcgcgataccgcctcatgctagccgcgccggccgccctcccacctacactgctttcgcctgtccttctatttcgtccctctatctactccatcccattctaactcaccccccttatctcaccatcgctgtacccgccgcactgtccagaggcgcgacgattatagtaatcattat

SEQ ID NO: 310191 - DNA, 802 bp, Homo sapiens
cgttgttagcatacacgcaaccctcaatcttcaccatgaatatccgtggaccatgattttgcaagagccccccaaacttttagtcaacatgtttccacccttatagaccgagttatgtcacagtcaggcatacgtccggagcaacaagccatggtcaggtaatcgactccctataggcgccaggaatccaatgatatagacataccaggaatccaaatgagactcagaacaatagcacaagctggcctgtcttcaaaagcactgaacaaaaatatctaaccttgaatacagagtcaacaagaataatgacgaaactacgtgctcaacaatgtcgattctggacatcattttttccaaaagtcttggaaatgacaggaaatattgatgaagcagaatgggagtggaaagcaggattccatcgctggaacaattacatgatggactggaaaaatcaatttaacgattacactagcaagaaagaaagttgtgtgggtctctaattaatagatttaccctttatagaacatattttcctttagatcaaggcaaaaatatcaggagcttttttacacacctactaaaaaagttattatgtagctgaaacaaaaatgccagaaggataatattgattcctcacatctttaacttagtattttacctagcatttcaaaacccaaatggctagaacatgtttaattaaatttcacaatataaagttctacagttaattatgtgcatattaaaacaatggcctggttcaatttctttctttccttaataaatttaagttttttccccccaa

SEQ ID NO: 310192 - DNA, 882 bp, Homo sapiens
ttccgggattaggattcaatagattaagcaatgcccaactggccgtgtcaaaagtctgacaaaatattaaccttaaaccaagtcgcaagaatatcgcgaaataaggggtcaccaagtcaatttgggcatcctttctccaaaagcttggaaatgagaaatattgatgaagcagaatgggagtggaaagcaggattccatcgctggaacaattacatgatggactggaaaaatcaatttaacgattacactagcaagaaagaaagttgtgtgggtctctaattaatagatttaccctttatagaacatattttcctttagatcaaggcaaaaatatcaggagcttttttacacacctactaaaaaagttattatgtagctgaaacaaaaatgccagaaggataatattgattcctcacatctttaacttagtattttacctagcatttcaaaacccaaatggctagaacatgtttaattaaatttcacaatataaagttctacagttaattatgtgcatattaaaacaatggcctggttcaatttctttctttccttaataaatttaagttttttccccccaaaattatcagtgctctgcttttagtcacgtgtattttcattaccactcgtaaaaaggtatcttttttaaatgaattaaatattgaaacactgtacaccatagtttacaatattatgtttcctaattaaaataagaattgaatgtcaatatgagatattaaaataagcacagaaaatcaatattaaaataaacacagaatgcggctcaaatctgtttgttttttatataaaggcaagaaagaatcttaaaatgagaggctcagccactttaaaacaccttataatagaaacagaatgctgcta

SEQ ID NO: 310193 - DNA, 905 bp, Homo sapiens
  misc_feature (1)..(1): n is a, c, g, or t
naaaaaaataacaaaatttccctttttttcataagcccggaaccaatacaaatccaacccttgaatacaaatgtccccaaaaaataaacacgaaaaccccggtgtcccccaaggtagaatttgggacattcattttttcccaaaagtttgggaaaatcccggaaatatttaataaccgaaatattgatgaagcagaatgggagtggaaagcaggattccatcgctggaacaattacatgatggactggaaaaatcaatttaacgattacactagcaagaaagaaagttgtgtgggtctctaattaatagatttaccctttatagaacatattttcctttagatcaaggcaaaaatatcaggagcttttttacacacctactaaaaaagttattatgtagctgaaacaaaaatgccagaaggataatattgattcctcacatctttaacttagtattttacctagcatttcaaaacccaaatggctagaacatgtttaattaaatttcacaatataaagttctacagttaattatgtgcatattaaaacaatggcctggttcaatttctttctttccttaataaatttaagttttttccccccaaaattatcagtgctctgcttttagtcacgtgtattttcattaccactcgtaaaaaggtatcttttttaaatgaattaaatattgaaacactgtacaccatagtttacaatattatgtttcctaattaaaataagaattgaatgtcaatatgagatattaaaataagcacagaaaatcaatattaaaataaacacagaatgcggctcaaatctgtttgttttttatataaaggcaagaaagaatcttaaaatgagaggctcagccactttaaaacaccttataatagaaacagaatgctgcta

SEQ ID NO: 310194 - DNA, 1070 bp, Homo sapiens
gttagataccaagctaacctaaatttttcacccttggatacccgggaacccagtttttgccagagcctctcagacgtttagtcacatggattccacatatagaccgatttaatgttccagtaaggagagtccgggacaccaacccaaggttgagtatcgcctcatataggcgcaggaatccaaatgagactcagaacaatagcacaagctggcctgtcttcaaaagcactgaacaaaaatatctaaccttgaatacagagtcaacaagaataatgacgaaactacgtgctcaacaatgtcgattctggacatcattttttccaaaagtcttggaaatgacaggaaatattgatgaagcagaatgggagtggaaagcaggattccatcgctggaacaattacatgatggactggaaaaatcaatttaacgattacactagcaagaaagaaagttgtgtgggtctctaattaatagatttaccctttatagaacatattttcctttagatcaaggcaaaaatatcaggagcttttttacacacctactaaaaaagttattatgtagctgaaacaaaaatgccagaaggataatattgattcctcacatctttaacttagtattttacctagcatttcaaaacccaaatggctagaacatgtttaattaaatttcacaatataaagttctacagttaattatgtgcatattaaaacaatggcctggttcaatttctttctttccttaataaatttaagttttttccccccaaaattatcagtgctctgcttttagtcacgtgtattttcattaccactcgtaaaaaggtatcttttttaaatgaattaaatattgaaacactgtacaccatagtttacaatattatgtttcctaattaaaataagaattgaatgtcaatatgagatattaaaataagcacagaaaatcaatattaaaataaacacagaatgcggctcaaatctgtttgttttttatataaaggcaagaaagaatcttaaaatgagaggctcagccactttaaaacaccttataatagaaacagaatgctgcta

SEQ ID NO: 310195 - DNA, 945 bp, Homo sapiens
  misc_feature (1)..(1): n is a, c, g, or t
ntccagccccagttttaggccttggaatatgcggtgtatccagtattttgccaaagcgctctccaaatttttgtccaatttgattccccactaaggacccattttatgtaacagtaacgcatcattccgaggcagaaagaccatggttgagtaaacgactcccttaaggggccggaatccaaatgagactcagaacaatagcacaagctggcctgtcttcaaaagcactgaacaaaaatatctaaccttgaatacagagtcaacaagaataatgacgaaactacgtgctcaacaatgtcgattctggacatcattttttccaaaagtcttggaaatgacaggaaatattgatgaagcagaatgggagtggaaagcaggattccatcgctggaacaattacatgatggactggaaaaatcaatttaacgattacactagcaagaaagaaagttgtgtgggtctctaattaatagatttaccctttatagaacatattttcctttagatcaaggcaaaaatatcaggagcttttttacacacctactaaaaaagttattatgtagctgaaacaaaaatgccagaaggataatattgattcctcacatctttaacttagtattttacctagcatttcaaaacccaaatggctagaacatgtttaattaaatttcacaatataaagttctacagttaattatgtgcatattaaaacaatggcctggttcaatttctttctttccttaataaatttaagttttttccccccaaaattatcagtgctctgcttttagtcacgtgtattttcattaccactcgtaaaaaggtatcttttttaaatgaattaaatattgaaacactgtacaccatagtttacaatattatgtttcctaattaaaataagaattgaatgtcaatatgagatattaaaataagcacagaaaatca

SEQ ID NO: 310196 - DNA, 851 bp, Homo sapiens
actccccagatcaaggtatatggatacaacatcctgacctttaggtgccaggtactcttgtaatttaccacgcggtacaagaatccaaatgagactcagaacaatagcacaagctggcctgtcttcaaaagcactgaacaaaaatatctaaccttgaatacagagtcaacaagaataatgacgaaactacgtgctcaacaatgtcgattctggacatcattttttccaaaagtcttggaaatgacaggaaatattgatgaagcagaatgggagtggaaagcaggattccatcgctggaacaattacatgatggactggaaaaatcaatttaacgattacactagcaagaaagaaagttgtgtgggtctctaattaatagatttaccctttatagaacatattttcctttagatcaaggcaaaaatatcaggagcttttttacacacctactaaaaaagttattatgtagctgaaacaaaaatgccagaaggataatattgattcctcacatctttaacttagtattttacctagcatttcaaaacccaaatggctagaacatgtttaattaaatttcacaatataaagttctacagttaattatgtgcatattaaaacaatggcctggttcaatttctttctttccttaataaatttaagttttttccccccaaaattatcagtgctctgcttttagtcacgtgtattttcattaccactcgtaaaaaggtatcttttttaaatgaattaaatattgaaacactgtacaccatagtttacaatattatgtttcctaattaaaataagaattgaatgtcaatatgagatattaaaataagcacagaaaatca

SEQ ID NO: 310197 - DNA, 1086 bp, Homo sapiens
cctcctgttttctagctgacccgacacacccaatctctcgtgcacgagaaataccgcgatccccgttcttgccaaagcccctcaggattttgttccctcttcttctccccctatcggcccattaatgtcacacctatcgatattcccggacagacaagccaggctccgtaacacatccctataggcgcaaagaatccaaatgagactcagaacaatagcacaagctggcctgtcttcaaaagcactgaacaaaaatatctaaccttgaatacagagtcaacaagaataatgacgaaactacgtgctcaacaatgtcgattctggacatcattttttccaaaagtcttggaaatgacaggaaatattgatgaagcagaatgggagtggaaagcaggattccatcgctggaacaattacatgatggactggaaaaatcaatttaacgattacactagcaagaaagaaagttgtgtgggtctctaattaatagatttaccctttatagaacatattttcctttagatcaaggcaaaaatatcaggagcttttttacacacctactaaaaaagttattatgtagctgaaacaaaaatgccagaaggataatattgattcctcacatctttaacttagtattttacctagcatttcaaaacccaaatggctagaacatgtttaattaaatttcacaatataaagttctacagttaattatgtgcatattaaaacaatggcctggttcaatttctttctttccttaataaatttaagttttttccccccaaaattatcagtgctctgcttttagtcacgtgtattttcattaccactcgtaaaaaggtatcttttttaaatgaattaaatattgaaacactgtacaccatagtttacaatattatgtttcctaattaaaataagaattgaatgtcaatatgagatattaaaataagcacagaaaatcaatattaaaataaacacagaatgcggctcaaatctgtttgttttttatataaaggcaagaaagaatcttaaaatgagaggctcagccactttaaaacaccttataatagaaacagaatgctgcta

SEQ ID NO: 310198 - DNA, 1017 bp, Homo sapiens
aataattcaaagaatttttggccctaaagccaattccagtaagattgcaaacgaagtaagggtttgaacacaacaatttagaaaaaaaagtgcagtgactttcttaatacactcccgcaacagaatccaaatgagactcagaacaatagcacaagctggcctgtcttcaaaagcactgaacaaaaatatctaaccttgaatacagagtcaacaagaataatgacgaaactacgtgctcaacaatgtcgattctggacatcattttttccaaaagtcttggaaatgacaggaaatattgatgaagcagaatgggagtggaaagcaggattccatcgctggaacaattacatgatggactggaaaaatcaatttaacgattacactagcaagaaagaaagttgtgtgggtctctaattaatagatttaccctttatagaacatattttcctttagatcaaggcaaaaatatcaggagcttttttacacacctactaaaaaagttattatgtagctgaaacaaaaatgccagaaggataatattgattcctcacatctttaacttagtattttacctagcatttcaaaacccaaatggctagaacatgtttaattaaatttcacaatataaagttctacagttaattatgtgcatattaaaacaatggcctggttcaatttctttctttccttaataaatttaagttttttccccccaaaattatcagtgctctgcttttagtcacgtgtattttcattaccactcgtaaaaaggtatcttttttaaatgaattaaatattgaaacactgtacaccatagtttacaatattatgtttcctaattaaaataagaattgaatgtcaatatgagatattaaaataagcacagaaaatcaatattaaaataaacacagaatgcggctcaaatctgtttgttttttatataaaggcaagaaagaatcttaaaatgagaggctcagccactttaaaacaccttataatagaaacagaatgctgcta

SEQ ID NO: 310199 - DNA, 979 bp, Homo sapiens
  misc_feature (64)..(64): n is a, c, g, or t
caagtgtggatttgtacacaacagtttccaactaagtaacagaggcttcataattatcccacgntctagtaaataagatgaatcgaatccaaatgagactcagaacaatagcacaagctggcctgtcttcaaaagcactgaacaaaaatatctaaccttgaatacagagtcaacaagaataatgacgaaactacgtgctcaacaatgtcgattctggacatcattttttccaaaagtcttggaaatgacaggaaatattgatgaagcagaatgggagtggaaagcaggattccatcgctggaacaattacatgatggactggaaaaatcaatttaacgattacactagcaagaaagaaagttgtgtgggtctctaattaatagatttaccctttatagaacatattttcctttagatcaaggcaaaaatatcaggagcttttttacacacctactaaaaaagttattatgtagctgaaacaaaaatgccagaaggataatattgattcctcacatctttaacttagtattttacctagcatttcaaaacccaaatggctagaacatgtttaattaaatttcacaatataaagttctacagttaattatgtgcatattaaaacaatggcctggttcaatttctttctttccttaataaatttaagttttttccccccaaaattatcagtgctctgcttttagtcacgtgtattttcattaccactcgtaaaaaggtatcttttttaaatgaattaaatattgaaacactgtacaccatagtttacaatattatgtttcctaattaaaataagaattgaatgtcaatatgagatattaaaataagcacagaaaatcaatattaaaataaacacagaatgcggctcaaatctgtttgttttttatataaaggcaagaaagaatcttaaaatgagaggctcagccactttaaaacaccttataatagaaacagaatgctgcta

SEQ ID NO: 310200 - DNA, 1124 bp, Homo sapiens
  misc_feature (1)..(1): n is a, c, g, or t
  misc_feature (81)..(81): n is a, c, g, or t
  misc_feature (83)..(83): n is a, c, g, or t
ntcttttacattacacctcataattatcataatcgccgtcgtagatacacagatctctgagtcacttcattgagccacgantntgtaatcataccggggcgcgcacttctaatgtcctacgatttcttcccatacacacacaccactcagaaggcgcggcagcaaaaaggtgtccttcaatatatcccgcatctatcaaatctaataatattgtcggcaaggtctaaaaattctaaatatattatagcaaattagcccaagcgcgccgtcttctaaatgggttggcacaaaaatatctaaccttgaatacagagtcaacaagaataatgacgaaactacgtgctcaacaatgtcgattctggacatcattttttccaaaagtcttggaaatgacaggaaatattgatgaagcagaatgggagtggaaagcaggattccatcgctggaacaattacatgatggactggaaaaatcaatttaacgattacactagcaagaaagaaagttgtgtgggtctctaattaatagatttaccctttatagaacatattttcctttagatcaaggcaaaaatatcaggagcttttttacacacctactaaaaaagttattatgtagctgaaacaaaaatgccagaaggataatattgattcctcacatctttaacttagtattttacctagcatttcaaaacccaaatggctagaacatgtttaattaaatttcacaatataaagttctacagttaattatgtgcatattaaaacaatggcctggttcaatttctttctttccttaataaatttaagttttttccccccaaaattatcagtgctctgcttttagtcacgtgtattttcattaccactcgtaaaaaggtatcttttttaaatgaattaaatattgaaacactgtacaccatagtttacaatattatgtttcctaattaaaataagaattgaatgtcaatatgagatattaaaataagcacagaaaatcaatattaaaataaacacagaatgcggctcaaatctgtttgttttttatataaaggcaagaaagaatcttaaaatgagaggctcagccactttaaaacaccttataatagaaacagaatgctgcta

SEQ ID NO: 310201 - DNA, 977 bp, Homo sapiens
  misc_feature (79)..(79): n is a, c, g, or t
caccccacacgccccaccaacaaaggttctctcattatatcccctctcccattctattaatttccctgggacctaaaanattcccaacgatctaccaccatagccaaaaatggctcttttcttaaaagcacttgaccaacaatatctacccttatatcaaaggctaccaagaataaatctgcaacatccgtgctctaacaaagtcgaattttggaatatcattttctccaaaaatccttggtaactacagaaatattgatgaagcagaatgggagtggaaagcaggattccatcgctggaacaattacatgatggactggaaaaatcaatttaacgattacactagcaagaaagaaagttgtgtgggtctctaattaatagatttaccctttatagaacatattttcctttagatcaaggcaaaaatatcaggagcttttttacacacctactaaaaaagttattatgtagctgaaacaaaaatgccagaaggataatattgattcctcacatctttaacttagtattttacctagcatttcaaaacccaaatggctagaacatgtttaattaaatttcacaatataaagttctacagttaattatgtgcatattaaaacaatggcctggttcaatttctttctttccttaataaatttaagttttttccccccaaaattatcagtgctctgcttttagtcacgtgtattttcattaccactcgtaaaaaggtatcttttttaaatgaattaaatattgaaacactgtacaccatagtttacaatattatgtttcctaattaaaataagaattgaatgtcaatatgagatattaaaataagcacagaaaatcaatattaaaataaacacagaatgcggctcaaatctgtttgttttttatataaaggcaagaaagaatcttaaaatgagaggctcagccactttaaaacaccttataatagaaacagaatgctgcta

SEQ ID NO: 310202 - DNA, 467 bp, Homo sapiens
cttccattttattttttgcaattctacgatcttcctcccagaaatattgatgaagcagaatgggagtggaaagcaggattccatcgctggaacaattacatgatggactggaaaaatcaatttaacgattacactagcaagaaagaaagttgtgtgggtctctaattaatagatttaccctttatagaacatattttcctttagatcaaggcaaaaatatcaggagcttttttacacacctactaaaaaagttattatgtagctgaaacaaaaatgccagaaggataatattgattcctcacatctttaacttagtattttacctagcatttcaaaacccaaatggctagaacatgtttaattaaatttcacaatataaagttctacagttaattatgtgcatattaaaacaatggcctggttcaatttctttctttccttaataaatttaagttttttccccccaa

SEQ ID NO: 310203 - DNA, 874 bp, Homo sapiens
ttctccgctgtcttttatttcttttatatcttgtctccccctggcataattgtgaggaaatattgatgaagcagaatgggagtggaaagcaggattccatcgctggaacaattacatgatggactggaaaaatcaatttaacgattacactagcaagaaagaaagttgtgtgggtctctaattaatagatttaccctttatagaacatattttcctttagatcaaggcaaaaatatcaggagcttttttacacacctactaaaaaagttattatgtagctgaaacaaaaatgccagaaggataatattgattcctcacatctttaacttagtattttacctagcatttcaaaacccaaatggctagaacatgtttaattaaatttcacaatataaagttctacagttaattatgtgcatattaaaacaatggcctggttcaatttctttctttccttaataaatttaagttttttccccccaattccccccccccccacaaaattatcaatttataactctccccacaaccactccaccattatttattgtcccccccatttcaccacctcattatttttaactctccgctgtcataacaccttcctcccactacttctttctataactttcacacgacagctctatacttcaatccacaccccaacagatcatcatcctcttattccaaaccttatttaattatctacctcctctttatattgtctagtactaatactctacttacacctcttcgaccccgcgtactttcctcacccatttacaagtgatcgttggcacccacccatgcccctatctctcgcttctatgtgcgcaccactacctccgaatcccactacctggacgataatctc

SEQ ID NO: 310204 - DNA, 867 bp, Homo sapiens
  misc_feature (867)..(867): n is a, c, g, or t
ccccccctcccacatcataatccctaccccccccttcgtatttgtgaggaaatattgatgaagcagaatgggagtggaaagcaggattccatcgctggaacaattacatgatggactggaaaaatcaatttaacgattacactagcaagaaagaaagttgtgtgggtctctaattaatagatttaccctttatagaacatattttcctttagatcaaggcaaaaatatcaggagcttttttacacacctactaaaaaagttattatgtagctgaaacaaaaatgccagaaggataatattgattcctcacatctttaacttagtattttacctagcatttcaaaacccaaatggctagaacatgtttaattaaatttcacaatataaagttctacagttaattatgtgcatattaaaacaatggcctggttcaatttctttctttccttaataaatttaagttttttccccccaaaattatcagtgctctgcttttagtcacgtgtattttcattaccactcgtaaaaaggtatcttttttaaatgaattaaatattgaaacactgtacaccatagtttacaatattatgtttcctaattaaaataagaattgaatgtcaatatgagatattaaaataagcacagaaaatcagatcaactgaatggccacacgcacattccaataaccccccaaaaaaacagcaaaaaatgggcgtcattggccacacaggtggagccctgaggtcctttccttttgggggggtaaattcgaatttctgcgtccttaaccatcgcacccgctctgtcgaatgctgacaccgccccgctccacgaaaggggacatctgtattacacacttcagtctan

SEQ ID NO: 310205 - DNA, 973 bp, Homo sapiens
  misc_feature (203)..(204): n is a, c, g, or t
  misc_feature (209)..(209): n is a, c, g, or t
  misc_feature (234)..(234): n is a, c, g, or t
  misc_feature (236)..(236): n is a, c, g, or t
  misc_feature (238)..(238): n is a, c, g, or t
  misc_feature (244)..(244): n is a, c, g, or t
caaaccccccacccggaagcccgggggaaaaagggttccccaccttaaccccccccaccagttcttttattttcccgggaacgtaaaaatccaaatgaacttcaaccaaaagcccacctgcctttttttaaacccttaacaaaaatattcacccttaaaacagaatccccaaaataaagccgaaatacggggcccacaaatgnngattntggcaatcattttttccaaaagttntngnaaatcncgaaatattgatgaagcagaatgggagtggaaagcaggattccatcgctggaacaattacatgatggactggaaaaatcaatttaacgattacactagcaagaaagaaagttgtgtgggtctctaattaatagatttaccctttatagaacatattttcctttagatcaaggcaaaaatatcaggagcttttttacacacctactaaaaaagttattatgtagctgaaacaaaaatgccagaaggataatattgattcctcacatctttaacttagtattttacctagcatttcaaaacccaaatggctagaacatgtttaattaaatttcacaatataaagttctacagttaattatgtgcatattaaaacaatggcctggttcaatttctttctttccttaataaatttaagttttttccccccaaaattatcagtgctctgcttttagtcacgtgtattttcattaccactcgtaaaaaggtatcttttttaaatgaattaaatattgaaacactgtacaccatagtttacaatattatgtttcctaattaaaataagaattgaatgtcaatatgagatattaaaataagcacagaaaatcaatattaaaataaacacagaatgcggctcaaatctgtttgttttttatataaaggcaagaaagaatcttaaaatgagaggctcagccactttaaaacaccttataatagaaacagaatgctgcta

SEQ ID NO: 310206 - DNA, 1005 bp, Homo sapiens
ccttcctacatctcaccccttgcaaggccccacccacaagtgtttctcccacttatccgcgcgcaccagcttttcattgtcccggcagcccaaacatccacaatcacctcacccgaaaacaccaacctcccttttttccaaacgcctttaccacaattatctacctttcagcccagagtccctgagataaacccgcacctaggcgctccacaattctggtttttgcctcctttttttccaaaagtcttggcaatccacccaatatctatcaaaccaagaaatattgatgaagcagaatgggagtggaaagcaggattccatcgctggaacaattacatgatggactggaaaaatcaatttaacgattacactagcaagaaagaaagttgtgtgggtctctaattaatagatttaccctttatagaacatattttcctttagatcaaggcaaaaatatcaggagcttttttacacacctactaaaaaagttattatgtagctgaaacaaaaatgccagaaggataatattgattcctcacatctttaacttagtattttacctagcatttcaaaacccaaatggctagaacatgtttaattaaatttcacaatataaagttctacagttaattatgtgcatattaaaacaatggcctggttcaatttctttctttccttaataaatttaagttttttccccccaaaattatcagtgctctgcttttagtcacgtgtattttcattaccactcgtaaaaaggtatcttttttaaatgaattaaatattgaaacactgtacaccatagtttacaatattatgtttcctaattaaaataagaattgaatgtcaatatgagatattaaaataagcacagaaaatcaatattaaaataaacacagaatgcggctcaaatctgtttgttttttatataaaggcaagaaagaatcttaaaatgagaggctcagccactttaaaacaccttataatagaaacagaatgctgcta

SEQ ID NO: 310207 - DNA, 926 bp, Homo sapiens
tattatatatcaataatgtgtaaatatataatacatataaaggctcggggaatgttacacaagttcatcactaaatctttaacacattatgagcaaaataataattgcaattcattagaaggataatataataatagatatgtataaaaaagaggatagataaataaacacctcattacgttagaatcaaattacaataagcacacactttctccaaatatcttgtacatgacagtaaatattatccacaagcattgtatgaaatattgatgaagcagaatgggagtggaaagcaggattccatcgctggaacaattacatgatggactggaaaaatcaatttaacgattacactagcaagaaagaaagttgtgtgggtctctaattaatagatttaccctttatagaacatattttcctttagatcaaggcaaaaatatcaggagcttttttacacacctactaaaaaagttattatgtagctgaaacaaaaatgccagaaggataatattgattcctcacatctttaacttagtattttacctagcatttcaaaacccaaatggctagaacatgtttaattaaatttcacaatataaagttctacagttaattatgtgcatattaaaacaatggcctggttcaatttctttctttccttaataaatttaagttttttccccccaaaattatcagtgctctgcttttagtcacgtgtattttcattaccactcgtaaaaaggtatcttttttaaatgaattaaatattgaaacactgtacaccatagtttacaatattatgtttcctaattaaaataagaattgaatgtcaatatgagatattaaaataagcacagaaaatcacatgcgtgccggttatttatattataccttaagttccatgactgttgtagtacaccgctgca

SEQ ID NO: 310208 - DNA, 949 bp, Homo sapiens
cacataaacagagtcacggaacatactatgccagtacagcgttatagcgcaaaagtatgacaccagtatctcaattaatacattaccacagccaacactctcagctctcataacatataactcacaccgttaccgtacaaacagagtgatacgtgcaaatgacgtatctacgtcaccaccaacacctattaagacaatcattggtcacgcaaagtctcgcaagtaccagagcgacttgatgaaccaatatggtatgtgaacccagtattcccatctctggccaatcgacactgacgggctgcacaatcccattccccgcaagaaagaaagttgtgtgggtctctaattaatagatttaccctttatagaacatattttcctttagatcaaggcaaaaatatcaggagcttttttacacacctactaaaaaagttattatgtagctgaaacaaaaatgccagaaggataatattgattcctcacatctttaacttagtattttacctagcatttcaaaacccaaatggctagaacatgtttaattaaatttcacaatataaagttctacagttaattatgtgcatattaaaacaatggcctggttcaatttctttctttccttaataaatttaagttttttccccccaaaattatcagtgctctgcttttagtcacgtgtattttcattaccactcgtaaaaaggtatcttttttaaatgaattaaatattgaaacactgtacaccatagtttacaatattatgtttcctaattaaaataagaattgaatgtcaatatgagatattaaaataagcacagaaaatcaatattaaaataaacacagaatgcggctcaaatctgtttgttttttatataaaggcaagaaagaatcttaaaatgagaggctcagccactttaaaacaccttataatagaaacagaatgctgcta

SEQ ID NO: 310209 - DNA, 996 bp, Homo sapiens
tttcgtctacaataaccaatccgaaacagtaaatgatatgttaataacaagtatatagttaataaccaaataactctttaatattaccccacttcacaggaaattcaaataagaaattgcatctatatcccgagagtggcttgtttttaaaatctactcgccaaacatcatctccctttcattcagagtctccataataaatccggaattatgtgtttaacaatgtcaattctgacattcatttttcctaaaagttttggtaattacagaaatattgatgaagcagaatgggagtggaaagcaggattccatcgctggaacaattacatgatggactggaaaaatcaatttaacgattacactagcaagaaagaaagttgtgtgggtctctaattaatagatttaccctttatagaacatattttcctttagatcaaggcaaaaatatcaggagcttttttacacacctactaaaaaagttattatgtagctgaaacaaaaatgccagaaggataatattgattcctcacatctttaacttagtattttacctagcatttcaaaacccaaatggctagaacatgtttaattaaatttcacaatataaagttctacagttaattatgtgcatattaaaacaatggcctggttcaatttctttctttccttaataaatttaagttttttccccccaaaattatcagtgctctgcttttagtcacgtgtattttcattaccactcgtaaaaaggtatcttttttaaatgaattaaatattgaaacactgtacaccatagtttacaatattatgtttcctaattaaaataagaattgaatgtcaatatgagatattaaaataagcacagaaaatcaatattaaaataaacacagaatgcggctcaaatctgtttgttttttatataaaggcaagaaagaatcttaaaatgagaggctcagccactttaaaacaccttataatagaaacagaatgctgcta

SEQ ID NO: 310210 - DNA, 963 bp, Homo sapiens
  misc_feature (193)..(194): n is a, c, g, or t
  misc_feature (199)..(199): n is a, c, g, or t
  misc_feature (224)..(224): n is a, c, g, or t
  misc_feature (226)..(226): n is a, c, g, or t
  misc_feature (228)..(228): n is a, c, g, or t
  misc_feature (234)..(234): n is a, c, g, or t
aaggggcgatgcactttatcaccgtcacaaagatatattaatgtgtgccggaagtataaggactcagaatgaagtctcagcacaaattgcacaacatgccctgttgtcgaaagcctcgaccaaaaaaaatcacaccttgaggcccaaagtcaaccaagaaatgcgcgcggaaataacagtgctcaccaaatgnngattntggcaatcattttttccaaaagttntngnaaatcncgaaatattgatgaagcagaatgggagtggaaagcaggattccatcgctggaacaattacatgatggactggaaaaatcaatttaacgattacactagcaagaaagaaagttgtgtgggtctctaattaatagatttaccctttatagaacatattttcctttagatcaaggcaaaaatatcaggagcttttttacacacctactaaaaaagttattatgtagctgaaacaaaaatgccagaaggataatattgattcctcacatctttaacttagtattttacctagcatttcaaaacccaaatggctagaacatgtttaattaaatttcacaatataaagttctacagttaattatgtgcatattaaaacaatggcctggttcaatttctttctttccttaataaatttaagttttttccccccaaaattatcagtgctctgcttttagtcacgtgtattttcattaccactcgtaaaaaggtatcttttttaaatgaattaaatattgaaacactgtacaccatagtttacaatattatgtttcctaattaaaataagaattgaatgtcaatatgagatattaaaataagcacagaaaatcaatattaaaataaacacagaatgcggctcaaatctgtttgttttttatataaaggcaagaaagaatcttaaaatgagaggctcagccactttaaaacaccttataatagaaacagaatgctgcta

SEQ ID NO: 310211 - DNA, 1079 bp, Homo sapiens
  misc_feature (159)..(159): n is a, c, g, or t
  misc_feature (288)..(288): n is a, c, g, or t
  misc_feature (311)..(311): n is a, c, g, or t
cattcgtttagccatgccagccaacccctagagtctcaaccctggaatcaccggtgttcacagtttttgcgcaaacgctccccaaccgtttcagaccaattcgatcccccactatcgcccgatgtattgtcccagtctagcatagtccccggacaacangaccatggctgagtaatcgcctccataggcggccagaatccaattggcttcagccataggcaccactgcctgtttttaaagcctgtaccaaaaaatctaccctgaatccagagtcaccagaataatgangaaaataggtgctcaccaatgtngaatctggccatcatttttcccaaaagtcctggaaatgccgaaatattgatgaagcagaatgggagtggaaagcaggattccatcgctggaacaattacatgatggactggaaaaatcaatttaacgattacactagcaagaaagaaagttgtgtgggtctctaattaatagatttaccctttatagaacatattttcctttagatcaaggcaaaaatatcaggagcttttttacacacctactaaaaaagttattatgtagctgaaacaaaaatgccagaaggataatattgattcctcacatctttaacttagtattttacctagcatttcaaaacccaaatggctagaacatgtttaattaaatttcacaatataaagttctacagttaattatgtgcatattaaaacaatggcctggttcaatttctttctttccttaataaatttaagttttttccccccaaaattatcagtgctctgcttttagtcacgtgtattttcattaccactcgtaaaaaggtatcttttttaaatgaattaaatattgaaacactgtacaccatagtttacaatattatgtttcctaattaaaataagaattgaatgtcaatatgagatattaaaataagcacagaaaatcaatattaaaataaacacagaatgcggctcaaatctgtttgttttttatataaaggcaagaaagaatcttaaaatgagaggctcagccactttaaaacaccttataatagaaacagaatgctgcta

SEQ ID NO: 310212 - DNA, 760 bp, Homo sapiens
agtaacagttgattgttacattcagtaacactgaatgtcagtgcagtccaatttacaggctggagcagcagctgcatcctgcatttccccgaagtattacatgattttcactccttgcaaactttgccatctttgttgcagagaatcgggaatccaaatgagactcagaacaatagcacaagctggcctgtcttcaaaagcactgaacaaaaatatctaaccttgaatacagagtcaacaagaataatgacgaaactacgtgctcaacaatgtcgattctggacatcattttttccaaaagtcttggaaatgacagagcctatatgctgctactgtgagccaggaactgcactagcagctagagctgcacagatgaaaatgacagggtctgcttactcacagtgaagtggagtcagggcccaggaccatggaaagcttttaagaagagaagatacctgcactgaatctcaatgtgaaggcaaagtggagagaagccagataagcaggaaccagagatgaagtgtcttgtgcatcatgctaaagaatttaaattatattctgagtaaagccatttagtaattttaaatgagaaactgatatgttctggttatggattcataaatgtataatcttttactatattcacgagttattcttttttacctttgtcttcttagagtctagatggtcagaatattatatggcatcaacataataatttcatttctgaggtagggtctttcttccaaatagctgcttt

SEQ ID NO: 310213 - DNA, 743 bp, Homo sapiens
agtaacagttgattgttacattcagtaacactgaatgtcagtgcagtccaatttacaggctggagcagcagctgcatcctgcatttccccgaagtattacatgattttcactccttgcaaactttgccatctttgttgcagagaatcgggaatccaaatgagactcagaacaatagcacaagctggcctgtcttcaaaagcactgaacaaaaatatctaaccttgaatacagagtcaacaagaataatgacgaaactacgtgctcaacaatgtcgattctggacatcattttttccaaaagtcttggaaatgacaggaaatattgatgaagcagaatgggagtggaaagcaggattccatcgctggaacaattacatgatggactggaaaaatcaatttaacgattacactagcaagaaagaaagttgtgtgggtctctaattaatagatttaccctttatagaacatattttcctttagatcaaggcaaaaatatcaggagcttttttacacacctactaaaaaagttattatgtagctgaaacaaaaatgccagaaggataatattgattcctcacatctttaacttagtattttacctagcatttcaaaacccaaatggctagaacatgtttaattaaatttcacaatataaagttctacagttaattatgtgcatattaaaacaatggcctggttcaatttctttctttccttaataaatttaagttttttccccccaa

SEQ ID NO: 310214 - DNA, 935 bp, Homo sapiens
  misc_feature (1)..(1): n is a, c, g, or t
ntcgttcggaaactgactctcttctgaaccagcgctacaggaatccaaatgagactcagaacaatagcacaagctggcctgtcttcaaaagcactgaacaaaaatatctaaccttgaatacagagtcaacaagaataatgacgaaactacgtgctcaacaatgtcgattctggacatcattttttccaaaagtcttggaaatgacaggaaatattgatgaagcagaatgggagtggaaagcaggattccatcgctggaacaattacatgatggactggaaaaatcaatttaacgattacactagcaagaaagaaagttgtgtgggtctctaattaatagatttaccctttatagaacatattttcctttagatcaaggcaaaaatatcaggagcttttttacacacctactaaaaaagttattatgtagctgaaacaaaaatgccagaaggataatattgattcctcacatctttaacttagtattttacctagcatttcaaaacccaaatggctagaacatgtttaattaaatttcacaatataaagttctacagttaattatgtgcatattaaaacaatggcctggttcaatttctttctttccttaataaatttaagttttttccccccaaaattatcagtgctctgcttttagtcacgtgtattttcattaccactcgtaaaaaggtatcttttttaaatgaattaaatattgaaacactgtacaccatagtttacaatattatgtttcctaattaaaataagaattgaatgtcaatatgagatattaaaataagcacagaaaatcaatattaaaataaacacagaatgcggctcaaatctgtttgttttttatataaaggcaagaaagaatcttaaaatgagaggctcagccactttaaaacaccttataatagaaacagaatgctgcta

SEQ ID NO: 310215 - DNA, 983 bp, Homo sapiens
  misc_feature (1)..(1): n is a, c, g, or t
  misc_feature (846)..(846): n is a, c, g, or t
  misc_feature (866)..(866): n is a, c, g, or t
  misc_feature (870)..(870): n is a, c, g, or t
  misc_feature (875)..(877): n is a, c, g, or t
  misc_feature (880)..(880): n is a, c, g, or t
  misc_feature (884)..(884): n is a, c, g, or t
  misc_feature (886)..(886): n is a, c, g, or t
ntcgttcggaaactgactctcttctgaaccagcgctacaggaatccaaatgagactcagaacaatagcacaagctggcctgtcttcaaaagcactgaacaaaaatatctaaccttgaatacagagtcaacaagaataatgacgaaactacgtgctcaacaatgtcgattctggacatcattttttccaaaagtcttggaaatgacaggaaatattgatgaagcagaatgggagtggaaagcaggattccatcgctggaacaattacatgatggactggaaaaatcaatttaacgattacactagcaagaaagaaagttgtgtgggtctctaattaatagatttaccctttatagaacatattttcctttagatcaaggcaaaaatatcaggagcttttttacacacctactaaaaaagttattatgtagctgaaacaaaaatgccagaaggataatattgattcctcacatctttaacttagtattttacctagcatttcaaaacccaaatggctagaacatgtttaattaaatttcacaatataaagttctacagttaattatgtgcatattaaaacaatggcctggttcaatttctttctttccttaataaatttaagttttttccccccaaaattatcagtgctctgcttttagtcacgtgtattttcattaccactcgtaaaaaggtatcttttttaaatgaattaaatattgaaacactgtacaccatagtttacaatattatgtttcctaattaaaataagaattgaatgtcaatatgagatattaaaataagcacagaaaatcaaaaaaaaaatggcctcgttggcctcaacggtgganctctgcgccgcttccctaangagngtatnnngancctncncagtgactggctacgctccgccgtccgcctctggagatcggttgatctctgctcacggcggcgctcgtgagccccggtgtgggacggccgacagcgg

SEQ ID NO: 310216 - DNA, 912 bp, Homo sapiens
  misc_feature (1)..(1): n is a, c, g, or t
ntcgttcggaaactgactctcttctgaaccagcgctacaggaatccaaatgagactcagaacaatagcacaagctggcctgtcttcaaaagcactgaacaaaaatatctaaccttgaatacagagtcaacaagaataatgacgaaactacgtgctcaacaatgtcgattctggacatcattttttccaaaagtcttggaaatgacaggaaatattgatgaagcagaatgggagtggaaagcaggattccatcgctggaacaattacatgatggactggaaaaatcaatttaacgattacactagcaagaaagaaagttgtgtgggtctctaattaatagatttaccctttatagaacatattttcctttagatcaaggcaaaaatatcaggagcttttttacacacctactaaaaaagttattatgtagctgaaacaaaaatgccagaaggataatattgattcctcacatctttaacttagtattttacctagcatttcaaaacccaaatggctagaacatgtttaattaaatttcacaatataaagttctacagttaattatgtgcatattaaaacaatggcctggttcaatttctttctttccttaataaatttaagttttttccccccaaaattatcagtgctctgcttttagtcacgtgtattttcattaccactcgtaaaaaggtatcttttttaaatgaattaaatattgaaacactgtacaccatagtttacaatattatgtttcctaattaaaataagaattgaatgtcaatatgagatattaaaataagcacagaaaatcactccgccattcccaattagccccttacaccaacaaaaataacaactggccccgcgccccagggcagacctctgaggcgcttctttaacgagggaaattaag

SEQ ID NO: 310217 - DNA, 884 bp, Homo sapiens
  misc_feature (1)..(1): n is a, c, g, or t
ntcgttcggaaactgactctcttctgaaccagcgctacaggaatccaaatgagactcagaacaatagcacaagctggcctgtcttcaaaagcactgaacaaaaatatctaaccttgaatacagagtcaacaagaataatgacgaaactacgtgctcaacaatgtcgattctggacatcattttttccaaaagtcttggaaatgacaggaaatattgatgaagcagaatgggagtggaaagcaggattccatcgctggaacaattacatgatggactggaaaaatcaatttaacgattacactagcaagaaagaaagttgtgtgggtctctaattaatagatttaccctttatagaacatattttcctttagatcaaggcaaaaatatcaggagcttttttacacacctactaaaaaagttattatgtagctgaaacaaaaatgccagaaggataatattgattcctcacatctttaacttagtattttacctagcatttcaaaacccaaatggctagaacatgtttaattaaatttcacaatataaagttctacagttaattatgtgcatattaaaacaatggcctggttcaatttctttctttccttaataaatttaagttttttccccccaaaattatcagtgctctgcttttagtcacgtgtattttcattaccactcgtaaaaaggtatcttttttaaatgaattaaatattgaaacactgtacaccatagtttacaatattatgtttcctaattaaaataagaattgaatgtcaatatgagatattaaaataagcacagaaaatcacatcaccaatcgctggtcctctcgatattttaacatctccgccgaaaaatgaaatgaacagcgggccccgtgg

SEQ ID NO: 310218 - DNA, 1159 bp, Homo sapiens
  misc_feature (1)..(1): n is a, c, g, or t
ntcgttcggaaactgactctcttctgaaccagcgctacaggaatccaaatgagactcagaacaatagcacaagctggcctgtcttcaaaagcactgaacaaaaatatctaaccttgaatacagagtcaacaagaataatgacgaaactacgtgctcaacaatgtcgattctggacatcattttttccaaaagtcttggaaatgacaggaaatattgatgaagcagaatgggagtggaaagcaggattccatcgctggaacaattacatgatggactggaaaaatcaatttaacgattacactagcaagaaagaaagttgtgtgggtctctaattaatagatttaccctttatagaacatattttcctttagatcaaggcaaaaatatcaggagcttttttacacacctactaaaaaagttattatgtagctgaaacaaaaatgccagaaggataatattgattcctcacatctttaacttagtattttacctagcatttcaaaacccaaatggctagaacatgtttaattaaatttcacaatataaagttctacagttaattatgtgcatattaaaacaatggcctggttcaatttctttctttccttaataaatttaagttttttccccccaaaattatcagtgctctgcttttagtcacgtgtattttcattaccactcgtaaaaaggtatcttttttaaatgaattaaatattgaaacactgtacaccatagtttacaatattatgtttcctaattaaaataagaattgaatgtcaatatgagatattaaaataagcacagaaaatcagaaacgatggcgatcgcgatttgagattttacacgaaacacatgggcttcgtgggcttacccgggggactcttgcagggcggttcctttgaagaggggtaatgtatgatcatccgtaatcgactccctacctcgccgttgggagcggcgacgctataatgcaattataagcggccccccgtcgtccccaatcagcggcagccgcgaaatacacggggcgacgggcgtgatggtctgcactcggaaccgacgataatggcctcgtccgtacggacgcccagtcgagaccacaaccggcctacgctcaggaggaacctgatgtgtttgctcgaccagcactccacgtcgg

SEQ ID NO: 310219 - DNA, 884 bp, Homo sapiens
  misc_feature (1)..(1): n is a, c, g, or t
  misc_feature (814)..(814): n is a, c, g, or t
ntcgttcggaaactgactctcttctgaaccagcgctacaggaatccaaatgagactcagaacaatagcacaagctggcctgtcttcaaaagcactgaacaaaaatatctaaccttgaatacagagtcaacaagaataatgacgaaactacgtgctcaacaatgtcgattctggacatcattttttccaaaagtcttggaaatgacaggaaatattgatgaagcagaatgggagtggaaagcaggattccatcgctggaacaattacatgatggactggaaaaatcaatttaacgattacactagcaagaaagaaagttgtgtgggtctctaattaatagatttaccctttatagaacatattttcctttagatcaaggcaaaaatatcaggagcttttttacacacctactaaaaaagttattatgtagctgaaacaaaaatgccagaaggataatattgattcctcacatctttaacttagtattttacctagcatttcaaaacccaaatggctagaacatgtttaattaaatttcacaatataaagttctacagttaattatgtgcatattaaaacaatggcctggttcaatttctttctttccttaataaatttaagttttttccccccaaaattatcagtgctctgcttttagtcacgtgtattttcattaccactcgtaaaaaggtatcttttttaaatgaattaaatattgaaacactgtacaccatagtttacaatattatgtttcctaattaaaataagaattgaatgtcaatatgagatattaaaataagcacagaaaatcactnccctcaagaataataaaaaataaaaaatgggcttgtctgagcctatcgtgggagttttgcgcacagtatc

SEQ ID NO: 310220 - DNA, 634 bp, Homo sapiens
  misc_feature (1)..(1): n is a, c, g, or t
ntcgttcggaaactgactctcttctgaaccagcgctacaggaatccaaatgagactcagaacaatagcacaagctggcctgtcttcaaaagcactgaacaaaaatatctaaccttgaatacagagtcaacaagaataatgacgaaactacgtgctcaacaatgtcgattctggacatcattttttccaaaagtcttggaaatgacaggaaatattgatgaagcagaatgggagtggaaagcaggattccatcgctggaacaattacatgatggactggaaaaatcaatttaacgattacactagcaagaaagaaagttgtgtgggtctctaattaatagatttaccctttatagaacatattttcctttagatcaaggcaaaaatatcaggagcttttttacacacctactaaaaaagttattatgtagctgaaacaaaaatgccagaaggataatattgattcctcacatctttaacttagtattttacctagcatttcaaaacccaaatggctagaacatgtttaattaaatttcacaatataaagttctacagttaattatgtgcatattaaaacaatggcctggttcaatttctttctttccttaataaatttaagttttttccccccaa

SEQ ID NO: 310221 - DNA, 1062 bp, Homo sapiens
  misc_feature (1)..(1): n is a, c, g, or t
  misc_feature (925)..(925): n is a, c, g, or t
  misc_feature (945)..(945): n is a, c, g, or t
  misc_feature (949)..(949): n is a, c, g, or t
  misc_feature (954)..(956): n is a, c, g, or t
  misc_feature (959)..(959): n is a, c, g, or t
  misc_feature (963)..(963): n is a, c, g, or t
  misc_feature (965)..(965): n is a, c, g, or t
ntcgttcggaaactgactctcttctgaaccagcgctacaggaatccaaatgagactcagaacaatagcacaagctggcctgtcttcaaaagcactgaacaaaaatatctaaccttgaatacagagtcaacaagaataatgacgaaactacgtgctcaacaatgtcgattctggacatcattttttccaaaagtcttggaaatgacaggctgaggagtaggaggaggggaaaaggagctgttggtctcgctgtctctggattgacagaggtggaagaaaatccacatgaaatattgatgaagcagaatgggagtggaaagcaggattccatcgctggaacaattacatgatggactggaaaaatcaatttaacgattacactagcaagaaagaaagttgtgtgggtctctaattaatagatttaccctttatagaacatattttcctttagatcaaggcaaaaatatcaggagcttttttacacacctactaaaaaagttattatgtagctgaaacaaaaatgccagaaggataatattgattcctcacatctttaacttagtattttacctagcatttcaaaacccaaatggctagaacatgtttaattaaatttcacaatataaagttctacagttaattatgtgcatattaaaacaatggcctggttcaatttctttctttccttaataaatttaagttttttccccccaaaattatcagtgctctgcttttagtcacgtgtattttcattaccactcgtaaaaaggtatcttttttaaatgaattaaatattgaaacactgtacaccatagtttacaatattatgtttcctaattaaaataagaattgaatgtcaatatgagatattaaaataagcacagaaaatcaaaaaaaaaatggcctcgttggcctcaacggtgganctctgcgccgcttccctaangagngtatnnngancctncncagtgactggctacgctccgccgtccgcctctggagatcggttgatctctgctcacggcggcgctcgtgagccccggtgtgggacggccgacagcgg

SEQ ID NO: 310222 - DNA, 787 bp, Homo sapiens
  misc_feature (1)..(1): n is a, c, g, or t
ntcgttcggaaactgactctcttctgaaccagcgctacaggaatccaaatgagactcagaacaatagcacaagctggcctgtcttcaaaagcactgaacaaaaatatctaaccttgaatacagaacgtgctcaacaatgtcgattctggacatcattttttccaaaagtcttggaaatgacaggaaatattgatgaagcagaatgggagtggaaagcaggattccatcgctggaacaattacatgatggactggaaaaatcaatttaacgattacactagcaagaaagaaagttgtgtgggtctctaattaatagatttaccctttatagaacatattttcctttagatcaaggcaaaaatatcaggagcttttttacacacctactaaaaaagttattatgtagctgaaacaaaaatgccagaaggataatattgattcctcacatctttaacttagtattttacctagcatttcaaaacccaaatggctagaacatgtttaattaaatttcacaatataaagttctacagttaattatgtgcatattaaaacaatggcctggttcaatttctttctttccttaataaatttaagttttttccccccaaaattatcagtgctctgcttttagtcacgtgtattttcattaccactcgtaaaaaggtatcttttttaaatgaattaaatattgaaacactgtacaccatagtttacaatattatgtttcctaattaaaataagaattgaatgtcaatatgagatattaaaataagcacagaaaatca

SEQ ID NO: 310223 - DNA, 830 bp, Homo sapiens
  misc_feature (1)..(1): n is a, c, g, or t
  misc_feature (693)..(693): n is a, c, g, or t
  misc_feature (713)..(713): n is a, c, g, or t
  misc_feature (717)..(717): n is a, c, g, or t
  misc_feature (722)..(724): n is a, c, g, or t
  misc_feature (727)..(727): n is a, c, g, or t
  misc_feature (731)..(731): n is a, c, g, or t
  misc_feature (733)..(733): n is a, c, g, or t
ntcgttcggaaactgactctcttctgaaccagcgctacaggaatccaaatgagactcagaacaatagcacaagctggcctgtcttcaaaagcactgaacaaaaatatctaaccttgaatacagagtcaacaagaataatgacgaaactacgtgctcaacaatgtcgattctggacatcattttttccaaaagtcttggaaatgacaggaaatattgatgaagcagaatgggagtggaaagcaggattccatcgctggaacaattacatgatggactggaaaaatcaatttaacgattacactagcaagaaagaaagttgtgtgggtctctaattaatagatttaccctttatagaacatattttcctttagatcaaggcaaaaatatcaggagcttttttacacacctactaaaaaagttattatgtagctgaaacaaaaatgccagaaggataatattgattcctcacatctttaacttagtattttacctagcatttcaaaacccaaatggctagaacatgtttaattaaatttcacaatataaagttctacagttaattatgtgcatattaaaacaatggcctggttcaatttctttctttccttaataaatttaagttttttccccccaaaaaaaaaataatggcccttaacaaaaaaaaaaatggcctcgttggcctcaacggtgganctctgcgccgcttccctaangagngtatnnngancctncncagtgactggctacgctccgccgtccgcctctggagatcggttgatctctgctcacggcggcgctcgtgagccccggtgtgggacggccgacagcgg

SEQ ID NO: 310224 - DNA, 919 bp, Homo sapiens
  misc_feature (1)..(1): n is a, c, g, or t
ntcgttcggaaactgactctcttctgaaccagcgctacaggaatccaaatgagactcagaacaatagcacaagctggcctgtcttcaaaagcactgaacaaaaatatctaaccttgaatacagagtcaacaagaataatgacgaaactacgtgctcaacaatgtcgattctggacatcattttttccaaaagtcttggaaatgacaggaaatattgatgaagcagaatgggagtggaaagcaggattccatcgctggaacaattacatgatggactggaaaaatcaatttaacgattacactagcaagaaagaaagttgtgtgggtctctaattaatagatttaccctttatagaacatattttcctttagatcaaggcaaaaatatcaggagcttttttacacacctactaaaaaagttattatgtagctgaaacaaaaatgccagaaggataatattgattcctcacatctttaacttagtattttacctagcatttcaaaacccaaatggctagaacatgtttaattaaatttcacaatataaagttctacagttaattatgtgcatattaaaacaatggcctggttcaatttctttctttccttaataaatttaagttttttccccccaactccaatcaagttttttgccccccataaataaagacatattggactatattagttttaagcggcgggtgctctccagaccgcttccttctcatgagggcttactacccgctactttagcccctgactcacatgcgtttgttactctcgtgttccccaaaccgcgaccaacgccctcactaggcgactatactgttctcaccgagtagcgagacgccccactactcacttcttatttcacggtttaacacgctcccccccccgatagccgtttttttctttcatct

SEQ ID NO: 310225 - DNA, 873 bp, Homo sapiens
  misc_feature (1)..(1): n is a, c, g, or t
  misc_feature (825)..(825): n is a, c, g, or t
ntcgttcggaaactgactctcttctgaaccagcgctacaggaatccaaatgagactcagaacaatagcacaagctggcctgtcttcaaaagcactgaacaaaaatatctaaccttgaatacagagtcaacaagaataatgacgaaactacgtgctcaacaatgtcgattctggacatcattttttccaaaagtcttggaaatgacaggaaatattgatgaagcagaatgggagtggaaagcaggattccatcgctggaacaattacatgatggactggaaaaatcaatttaacgattacactagcaagaaagaaagttgtgtgggtctctaattaatagatttaccctttatagaacatattttcctttagatcaaggcaaaaatatcaggagcttttttacacacctactaaaaaagttattatgtagctgaaacaaaaatgccagaaggataatattgattcctcacatctttaacttagtattttacctagcatttcaaaacccaaatggctagaacatgtttaattaaatttcacaatataaagttctacagttaattatgtgcatattaaaacaatggcctggttcaatttctttctttccttaataaatttaagttttttccccccaatctgtttaacgcactcggcatccccattacaaccggacaaaggtctcttgtttaatataagtaatgcttgccgccctgatccccctccacgaccaactcactttccctctacgccaatatcgcctggcgccccagaagtatatagtcctcaccaatcgccctaaaccccccgccgccctgtcgtattgacngtcgaactataccccctcccccccctcgatgctttttctctgtctatc

SEQ ID NO: 310226 - DNA, 857 bp, Homo sapiens
  misc_feature (1)..(1): n is a, c, g, or t
ntcgttcggaaactgactctcttctgaaccagcgctacaggaatccaaatgagactcagaacaatagcacaagctggcctgtcttcaaaagcactgaacaaaaatatctaaccttgaatacagagtcaacaagaataatgacgaaactacgtgctcaacaatgtcgattctggacatcattttttccaaaagtcttggaaatgacaggaaatattgatgaagcagaatgggagtggaaagcaggattccatcgctggaacaattacatgatggactggaaaaatcaatttaacgattacactagcaagaaagaaagttgtgtgggtctctaattaatagatttaccctttatagaacatattttcctttagatcaaggcaaaaatatcaggagcttttttacacacctactaaaaaagttattatgtagctgaaacaaaaatgccagaaggataatattgattcctcacatctttaacttagtattttacctagcatttcaaaacccaaatggctagaacatgtttaattaaatttcacaatataaagttctacagttaattatgtgcatattaaaacaatggcctggttcaatttctttctttccttaataaatttaagttttttccccccaactagaatcagttttttgcgtaataagtatgatgggtctgcttttacgcgcgggattaccattatacatgtactaagggttctttataattgattattattggtcactgacacctagggttctgtcaatttacgctaataaaatcagattcaatgtagtttggaatggaaggaggtgcatgagatgtctatctttaaacggcatatttcatcctatatctgtac

SEQ ID NO: 310227 - DNA, 815 bp, Homo sapiens
  misc_feature (1)..(1): n is a, c, g, or t
ntcgttcggaaactgactctcttctgaaccagcgctacaggaatccaaatgagactcagaacaatagcacaagctggcctgtcttcaaaagcactgaacaaaaatatctaaccttgaatacagagtcaacaagaataatgacgaaactacgtgctcaacaatgtcgattctggacatcattttttccaaaagtcttggaaatgacaggaaatattgatgaagcagaatgggagtggaaagcaggattccatcgctggaacaattacatgatggactggaaaaatcaatttaacgattacactagcaagaaagaaagttgtgtgggtctctaattaatagatttaccctttatagaacatattttcctttagatcaaggcaaaaatatcaggagcttttttacacacctactaaaaaagttattatgtagctgaaacaaaaatgccagaaggataatattgattcctcacatctttaacttagtattttacctagcatttcaaaacccaaatggctagaacatgtttaattaaatttcacaatataaagttctacagttaattatgtgcatattaaaacaatggcctggttcaatttctttctttccttaataaatttaagttttttccccccaaagtcttaataccttgtatttacgtatcattcctccacggtcttcttgttacacgaatcgatgttgaaccatagggcacctattagtcgagtgtttggatgctcatgcaggacagatggggttagaatcgaaatataagatatcctctgtgaaccgatcattacaaaggcaaaattcatctc

SEQ ID NO: 310228 - DNA, 795 bp, Homo sapiens
  misc_feature (1)..(1): n is a, c, g, or t
ntcgttcggaaactgactctcttctgaaccagcgctacaggaatccaaatgagactcagaacaatagcacaagctggcctgtcttcaaaagcactgaacaaaaatatctaaccttgaatacagagtcaacaagaataatgacgaaactacgtgctcaacaatgtcgattctggacatcattttttccaaaagtcttggaaatgacaggaaatattgatgaagcagaatgggagtggaaagcaggattccatcgctggaacaattacatgatggactggaaaaatcaatttaacgattacactagcaagaaagaaagttgtgtgggtctctaattaatagatttaccctttatagaacatattttcctttagatcaaggcaaaaatatcaggagcttttttacacacctactaaaaaagttattatgtagctgaaacaaaaatgccagaaggataatattgattcctcacatctttaacttagtattttacctagcatttcaaaacccaaatggctagaacatgtttaattaaatttcacaatataaagttctacagttaattatgtgcatattaaaacaatggcctggttcaatttctttctttccttaataaatttaagttttttccccccaaccgccgaagcacttgtaccccattaccactcccaaataggatttttttaaataacaacacgtggagcactgtgcacttattttcaaactctgcgtcctagttaatatatcattgatagttatttaaaatcacaatcacaaattcgatactttcttcacgat

SEQ ID NO: 310229 - DNA, 806 bp, Homo sapiens
  misc_feature (1)..(1): n is a, c, g, or t
ntcgttcggaaactgactctcttctgaaccagcgctacaggaatccaaatgagactcagaacaatagcacaagctggcctgtcttcaaaagcactgaacaaaaatatctaaccttgaatacagagtcaacaagaataatgacgaaactacgtgctcaacaatgtcgattctggacatcattttttccaaaagtcttggaaatgacaggaaatattgatgaagcagaatgggagtggaaagcaggattccatcgctggaacaattacatgatggactggaaaaatcaatttaacgattacactagcaagaaagaaagttgtgtgggtctctaattaatagatttaccctttatagaacatattttcctttagatcaaggcaaaaatatcaggagcttttttacacacctactaaaaaagttattatgtagctgaaacaaaaatgccagaaggataatattgattcctcacatctttaacttagtattttacctagcatttcaaaacccaaatggctagaacatgtttaattaaatttcacaatataaagttctacagttaattatgtgcatattaaaacaatggcctggttcaatttctttctttccttaataaatttaagttttttccccccaaataaaataattggccttatggtttcagaaggggatctctgcgcaccatacgttgtatgaggggtacttattatcccttggtcactgctctcagtcctcagaccaacgttttcagagacgagtataaatattaatatggagtcaatggtgttccccgcacccgtgagacgacg

SEQ ID NO: 310230 - DNA, 711 bp, Homo sapiens
  misc_feature (1)..(1): n is a, c, g, or t
  misc_feature (676)..(676): n is a, c, g, or t
ntcgttcggaaactgactctcttctgaaccagcgctacaggaatccaaatgagactcagaacaatagcacaagctggcctgtcttcaaaagcactgaacaaaaatatctaaccttgaatacagagtcaacaagaataatgacgaaactacgtgctcaacaatgtcgattctggacatcattttttccaaaagtcttggaaatgacaggaaatattgatgaagcagaatgggagtggaaagcaggattccatcgctggaacaattacatgatggactggaaaaatcaatttaacgattacactagcaagaaagaaagttgtgtgggtctctaattaatagatttaccctttatagaacatattttcctttagatcaaggcaaaaatatcaggagcttttttacacacctactaaaaaagttattatgtagctgaaacaaaaatgccagaaggataatattgattcctcacatctttaacttagtattttacctagcatttcaaaacccaaatggctagaacatgtttaattaaatttcacaatataaagttctacagttaattatgtgcatattaaaacaatggcctggttcaatttctttctttccttaataaatttaagttttttccccccaaaaatttaagcgtttgctttaggccggttttttttacactctnaaagtatttttaaagataaaatgaaacctgcacct

SEQ ID NO: 310231 - DNA, 972 bp, Homo sapiens
  misc_feature (1)..(1): n is a, c, g, or t
ntcgttcggaaactgactctcttctgaaccagcgctacaggaatccaaatgagactcagaacaatagcacaagctggcctgtcttcaaaagcactgaacaaaaatatctaaccttgaatacagagtcaacaagaataatgacgaaactacgtgctcaacaatgtcgattctggacatcattttttccaaaagtcttggaaatgacaggaaatattgatgaagcagaatgggagtggaaagcaggattccatcgctggaacaattacatgatggactggaaaaatcaatttaacgattacactagcaagaaagaaagttgtgtgggtctctaattaatagatttaccctttatagaacatattttcctttagatcaaggcaaaaatatcaggagcttttttacacacctactaaaaaagttattatgtagctgaaacaaaaatgccagaaggataatattgattcctcacatctttaacttagtattttacctagcatttcaaaacccaaatggctagaacatgtttaattaaatttcacaatataaagttctacagttaattatgtgcatattaaaacaatggcctggttcaatttctttctttccttaataaatttaagttttttccccccaaaggggggagtggcaattaccagtaagacaaaggagtgtttcttacttgaactaagcaacgccaccctgccaccgatagcgcacccgactacgccgcctgcgcccccaccagccggccgcccccccccccattttcctcgtctgtccaccgcccccatcgcccgaatcgcatgccccatccgaccaacctgcagcccgcccctcttccgaccaggcggcgtcctcccccgccggagaccatgcgcccggacgcacccggcacaggagacacgcgacgcccggacgcaatcccccatcacgcaccctcggactcgcacgcagcggcggctcgatggcccg

SEQ ID NO: 310232 - DNA, 524 bp, Homo sapiens
  misc_feature (1)..(1): n is a, c, g, or t
ntcgttcggaaactgactctcttctgaaccagcgctacaggaatccaaatgagactcagaacaatagcacaagctggcctgtcttcaaaagcactgaacaaaaatatctaaccttgaatacagagtcaacaagaataatgacgaaactattctggacatcattttttccaaaagtcttggaaatgacaggaaatattgatgaagcagaatgggagtggaaagcaggaattacatgatggactggaaaaatcaatttaacgattacactagcaagaaagaaagttgtgtgggtctctaattaatagattttttcctttagatcaaggcaaaaatatcaggagcttttttacacacctactaaaaaagttattatgtagctttaacttagtattttacctagcatttcaaaacccaaatggctagaacatgtttaattaaatttcacaatataaagttctacagttaattaatggcctggttcaatttctttctttccttaataaatttaagttttttccccccaa

SEQ ID NO: 310233 - DNA, 826 bp, Homo sapiens
  misc_feature (1)..(1): n is a, c, g, or t
ntcgttcggaaactgactctcttctgaaccagcgctacaggaatccaaatgagactcagaacaatagcacaagctggcctgtcttcaaaagcactgaacaaaaatatctaaccttgaatacagagtcaacaagaataatgacgaaactacgtgctcaacaatgtcgattctggacatcattttttccaaaagtcttggaaatgacaggaaatattgatgaagcagaatgggagtggaaagcaggattccatcgctggaacaattacatgatggactggaaaaatcaatttaacgattacactagcaagaaagaaagttgtgtgggtctctaattaatagatttaccctttatagaacatattttcctttagatcaaggcaaaaatatcaggagcttttttacacacctactaaaaaagttattatgtagctgaaacaaaaatgccagaaggataatattgattcctcacatctttaacttagtattttacctagcatttcaaaacccaaatggctagaacatgtttaattaaatttcacaatataaagttctacagttaatttggtgtatgtaaaggatggtgtgtgcttactgtgtttatttacttctatttttatcgcctttgtcattttagatattaatcttttctgtttataggctcgtgtactgtcttaaggtcctctgtgtgaagtgtcgttgtttatagttcttgaatatttaccaccttctactaactgacgtccactccgcatcatcctcatcttttgaccttaattcatcgacgattgctagttccctatatacaactatcattgcataccttcca

SEQ ID NO: 310234 - DNA, 959 bp, Homo sapiens
  misc_feature (1)..(1): n is a, c, g, or t
  misc_feature (636)..(636): n is a, c, g, or t
ntcgttcggaaactgactctcttctgaaccagcgctacaggaatccaaatgagactcagaacaatagcacaagctggcctgtcttcaaaagcactgaacaaaaatatctaaccttgaatacagagtcaacaagaataatgacgaaactacgtgctcaacaatgtcgattctggacatcattttttccaaaagtcttggaaatgacaggaaatattgatgaagcagaatgggagtggaaagcaggattccatcgctggaacaattacatgatggactggaaaaatcaatttaacgattacactagcaagaaagaaagttgtgtgggtctctaattaatagatttaccctttatagaacatattttcctttagatcaaggcaaaaatatcaggagcttttttacacacctactaaaaaagttattatgtagctgaaacaaaaatgccagaaggataatattgattcctcacatctttaacttagtattttacctagcatttcaaaacccaaatggctagaacatgtttaattaaatttcacaatataaagttctacagttaattaaaaaaaataaaaccaaaaagaaccaaaaaaaatgtacagatagaacaggaccagagcggcgacacaaactaanataaggcccttttgggcccaaaagggggaggtctttgggcgcgtttcctttaaggggggggatatcatgatcctggttcctgatgtcaggcgcaggggaaagtcgctggggagaaggtttctgtcccattaaaggtgggaatcccggtttccccaaaatttggggatactcgcgagaaaaactcgctaccttaggccctttaggcgcgagtccacataaagggccgcgtgggggggttagaccgtgaggagccggcccgtggaagattcagcaagtggaactgctcaaccaggtggagcatagaccgtgggaattagaagttg

SEQ ID NO: 310235 - DNA, 634 bp, Homo sapiens
  misc_feature (1)..(1): n is a, c, g, or t
ntcgttcggaaactgactctcttctgaaccagcgctacaggaatccaaatgagactcagaacaatagcacaagctggcctgtcttcaaaagcactgaacaaaaatatctaaccttgaatacagagtcaacaagaataatgacgaaactacgtgctcaacaatgtcgattctggacatcattttttccaaaagtcttggaaatgacaggaaatattgatgaagcagaatgggagtggaaagcaggattccatcgctggaacaattacatgatggactggaaaaatcaatttaacgattacactagcaagaaagaaagttgtgtgggtctctaattaatagatttaccctttatagaacatattttcctttagatcaaggcaaaaatatcaggagcttttttacacacctactaaaaaagttattatgtagctgaaacaaaaatgccagaaggataatattgattcctcacatctttaacttagtattttacctagcatttcaaaacccaaatggctagaacatgtttaattaaatttcacaatataaagttctacagttaattttatgtagtttgaactttgcaaacgcggcctgagtcatatcttctttactaaaaatcttacacggtcccccg

SEQ ID NO: 310236 - DNA, 865 bp, Homo sapiens
  misc_feature (1)..(1): n is a, c, g, or t
  misc_feature (865)..(865): n is a, c, g, or t
ntcgttcggaaactgactctcttctgaaccagcgctacaggaatccaaatgagactcagaacaatagcacaagctggcctgtcttcaaaagcactgaacaaaaatatctaaccttgaatacagagtcaacaagaataatgacgaaactacgtgctcaacaatgtcgattctggacatcattttttccaaaagtcttggaaatgacaggaaatattgatgaagcagaatgggagtggaaagcaggattccatcgctggaacaattacatgatggactggaaaaatcaatttaacgattacactagcaagaaagaaagttgtgtgggtctctaattaatagatttaccctttatagaacatattttcctttagatcaaggcaaaaatatcaggagcttttttacacacctactaaaaaagttattatgtagctgaaacaaaaatgccagaaggataatattgattcctcacatctttaacttagtattttacctagcatttcaaaacccaaatggctagaacatgatacagactctaaagcccccacggtaactgtgggcctatttaacactggcttgggcactcttttctctccttatcaacacaccgaattccacccgaaaaaacaccccacgcccccgttcccctcaccagcgagcactcgctctttttccttttaggagggcgtcctcttacctccttactggatactgccgttgaccgccgcacctgctattagccctctatgctcctatcctcattcccgcccctgccgtactatgtatcgcagcgaaccttattgcccccggcggcctacacaggcactattccccttatagtgctgtgaatggccccgccgcccgcacn

SEQ ID NO: 310237 - DNA, 911 bp, Homo sapiens
  misc_feature (1)..(1): n is a, c, g, or t
ntcgttcggaaactgactctcttctgaaccagcgctacaggaatccaaatgagactcagaacaatagcacaagctggcctgtcttcaaaagcactgaacaaaaatatctaaccttgaatacagagtcaacaagaataatgacgaaactacgtgctcaacaatgtcgattctggacatcattttttccaaaagtcttggaaatgacaggaaatattgatgaagcagaatgggagtggaaagcaggattccatcgctggaacaattacatgatggactggaaaaatcaatttaacgattacactagcaagaaagaaagttgtgtgggtctctaattaatagatttaccctttatagaacatattttcctttagatcaaggcaaaaatatcaggagcttttttacacacctactaaaaaagttattatgtagcctcaccccccgcctcacccagctttcaccgccccgacccacacctccgcgcctggacacccctagtggtatcccccccgcgacgcgcgcgccccgacctagccaatgcccacccagcgccccgtcaatccgcccctcaaagccccgtacctcctagttatcatcagtcctgcctcgcccgcaccctataagaacgaccctactcgacgaacaggtcccctcccacccgcccaaactacctgtctctacgccgcaccgctctacacaccctaacccgacacctcgactggagatggcacaccgccccgccacaacaataaacacctcgtacgcctccagctcccccccagccccaacataggacgcaaaactcgctatagaccaccccccccccgtccactcataccacgacacgcctaatgagcccggcggccgcccacgcacggtaccaccagtcgcaccacgcatcagcgaccgccaag

SEQ ID NO: 310238 - DNA, 914 bp, Homo sapiens
  misc_feature (1)..(1): n is a, c, g, or t
  misc_feature (898)..(898): n is a, c, g, or t
  misc_feature (914)..(914): n is a, c, g, or t
ntcgttcggaaactgactctcttctgaaccagcgctacaggaatccaaatgagactcagaacaatagcacaagctggcctgtcttcaaaagcactgaacaaaaatatctaaccttgaatacagagtcaacaagaataatgacgaaactacgtgctcaacaatgtcgattctggacatcattttttccaaaagtcttggaaatgacaggaaatattgatgaagcagaatgggagtggaaagcaggattccatcgctggaacaattacatgatggactggaaaaatcaatttaacgattacactagcaagaaagaaagttgtgtgggtctctaattaatagatttaccctttatagaacatattttcctttagatcaaggcaaaaatatcaggagcttttttacacacctactaaaaaagttattatgtagcctgttcctcactcagcaccgcctgcaggccaatatggaatacctacatctccaccccagtgttgaaccctccacttggtgcacccaccggtctaccacctgccatttttcgattcgacgccaacgccttctactaataatctatgcccgcttccgtcctaattgcactggctactctcctcgatcctctataatctcatcgccccccctcgtccccccggctctcatcacccacacccctcagtgtaaccaccctgagccgccacgaggcatctaccgtctattattccagctacccctagtggaaagtaaccatgtccacgtccatgccacgtcacgcgcccttaattctacacaacatttcacctatatttactcccccccacctctataatactatcttgcacacctcatttcacctctgactcatcccctcaactaagaggtgactattacaccagatctctanacccgccgcccgcgan

SEQ ID NO: 310239 - DNA, 862 bp, Homo sapiens
  misc_feature (1)..(1): n is a, c, g, or t
ntcgttcggaaactgactctcttctgaaccagcgctacaggaatccaaatgagactcagaacaatagcacaagctggcctgtcttcaaaagcactgaacaaaaatatctaaccttgaatacagagtcaacaagaataatgacgaaactacgtgctcaacaatgtcgattctggacatcattttttccaaaagtcttggaaatgacaggaaatattgatgaagcagaatgggagtggaaagcaggattccatcgctggaacaattacatgatggactggaaaaatcaatttaacgattacactagcaagaaagaaagttgtgtgggtctctaattaatagatttaccctttatagaacatattttcctttagatcaaggcaaaaatatcaggagcttttttacacacctactaaaaaagttattatgtagctgaaacaaaaatgccagaaggataatattgattcctcacatctttaacttagtattttacctagcatttcaaaacccaaatggctagaacatatggtctctccaactcccccaaataaactcgtccaccttatcctgccttttttaacccctggcctggtaaaattacttcctttcataaatacgataggattttcccccccccactctcactgccctgcttccgcccccccacttattcctctttactgtcaaagcgataatactacgcacacactcctagtcctctctcccccacacctatatattctcacactaccccatatttttctacgcccccccccacattaaacttccccgccctacgtcctccgcttctagcgagactccaagtctttcctcagatcccatcggtcgatgccttcacacgact

SEQ ID NO: 310240 - DNA, 659 bp, Homo sapiens
  misc_feature (1)..(1): n is a, c, g, or t
ntcgttcggaaactgactctcttctgaaccagcgctacaggaatccaaatgagactcagaacaatagcacaagctggcctgtcttcaaaagcactgaacaaaaatatctaaccttgaatacagagtcaacaagaataatgacgaaactacgtgctcaacaatgtcgattctggacatcattttttccaaaagtcttggaaatgacaggaaatattgatgaagcagaatgggagtggaaagcaggattccatcgctggaacaattacatgatggactggaaaaatcaatttaacgattacactagcaagaaagaaagttgtgtgggtctctaattaatagatttaccctttatagaacatattttcctttagatcaaggcaaaaatatcaggagcttttttacacacctactaaaaaagttattatgtagctgaaacaaaaatgccagaaggataatattgattcctcacatcgacgtgagggtgtttaccagggctttggaaaacgccaagggggtggaacatgttggagttgagtgagacggtctgaaagcggtccgcgtagtgattgtgcctgtagaagcgcaggggctggggtaaggatgttagttttgcttaagagaatgagggtgtcggcacgcgcagagcgatgacgcgtctc

SEQ ID NO: 310241 - DNA, 666 bp, Homo sapiens
  misc_feature (1)..(1): n is a, c, g, or t
  misc_feature (666)..(666): n is a, c, g, or t
ntcgttcggaaactgactctcttctgaaccagcgctacaggaatccaaatgagactcagaacaatagcacaagctggcctgtcttcaaaagcactgaacaaaaatatctaaccttgaatacagagtcaacaagaataatgacgaaactacgtgctcaacaatgtcgattctggacatcattttttccaaaagtcttggaaatgacaggaaatattgatgaagcagaatgggagtggaaagcaggattccatcgctggaacaattacatgatggactggaaaaatcaatttaacgattacactagcaagaaagaaagttgtgtgggtctctaattaatagatttaccctttatagaacatattttcctttagatcaaggcaaaaatatcaggagcttttttacacacctactaaaaaagttattatgtagcactattgtgaatcaggaaccagaagtgcgcgaaggcgcaagctggggaccgcagatcgtatactcgagagtcgaccttagccatgcagaacccgagagccttgacatcgtatagggaacttctcaaaatcacgtcctcatcaaagttgtgccttaacaagatgatgatggggtatcaggattagctcataaatccgacttagccctcccataattagtgtccgtgtacataggatn

SEQ ID NO: 310242 - DNA, 650 bp, Homo sapiens
  misc_feature (1)..(1): n is a, c, g, or t
ntcgttcggaaactgactctcttctgaaccagcgctacaggaatccaaatgagactcagaacaatagcacaagctggcctgtcttcaaaagcactgaacaaaaatatctaaccttgaatacagagtcaacaagaataatgacgaaactacgtgctcaacaatgtcgattctggacatcattttttccaaaagtcttggaaatgacaggaaatattgatgaagcagaatgggagtggaaagcaggattccatcgctggaacaattacatgatggactggaaaaatcaatttaacgattacactagcaagaaagaaagttgtgtgggtctctaattaatagatttaccctttatagaacatattttcctttagatcaaggcaaaaatatcaggagcttttttacacacctactaaaaaagttattatgtagcgtgaggtatagttgtattgatgacaatcttgcaataatgataaaaggggcgtcgaaatcatctggagaatgtggtggttgctatggggaccgccgtggtcagacgatgttatctagatcagaaaattttttttgctaataggatgtgaagagatatggaaaagaggagtgtgggagagagcctggatagttgctaggatgacgggggaggcaagcagcgg

SEQ ID NO: 310243 - DNA, 920 bp, Homo sapiens
  misc_feature (1)..(1): n is a, c, g, or t
ntcgttcggaaactgactctcttctgaaccagcgctacaggaatccaaatgagactcagaacaatagcacaagctggcctgtcttcaaaagcactgaacaaaaatatctaaccttgaatacagagtcaacaagaataatgacgaaactacgtgctcaacaatgtcgattctggacatcattttttccaaaagtcttggaaatgacaggaaatattgatgaagcagaatgggagtggaaagcaggattccatcgctggaacaattacatgatggactggaaaaatcaatttaacgattacactattgaataatagctgccttcggctccctaactttaaattagcccgttattacaacatacctcgaatttacaccaaaggatacacactatcgcatttctacaccccacccattacataaaccgtcacgtgtacgttcacgcaacctttgttctagcacgccaggtttatcaactattacattccttattacttatcccaacagaccgcacatcattatgaagcgatcttctcgtcccaggcccgtcttacactcccacctttatacatcatgtcatctgcgttctgtcgcacgcttttaatgtgcttcgtccccagcatagctatatacgcccccccacttttctttcctcgcccacagtatgtccacgcttcttcgatgacgtgcgtgcatctagtagcctacataagagatgagatttacgcttaactttggtgcgtcaacctactctactgcttacacctatcccgtacccaactgccatgctcgattctatccctctctccgctagtctatatcaaccacaaccagactaccgtctcccaccgactccgtcacacaaatatacgcaccgtttttaccttctccccccccatgcaccatactcttatattatattt

SEQ ID NO: 310244 - DNA, 811 bp, Homo sapiens
  misc_feature (1)..(1): n is a, c, g, or t
ntcgttcggaaactgactctcttctgaaccagcgctacaggaatccaaatgagactcagaacaatagcacaagctggcctgtcttcaaaagcactgaacaaaaatatctaaccttgaatacagagtcaacaagaataatgacgaaactattctggacatcattttttccaaaagtcttggaaatgacaggaaatattgatgaagcagaatgggagtggaaagcaggaattacatgatggactggaaaaatcaatttaacgattacactagcaagaaagaaagttgtgtgggtctctaattaatagattttttcctttagatcaaggcaaaaatatcaggagcttttttacacacctactaaaaaagttattatgtagctttaacttagtattttacctagcatttcaaaacccaaatggctagaacatgtttaattaaatttcacaatataaagttctacagttaattaatggcctggttcaatttctttctttccttaataaatttaagttttttccccccaaaattatcagtgctctgcttttagtcacgtgtattttcattaccactcgtaaaaagtgaattaaatattgaaacactgtacaccatagtttacaatattatgtttcctaattaaaataagaattgaatgtcaatatgagatattaaaataagcacagaaaatcaatattaaaataaacacagaatgcggctcaaatctgtttgttttttatataaaggcaagaaagaatcttaaaatgagaggctcagccactttaaaacaccttataatagaaacagaatgctgcta

SEQ ID NO: 310245 - DNA, 871 bp, Homo sapiens
  misc_feature (1)..(1): n is a, c, g, or t
ntcgttcggaaactgactctcttctgaaccagcgctacaggaatccaaatgagactcagaacaatagcacaagctggcctgtcttcaaaagcactgaacaaaaatatctaaccttgaatacagaacgtgctcaacaatgtcgattctggacatcattttttccaaaagtcttggaaatgacaggaaatattgatgaagcagaatgggagtggaaagcaggattccatcgctggaacaattacatgatggactggaaaaatcaatttaacgattacactagcaagaaagaaagttgtgtgggtctctaattaatagattttttcctttagatcaaggcaaaaatatcaggagcttttttacacacctactaaaaaagttattatgtagctgaaacaaaaatgccagaaggataatattgattcctcacatccatttcaaaacccaaatggctagaacatgtttaattaaatttcacaatataaagttctacagttaattatgtgcatattaaaacaatggcctggttcaatttctttctttccttaataaatttaagttttttccccccaaaattatcagtgctctgcttttagtcacgtgtattttcattaccactcgtaaaaaggtatcttttttaaatgaattaaatattgaaacactgtacaccatagtttacaatattatgtttcctaattaaaataagaattgaatgtcaatatgagatattaaaataagcacagaaaatcaatattaaaataaacacagaatgcggctcaaatctgtttgttttttatataaaggcaagaaagaatcttaaaatgagaggctcagccactttaaaacaccttataatagaaacagaatgctgcta

SEQ ID NO: 310246 - DNA, 679 bp, Homo sapiens
  misc_feature (1)..(1): n is a, c, g, or t
  misc_feature (549)..(549): n is a, c, g, or t
ntcgttcggaaactgactctcttctgaaccagcgctacaggaatccaaatgagactcagaacaatagcacaagctggcctgtcttcaaaagcactgaacaaaaatatctaaccttgaatacagagtcaacaagaataatgacgaaactattctggacatcattttttccaaaagtcttggaaatgacaggaaatattgatgaagcagaatgggagtggaaagcaggaattacatgatggactggaaaaatcaatttaacgattacactagcaagaaagaaagttgtgtgggtctctaattaatagattttttcctttagatcaaggcaaaaatatcaggagcttttttacacacctactaaaaaagttattatgtagctttaacttagtattttacctagcatttcaaaacccaaatggctagaacatgtttaattaaatttcacaatataaagttctacagttaattaatggcctggttcaatttctttctttccttaataaatttaagttttttccccccaaaaacaaaaaatagggcttcagtcgncaaataaagtacctcttagttaatatattagtatcctatctaactccattgaactagattttgctgtttgctaatataattcatttcactatagcgattttcgttattcacatataatggattaaaatct

SEQ ID NO: 310247 - DNA, 651 bp, Homo sapiens
  misc_feature (1)..(1): n is a, c, g, or t
ntcgttcggaaactgactctcttctgaaccagcgctacaggaatccaaatgagactcagaacaatagcacaagctggcctgtcttcaaaagcactgaacaaaaatatctaaccttgaatacagagtcaacaagaataatgacgaaactacgtgctcaacaatgtcgattctggacatcattttttccaaaagtcttggaaatgacagagcctatatgctgctactgtgagccaggaactgcactagcagctagagctgcacagatgaaaatgacagggtctgcttactcacagtgaagtggagtcagggcccaggaccatggaaagcttttaagaagagaagatacctgcactgaatctcaatgtgaaggcaaagtggagagaagccagataagcaggaaccagagatgaagtgtcttgtgcatcatgctaaagaatttaaattatattctgagtaaagccatttagtaattttaaatgagaaactgatatgttctggttatggattcataaatgtataatcttttactatattcacgagttattcttttttacctttgtcttcttagagtctagatggtcagaatattatatggcatcaacataataatttcatttctgaggtagggtctttcttccaaatagctgcttt

SEQ ID NO: 310248 - DNA, 656 bp, Homo sapiens
ggttggatgaaaccttcctcctactgcacagcccgcccccctacagccccggtccccacgcctagaagacagcggaactaagaaaagaagaggcctgtggacagaacaatcatgtctgactccctggtggtgtgcgaggtagacccagagctaacagaaaagctgaggaaattccgcttccgaaaagagacagacaatgcagccatcataatgaaggtggacaaagaccggcagatggtggtgctggaggaagaatttcagaacatttccccagaggagctcaaaatggagttgccggagagacagcccaggttcgtggtttacagctacaagtacgtgcatgacgatggccgagtgtcctaccctttgtgtttcatcttctccagccctgtgggctgcaagccggaacaacagatgatgtatgcagggagtaaaaacaggctggtgcagacagcagagctcacaaaggtgttcgaaatccgcaccactgatgacctcactgaggcctggctccaagaaaagttgtctttctttcgttgatctctgggctggggactgaattcctgatgtctgagtcctcaaggtgactggggacttggaacccctaggacctgaacaaccaagactttaaataaattttaaaatgcaaaaactcg

SEQ ID NO: 310249 - DNA, 600 bp, Homo sapiens
ggctaggtgcgaggccggggtgttggaaaagaagaggcctgtggacagaacaatcatgtctgactccctggtggtgtgcgaggtagacccagagctaacagaaaagctgaggaaattccgcttccgaaaagagacagacaatgcagccatcataatgaaggtggacaaagaccggcagatggtggtgctggaggaagaatttcagaacatttccccagaggagctcaaaatggagttgccggagagacagcccaggttcgtggtttacagctacaagtacgtgcatgacgatggccgagtgtcctaccctttgtgtttcatcttctccagccctgtgggctgcaagccggaacaacagatgatgtatgcagggagtaaaaacaggctggtgcagacagcagagctcacaaaggtgttcgaaatccgcaccactgatgacctcactgaggcctggctccaagaaaagttgtctttctttcgttgatctctgggctggggactgaattcctgatgtctgagtcctcaaggtgactggggacttggaacccctaggacctgaacaaccaagactttaaataaattttaaaatgcaaaaactcg

SEQ ID NO: 310250 - DNA, 721 bp, Homo sapiens
ggttggatgaaaccttcctcctactgcacagcccgcccccctacagccccggtccccacgcctagaagacagcggaactaagaaaagaagaggcctgtggacagaacaatcatgtctgactccctggtggtgtgcgaggtagacccagagctaacagaaaagctgaggaaattccgcttccgaaaagagacagacaatgcagccatcataatgaaggtggacaaagaccggcagatggtggtgctggaggaagaatttcagaacatttccccagaggagctcaaaatggagttgccggagagacagcccaggttcgtggtttacagctacaagtacgtgcatgacgatggccgagtgtcctaccctttgtgtttcatcttctccagccctgtgggctgcaagccggaacaacagatgatgtatgcagggagtaaaaacaggctggtgcagacagcagagctcacaaaggtgttcgaaatccgcaccactgatgacctcactgaggcctggctccaagaaaagttgtctttctttcgttgatctctgggctggggactgaattcctgatgtctgagtcctcaaggtgactggggacttggaacccctaggacctgaacaaccaagactttaaataaattttaaaatgcaaaaactcgacacaacaacaaaaacaaaagagcacaaaccttttgggcggccgaccccactccgaaacagttcc

SEQ ID NO: 310251 - DNA, 651 bp, Homo sapiens
gcttgcatagaacgcctgtctggtactggcaacagctcgagtcgtctgtacgtctctgtgtggtgtgctgatgtatagccctacatactagcatcaatgagtctgtagagataagttcctgtgttcttgcatcaaccagatagacaactgcccggcagtcataactgaacggtgctcgaacgacctgccgaattgagtgtgctgcgtggatcgtatgattgttactcgtaaatcattcacgcgcacgatcacgagagcgtacactcagtagtgatctatagactcgagagcacgcacgagcctcaggttcgtggtttacagctacaagtacgtgcatgacgatggccgagtgtcctaccctttgtgtttcatcttctccagccctgtgggctgcaagccggaacaacagatgatgtatgcagggagtaaaaacaggctggtgcagacagcagagctcacaaaggtgttcgaaatccgcaccactgatgacctcactgaggcctggctccaagaaaagttgtctttctttcgttgatctctgggctggggactgaattcctgatgtctgagtcctcaaggtgactggggacttggaacccctaggacctgaacaaccaagactttaaataaattttaaaatgcaaaaactcg

SEQ ID NO: 310252 - DNA, 457 bp, Homo sapiens
actcctgatctcaggtgatccacccgcctcggcctcccaaagtgctgggattataggtgtgagtcctgcgcccggccctatgattattttttaatcatttgttgtgtttgaggttcgtggtttacagctacaagtacgtgcatgacgatggccgagtgtcctaccctttgtgtttcatcttctccagccctgtgggctgcaagccggaacaacagatgatgtatgcagggagtaaaaacaggctggtgcagacagcagagctcacaaaggtgttcgaaatccgcaccactgatgacctcactgaggcctggctccaagaaaagttgtctttctttcgttgatctctgggctggggactgaattcctgatgtctgagtcctcaaggtgactggggacttggaacccctaggacctgaacaaccaagactttaaataaattttaaaatgcaaaaactcg

SEQ ID NO: 310253 - DNA, 295 bp, Homo sapiens
gcaattcttgtgcctcagactcccgagtagctgggatcacaggcgtgcaccaccatgccaggctaatattttgtatttttagtagagatggggttttgccatgttggtcaggctggtctccaactcctgacctcaggtgatccgcccgcctcggcctcccaaagtgctggcattacaggtgtgagccaccatgcccggccgatgtgatgggctggggtgattgggactgggaggtacagggtgagactgggagaaccaagtggttggaactgatatgaagagcctggcatggggg

SEQ ID NO: 310254 - DNA, 1108 bp, Homo sapiens
ggttggatgaaaccttcctcctactgcacagcccgcccccctacagccccggtccccacgcctagaagacagcggaactaagaaaagaagaggcctgtggacagaacaatcatgtctgactccctggtggtgtgcgaggtagacccagagctaacagaaaagctgaggaaattccgcttccgaaaagagacagacaatgcagccatcataatgaaggtggacaaagaccggcagatggtggtgctggaggaagaatttcagaacatttccccagaggagctcaaaatggagttgccggagagacagcccaggttcgtggtttacagctacaagtacgtgcatgacgatggccgagtgtcctaccctttgtgtttcatcttctccagccctgtgggctgcaagccggaacaacagatgatgtatgcagggagtaaaaacaggctggtgcagacagcagagctcacaaaggttcagactgggatggggctccagagtgttagggagaggtggtgtgggtcctgggtctgagggaagagggactagagtcctcactgtctcagtggtttttgtttttgtatttgtttttttaaagaactgggtctcgctctgtcatccaggctggagtgcagtggcacaacctcggctcactgcaacctcctcctcctggggttcaagcaattctcctgcctcagcctcccaagtagtgggacgacaggcacacgccaccacacctggctactttttgtatttttagtagagtcagggtttcaccatattggccaggctggtctcgaactcctgaccttaagtgatccacccacctcagcctcccaaagtgctctcttacaggtgagccaccgtgcccagccactgtctcagtgtttgagtagatcataatgccgagacctctctctgcccaggtgttcgaaatccgcaccactgatgacctcactgaggcctggctccaagaaaagttgtctttctttcgttgatctctgggctggggactgaattcctgatgtctgagtcctcaaggtgactggggacttggaacccctaggacctgaacaaccaagactttaaataaattttaaaatgcaaaaactcg

SEQ ID NO: 310255 - DNA, 573 bp, Homo sapiens
ggttggatgaaaccttcctcctactgcacagcccgcccccctacagccccggtccccacgcctagaagacagcggaactaagaaaagaagaggcctgtggacagaacaatcatgtctgactccctggtggtgtgcgaggtagacccagagctaacagaaaagctgaggaaattccgcttccgaaaagagacagacaatgcagccatcataatgaaggtggacaaagaccggcagatggtggtgctggaggaagaatttcagaacatttccccagaggagctcaaaatggagttgccggagagacagcccaggctgcaagccggaacaacagatgatgtatgcagggagtaaaaacaggctggtgcagacagcagagctcacaaaggtgttcgaaatccgcaccactgatgacctcactgaggcctggctccaagaaaagttgtctttctttcgttgatctctgggctggggactgaattcctgatgtctgagtcctcaaggtgactggggacttggaacccctaggacctgaacaaccaagactttaaataaattttaaaatgcaaaaactcg

SEQ ID NO: 310256 - DNA, 449 bp, Homo sapiens
ggttggatgaaaccttcctcctactgcacagcccgcccccctacagccccggtccccacgcctagaagacagcggaactaagaaaagaagaggcctgtggacagaacaatcatgtctgactccctggtggtgtgcgaggtagacccagagctaacagaaaagctgaggaaattccgcttccgaaaagagacagacaatgcagccatcataatgaaggtggacaaagaccggcagatggtggtgctggaggaagaatttcaggtgttcgaaatccgcaccactgatgacctcactgaggcctggctccaagaaaagttgtctttctttcgttgatctctgggctggggactgaattcctgatgtctgagtcctcaaggtgactggggacttggaacccctaggacctgaacaaccaagactttaaataaattttaaaatgcaaaaactcg

SEQ ID NO: 310257 - DNA, 665 bp, Homo sapiens
ggttggatgaaaccttcctcctactgcacagcccgcccccctacagccccggtccccacgcctagaagacagcggaactaagaaaagaagaggcctgtggacagaacaatcatgtgaaggtggacaaagaccggcagatggtggtgctggaggaagaatttcagaacatttccccagaggagctcaaaatggagttgccggagagacagcccaggttcgtggtttacagctacaagtacgtgcatgacgatggccgagtgtcctaccctttgtgtttcatcttctccagccctgtgggctgcaagccggaacaacagatgatgtatgcagggagtaaaaacaggctggtgcagacagcagagctcacaaaggtgttcgaaatccgcaccactgatgacctcactgaggcctggctccaagaaaagttgtctttctttcgttgatctctgggctggggactgaattcctgatgtctgagtcctcaaggtgactggggacttggaacccctaggacctgaacaaccaagactttaaataaattttaaaatgcaaaaactcgtcaaaacaaaaatactccatatttcatgggcttctcgttccgggggcggcccgtgttttgtcaatctttttccccaaggggaaaacgaatagacacgcggggtgaa

SEQ ID NO: 310258 - DNA, 868 bp, Homo sapiens
ggttggatgaaaccttcctcctactgcacagcccgcccccctacagccccggtccccacgcctagaagacagcggaactaagaaaagaagaggcctgtggacagaacaatcatgtctgactccctggtggtgtgcgaggtagacccagagctaacagaaaagctgaggaaattccgcttccgaaaagagacagacaatgcagccatcataaaacatttccccagaggagctcaaaatggagttgccggagagacagcccaggttcgtggtttacagctacaagtacgtgcatgacgatggccgagtgtcctaccctttgtgtttcatcttctccagccctgtgggctgcaagccggaacaacagatgatgtatgcagggagtaaaaacaggctggtgcagacagcagagctcacaaaggtgttcgaaatccgcaccactgatgacctcactgaggcctggctccaagaaaagttgtctttctttcgttgatctctgggctggggactgaattcctgatgtctgagtcctcaaggtgactggggacttggaacccctaggacctgaacaaccaagactttaaataaattttaaaatgcaaaaactcgaaaaaaaaaaaaaaaaaaaaaaagaaaaaaaaaaaaaaaaaaaaatggggggggcaagggccgaagaaggatctaaaaaaaacaagaggagggacggagccaacaaggacagcgaacagagcaaaagagccacgagaaaacacgggcaaaaagaggggggagccacccagaaaaaaaccggggggagacagagggtgcaaaacacacaaaaagaactgagagccaaaggggaaaaaaaaggagcaaagaagcgataaaaacg

SEQ ID NO: 310259 - DNA, 384 bp, Homo sapiens
atcttcccccacagaaggatgggagggcggtggtgagggcagatagggagggctgggcttgtgtcccccatggatcagggggagtgtctaatccctgtgtgccacccctccccagtgaaggtggacaaagaccggcagatggtggtgctggaggaagaatttcaggtgatgggctggggtgattgggactgggaggtacagggtgagactgggagaaccaagtggttggaactgatatgaagagcctggcatgggggtagaaagacctggagattggccgagcacagtggctcatgcctgtaatcccagcactttgggaggccgaggcaggtggatcacctgaggttgggagttcaagaccagcctggcaaacatggtgaaacc

SEQ ID NO: 310260 - DNA, 486 bp, Homo sapiens
tataggtgtgagtcctgcgcccggccctatgattattttttaatcatttgttgtgtttgaggtcagtaccctgagtcccagacatcaaccctgggttctcagactcagccaacatttcaaggctgtggactcaggtaatggctgttaagcctgggctgcaggccagagtcctgattttcaattccctttcacggtaggttcgtggtttacagctacaagtacgtgcatgacgatggccgagtgtcctaccctttgtgtttcatcttctccagccctgtgggtgagacacagctctactgtcctcaggagagggtcttcgattctgtgtgtgtgtgtttgtgtgtaaatgcgaatgtgtgcaggcacttgtgtaagagtgtgagcatgtgacagcctgtgtgtgactgggtgaggatgtgtgtgtgtcgcacgcatgatgtgggagggcagtgaagtggaggtgggggctcagattcaccaagagcc

SEQ ID NO: 310261 - DNA, 476 bp, Homo sapiens
  misc_feature (40)..(40): n is a, c, g, or t
ccgggtcgactactactactaaattcgcggccgcgtcgantgttcttctggcagataaccctacttaatctgaaagcatcagtgattttattatttctaataattaaataataagtaaaagtgactaccactcaatgtggaaaacttggaaaatacaaccacaatttggagaataaaatcaccaaaaagtctcacattcacaatatatcaactgttatttattttatgaatttgtgtatgtacccatatatatgtatgtttgctgtcatattatgtatttggcttgtaacctactttttatcatctgtaagtattctctaatattatttaaactcctttgaaaatatttttaagcctatataaaattgtcataagaatgtaccatagccttttaaagatttccctgatgttggatgtttagattgtttataatttatcagttataaaagtgctataattatattattgttcacaaa

SEQ ID NO: 310262 - DNA, 1731 bp, Homo sapiens
gaagcggcgccgccatcgcctcccggcgctccctccccgactcctaagtccttcggccgccaccatgtccgcctcggctgtcttcattctggacgttaagggcaagccattgatcagccgcaactacaagggcgatgtggccatgagcaagattgagcacttcatgcctttgctggtacagcgggaggaggaaggcgccctggccccgctgctgagccacggccaggtccacttcctatggatcaaacacagcaacctctacttggtggccaccacatcgaagaatgccaatgcctccctggtgtactccttcctgtataagacaatagaggtattctgcgaatacttcaaggagctggaggaggagagcatccgggacaactttgtcatcgtctacgagttgctggacgagctcatggactttggcttcccgcagaccaccgacagcaagatcctgcaggagtacatcactcagcagagcaacaagctggagacgggcaagtcacgggtgccacccactgtcaccaacgctgtgtcctggcgctccgagggtatcaagtataagaagaacgaggtcttcattgatgtcatagagtctgtcaacctgctggtcaatgccaacggcagcgtccttctgagcgaaatcgtcggtaccatcaagctcaaggtgtttctgtcaggaatgccagagctgcggctgggcctcaatgaccgcgtgctcttcgagctcactggccgcagcaagaacaaatcagtagagctggaggatgtaaaattccaccagtgcgtgcggctctctcgctttgacaacgaccgcaccatctccttcatcccgcctgatggtgactttgagctcatgtcataccgcctcagcacccaggtcaagccactgatctggattgagtctgtcattgagaagttctcccacagccgcgtggagatcatggtcaaggccaaggggcagtttaagaaacagtcagtggccaacggtgtggagatatctgtgcctgtacccagcgatgccgactcccccagattcaagaccagtgtgggcagcgccaagtatgtgccggagagaaacgtcgtgatttggagtattaagtctttcccggggggcaaggagtacttgatgcgagcccactttggcctccccagtgtggaaaaggaagaggtggagggccggccccccatcggggtcaagtttgagatcccctacttcaccgtctctgggatccaggtccgatacatgaagatcattgagaaaagtggttaccaggccctgccctgggttcgctacatcacccagagtggcgattaccaacttcgtaccagctagaagggagaagagatgggggcttgaacacggggcttccttacagccccggatgcagattttagagggagggcaggtgcgggctgtgtgtgtctgtgtgagggcaggtcctggacttggcagtttcttgctcccagcacccgccccttcctcacctcttccttattccataggctgggagagaaactctctctgcttccctcgcccttggagctttccccatccccctgattttatatgaagaaatagaagaggggcttgaagtccccctcgcgagtgccttcttgcaattacctgccttagcgggtgttgcgggtccctccttcacagccgctgagcccagaggtcccgctggcccctcctctgaattttaggatgtcattaaaaagatgaatcta

SEQ ID NO: 310263 - DNA, 1697 bp, Homo sapiens
tcgctaggtagaggcgggtgtcaaatcggccgaggccgctcggctgtcttcattctggacgttaagggcaagccattgatcagccgcaactacaagggcgatgtggccatgagcaagattgagcacttcatgcctttgctggtacagcgggaggaggaaggcgccctggccccgctgctgagccacggccaggtccacttcctatggatcaaacacagcaacctctacttggtggccaccacatcgaagaatgccaatgcctccctggtgtactccttcctgtataagacaatagaggtattctgcgaatacttcaaggagctggaggaggagagcatccgggacaactttgtcatcgtctacgagttgctggacgagctcatggactttggcttcccgcagaccaccgacagcaagatcctgcaggagtacatcactcagcagagcaacaagctggagacgggcaagtcacgggtgccacccactgtcaccaacgctgtgtcctggcgctccgagggtatcaagtataagaagaacgaggtcttcattgatgtcatagagtctgtcaacctgctggtcaatgccaacggcagcgtccttctgagcgaaatcgtcggtaccatcaagctcaaggtgtttctgtcaggaatgccagagctgcggctgggcctcaatgaccgcgtgctcttcgagctcactggccgcagcaagaacaaatcagtagagctggaggatgtaaaattccaccagtgcgtgcggctctctcgctttgacaacgaccgcaccatctccttcatcccgcctgatggtgactttgagctcatgtcataccgcctcagcacccaggtcaagccactgatctggattgagtctgtcattgagaagttctcccacagccgcgtggagatcatggtcaaggccaaggggcagtttaagaaacagtcagtggccaacggtgtggagatatctgtgcctgtacccagcgatgccgactcccccagattcaagaccagtgtgggcagcgccaagtatgtgccggagagaaacgtcgtgatttggagtattaagtctttcccggggggcaaggagtacttgatgcgagcccactttggcctccccagtgtggaaaaggaagaggtggagggccggccccccatcggggtcaagtttgagatcccctacttcaccgtctctgggatccaggtccgatacatgaagatcattgagaaaagtggttaccaggccctgccctgggttcgctacatcacccagagtggcgattaccaacttcgtaccagctagaagggagaagagatgggggcttgaacacggggcttccttacagccccggatgcagattttagagggagggcaggtgcgggctgtgtgtgtctgtgtgagggcaggtcctggacttggcagtttcttgctcccagcacccgccccttcctcacctcttccttattccataggctgggagagaaactctctctgcttccctcgcccttggagctttccccatccccctgattttatatgaagaaatagaagaggggcttgaagtccccctcgcgagtgccttcttgcaattacctgccttagcgggtgttgcgggtccctccttcacagccgctgagcccagaggtcccgctggcccctcctctgaattttaggatgtcattaaaaagatgaatcta

SEQ ID NO: 310264 - DNA, 1605 bp, Homo sapiens
gaagcggcgccgccatcgcctcccggcgctccctccccgactcctaagtccttcggccgccaccatgtccgcctcggctgtcttcattctggacgttaagggcaagccattgatcagccgcaactacaagggcgatgtggccatgagcaagattgagcacttcatgcctttgctggtacagcgggaggaggaaggcgccctggccccgctgctgagccacggccaggtccacttcctatggatcaaacacagcaacctctacttggtggccaccacatcgaagaatgccaatgcctccctggtgtactccttcctgtataagacaatagaggtattctgcgaatacttcaaggagctggaggaggagagcatccgggacaactttgtcatcgtctacgagttgctggacgagctcatggactttggcttcccgcagaccaccgacagcaagatcctgcaggagtacatcactcagcagagcaacaagctggagacgggcaagtcacgggtgccacccactgtcaccaacgctgtgtcctggcgctccgagggtatcaagtataagaagaacgaggtcttcattgatgtcatagagtctgtcaacctgctggtcaatgccaacggcagcgtccttctgagcgaaatcgtcggtaccatcaagctcaaggtgtttctgtcaggaatgccagagctgcggctgggcctcaatgaccgcgtgctcttcgagctcactggccgcagcaagaacaaatcagtagagctggaggatgtaaaattccaccagtgcgtgcggctctctcgctttgacaacgaccgcaccatctccttcatcccgcctgatggtgactttgagctcatgtcataccgcctcagcacccaggtcaagccactgatctggattgagtctgtcattgagaagttctcccacagccgcgtggagatcatggtcaaggccaaggggcagtttaagaaacagtcagtggccaacggtgtggagatatctgtgcctgtacccagcgatgccgactcccccagattcaagaccagtgtgggcagcgccaagtatgtgccggagagaaacgtcgtgatttggagtattaagtctttcccggtccgatacatgaagatcattgagaaaagtggttaccaggccctgccctgggttcgctacatcacccagagtggcgattaccaacttcgtaccagctagaagggagaagagatgggggcttgaacacggggcttccttacagccccggatgcagattttagagggagggcaggtgcgggctgtgtgtgtctgtgtgagggcaggtcctggacttggcagtttcttgctcccagcacccgccccttcctcacctcttccttattccataggctgggagagaaactctctctgcttccctcgcccttggagctttccccatccccctgattttatatgaagaaatagaagaggggcttgaagtccccctcgcgagtgccttcttgcaattacctgccttagcgggtgttgcgggtccctccttcacagccgctgagcccagaggtcccgctggcccctcctctgaattttaggatgtcattaaaaagatgaatcta

SEQ ID NO: 310265 - DNA, 1538 bp, Homo sapiens
gaagcggcgccgccatcgcctcccggcgctccctccccgactcctaagtccttcggccgccaccatgtccgcctcggctgtcttcattctggacgttaagggcaagccattgatcagccgcaactacaagggcgatgtggccatgagcaagattgagcacttcatgcctttgctggtacagcgggaggaggaaggcgccctggccccgctgctgagccacggccaggtccacttcctatggatcaaacacagcaacctctacttggtggccaccacatcgaagaatgccaatgcctccctggtgtactccttcctgtataagacaatagaggtattctgcgaatacttcaaggagctggaggaggagagcatccgggacaactttgtcatcgtctacgagttgctggacgagctcatggactttggcttcccgcagaccaccgacagcaagatcctgcaggagtacatcactcagcagagcaacaagctggagacgggcaagtcacgggtgccacccactgtcaccaacgctgtgtcctggcgctccgagggtatcaagtataagaagaacgaggtcttcattgatgtcatagagtctgtcaacctgctggtcaatgccaacggcagcgtccttctgagcgaaatcgtcggtaccatcaagctcaaggtgtttctgtcaggaatgccagagctgcggctgggcctcaatgaccgcgtgctcttcgagctcactggccgcagcaagaacaaatcagtagagctggaggatgtaaaattccaccagtgcgtgcggctctctcgctttgacaacgaccgcaccatctccttcatcccgcctgatggtgactttgagctcatgtcataccgcctcagcacccaggtcaagccactgatctggattgagtctgtcattgagaagttctcccacagccgcgtggagatcatggtcaaggccaaggggcagtttaagaaacagtcagtggccaacggtgtggagatatctgtgcctgtacccagcgatgccgactcccccagattcaagaccagtgtgggcagcgccaagtatgtgccggagagaaacgtcgtgatttggagtattaagtctttcccggggggcaaggagtacttgatgcgagcccactttggcctccccagtgtggaaaaggaagaggtggagggccggccccccatcggggtcaagtttgagatcccctacttcaccgtctctgggatccaggtccgatacatgaagatcattgagaaaagtggttaccaggccctgccctgggttcgctacatcacccagagtggcggctgggagagaaactctctctgcttccctcgcccttggagctttccccatccccctgattttatatgaagaaatagaagaggggcttgaagtccccctcgcgagtgccttcttgcaattacctgccttagcgggtgttgcgggtccctccttcacagccgctgagcccagaggtcccgctggcccctcctctgaattttaggatgtcattaaaaagatgaatcta

SEQ ID NO: 310266 - DNA, 590 bp, Homo sapiens
tcgctgtgtcgatctagaggtccctttggctcatgcagggttcgctccattcaggtcaagtttgagatcccctacttcaccgtctctgggatccaggtccgatacatgaagatcattgagaaaagtggttaccaggccctgccctgggttcgctacatcacccagagtggcgattaccaacttcgtaccagctagaagggagaagagatgggggcttgaacacggggcttccttacagccccggatgcagattttagagggagggcaggtgcgggctgtgtgtgtctgtgtgagggcaggtcctggacttggcagtttcttgctcccagcacccgccccttcctcacctcttccttattccataggctgggagagaaactctctctgcttccctcgcccttggagctttccccatccccctgattttatatgaagaaatagaagaggggcttgaagtccccctcgcgagtgccttcttgcaattacctgccttagcgggtgttgcgggtccctccttcacagccgctgagcccagaggtcccgctggcccctcctctgaattttaggatgtcattaaaaagatgaatcta

SEQ ID NO: 310267 - DNA, 673 bp, Homo sapiens
gttgattccacaccgttggcactgactgttcttaaacgccttggccttgaccatgatctccacgcggctgtgggagaacttctcacgatgccgactcccccagattcaagaccagtgtgggcagcgccaagtatgtgccggagagaaacgtcgtgatttggagtattaagtctttcccggtccgatacatgaagatcattgagaaaagtggttaccaggccctgccctgggttcgctacatcacccagagtggcgattaccaacttcgtaccagctagaagggagaagagatgggggcttgaacacggggcttccttacagccccggatgcagattttagagggagggcaggtgcgggctgtgtgtgtctgtgtgagggcaggtcctggacttggcagtttcttgctcccagcacccgccccttcctcacctcttccttattccataggctgggagagaaactctctctgcttccctcgcccttggagctttccccatccccctgattttatatgaagaaatagaagaggggcttgaagtccccctcgcgagtgccttcttgcaattacctgccttagcgggtgttgcgggtccctccttcacagccgctgagcccagaggtcccgctggcccctcctctgaattttaggatgtcattaaaaagatgaatcta

SEQ ID NO: 310268 - DNA, 571 bp, Homo sapiens
ctctagaggaccctcagacagctggacccccatcggttaatgtttgagatcctacttacaccgtctctgggatccaggtccgatacatgaagatcattgagaaaagtggttaccaggccctgccctgggttcgctacatcacccagagtggcgattaccaacttcgtaccagctagaagggagaagagatgggggcttgaacacggggcttccttacagccccggatgcagattttagagggagggcaggtgcgggctgtgtgtgtctgtgtgagggcaggtcctggacttggcagtttcttgctcccagcacccgccccttcctcacctcttccttattccataggctgggagagaaactctctctgcttccctcgcccttggagctttccccatccccctgattttatatgaagaaatagaagaggggcttgaagtccccctcgcgagtgccttcttgcaattacctgccttagcgggtgttgcgggtccctccttcacagccgctgagcccagaggtcccgctggcccctcctctgaattttaggatgtcattaaaaagatgaatcta

SEQ ID NO: 310269 - DNA, 1008 bp, Homo sapiens
  misc_feature (955)..(955): n is a, c, g, or t
  misc_feature (978)..(978): n is a, c, g, or t
gaagcggcgccgccatcgcctcccggcgctccctccccgactcctaagtccttcggccgccaccatgtccgcctcggctgtcttcattctggacgttaagggcaaggtgaggctgggcatgaggagttgggagacggacagccattgatcagccgcaactacaagggcgatgtggccatgagcaagattgagcacttcatgcctttgctggtacagcgggaggaggaaggcgccctggccccgctgctgagccacggccaggtccacttcctatggatcaaacacagcaacctctacttggtggccaccacatcgaagaatgccaatgcctccctggtgtactccttcctgtataagacaatagaggtattctgcgaatacttcaaggagctggaggaggagagcatccgggacaactttgtcatcgtctacgagttgctggacgagctcatggactttggcttcccgcagaccaccgacagcaagatcctgcaggagtacatcactcagcagagcaacaagctggagacgggcaagtcacgggtgccacccactgtcaccaacgctgtgtcctggcgctccgagggtatcaagtataagaagaacgaggtcttcattgatgtcatagagtctgtcaacctgctggtcaatgccaacggcagcgtccttctgagcgaaatcgtcggtaccatcaagctcaaggtgtttctgtcaggaatgccagagctgcggctgggcctcaatgaccgcgtgctcttcgagctcactggccgcagcaagaacaaatcagtagagctggaggatgtaaaattccaccagtgcgtgcggctctctcgctttgacaacgaccgcaccatctccttcatcccgcctgatggtgactttgagctcatgtcataccgcctcagcacccagtaagcctgtcggtggtcgctgggaggtcccaccggggganaggacggcggggtaaaacggcanggggaatgcgcggggccctaaatgggttgg

SEQ ID NO: 310270 - DNA, 317 bp, Homo sapiens
gaagcggcgccgccatcgcctcccggcgctccctccccgactcctaagtccttcggccgccaccatgtccgcctcggctgtcttcattctggacgttaagggcaagccattgatcagccgcaactacaagggcgatgtggccatgagcaagattgagcacttcatgcctttgctggtacagcgggaggaggaaggcgccctggccccgctgctgagccttagcgggtgttgcgggtccctccttcacagccgctgagcccagaggtcccgctggcccctcctctgaattttaggatgtcattaaaaagatgaatcta

SEQ ID NO: 310271 - DNA, 397 bp, Homo sapiens
agttccccatctggaaaacgcagggcacatgtaggctctccaatggcctccacattcctaaaacccagccagctaagaatgtctccagagaagatatttgtggcaaggagcccacacttgggtcttgcccccaggaactccccctgggaaaagttgagggtacagaactaagattggaaacctccacaagtctgacaggaacccagctccatcaggcatattgtggcatttctcagagtctctcctgttctccagcttcctccaagtgtgaattgttcattttatgttttccctgattccatcactcaattaaccccatagcaggtgccacctcctccatgccacctttagcacagcacaggaattactagaaacttctgtcctgcgaggaccggca

SEQ ID NO: 310272 - DNA, 419 bp, Homo sapiens
  misc_feature (9)..(9): n is a, c, g, or t
cccgggctngcaggaattcggcacgagagacaatgtaagattcacacagagttatctgggattctgattttttaaatagtacatatcattaaaccattttctctaaatgtaagaagagcagaaaaaatcttataagattatcagatttttctaatgacacagaaatgtaagaaaaaaatccctttatattgaaaaaagatgcagtcaaagtcttttcagacatgcccaaactttgagaatttcttcaaccatctaatgctataaagatttttgttcttcctgttcacaaccagttgtataacagaaatactagctactgttttccttcctgtgtgtgaagtaatgaatcattgattatgtgacttgttatgtattcaattaaacactaaagaataaaacattcactcctttaattattc

SEQ ID NO: 310273 - DNA, 3181 bp, Homo sapiens
  misc_feature (119)..(119): n is a, c, g, or t
gcacagcggcgcgctcgcaccgctcggctccgcgcggctctaggaggtggcggcggtggcggtggcggcggtggcggcggcggcggcggcggggcgcagggctgagcgagcgtccgggntccggggctccggggaaggcggttgcagctcctgagtgcagcgcggcttcctgccactgtcccggcccggccacctctctgtcatggctctggcggacagcacacgtggattacccaacgggggcggcggcgggggcggcagtggctcctcgtcgtcctccgcggagccaccgctcttccccgacatcgtggagctgaacgtggggggccaggtgtacgtgacccggcgctgcacggtggtgtcggtgcccgactcgctgctctggcgcatgttcacgcagcagcagccgcaggagctggcccgggacagcaaaggccgcttctttctggaccgggacggcttcctcttccgctacatcctggattacctgcgggacttgcagctcgtgctgcccgactacttccccgagcgcagccggctgcagcgcgaggccgagtacttcgagctgccagagctcgtgcgccgcctcggggcgccccagcagcccggcccggggccgccgccctcgcggcgcggggtgcacaaggagggctcgctgggtgacgagctgctgccgcttggctactcggagcccgaacagcaggagggcgcctctgccggggcgccgtcgcccacgctggagctggctagccgcagtccgtccgggggcgcggcgggcccgctgctcacgccgtcccagtcgctggacggcagccggcgctcgggctacatcaccatcggctaccgcggctcctacaccatcgggcgggacgcgcaggcggacgccaagttccggcgagtggcgcgcatcaccgtttgcggaaagacgtcgctggccaaggaggtgtttggggacaccctgaacgaaagccgggaccccgaccgtcccccggagcgctacacctcgcgctattacctcaagttcaacttcctggagcaggccttcgacaagctgtccgagtcgggcttccacatggtggcgtgcagctccacgggcacctgcgcctttgccagcagcaccgaccagagcgaggacaagatctggaccagctacaccgagtacgtcttctgcagggagtgagctccccagaccccctcgccactccagcgcccagtccttctcctgcccgagagatgattacagagcctcttgtcccacctttgtcccctggctgctgccctcccattctccccctccagtagtagctgggtgagacctgtccgcccaccttccctccactacagaacctgcagccgcaaatcctctgggctgcttcgtcttctttggacctcctgaaccgagagaacccagaggaacccccaccccacccccacctaccactccatgctttctctactccctgcctcaaaccacccctcccccagatggtacttcagtttggatctattgggggagtgtggccacagaccgggggatgattgaattgttcagaacctgattggaccgtgtccaatgtgcggaagatttccttgaaatcttctcaagctcttatgactcactgggggtttaagagatcaggattggttccactgtctggggttagtgttttacaaggtcattacacagtctttttgacctcttttgaaggtagagttttagaaggctggatggaagattctgagcctggaattaggaccccatggaggcagttcagtaactaaactaataaagttttgaaaagttacacgtaaagtagaagaatctagtgcgtgggacagtaaaggatcctttctcgtacagaataaaaggtctcagcctgtagcttaaacttatagaaagtgatccgcctgcctgcagaggcgcccttttcagctgctgctcgccagaagcccttgattccactggttgacatggcagcagttactggcaagagggagaaaggacgctgccgcctaagagtgcaaggctgctcaggtctccaagcgccgtaggaggtcacctggcagtgactgtagggagctgggtcatagtgcacgtcgtgggtattaggaaagcctgtattctttcaatgaatgtcagtaggaccttcctttagctgtaagacttggtgggcggggtggggtggggagggaggaaagggtaggaagggtgggaagggagaagcagacatagtcatttatgatttgaaagttggaaatttgtaccatctgtttgagtatatgcacatttaaaaaatatcatatagtaaatgcaaacatgccaagtattttataaagattaataacagacctactcttacctggcagtttacttaacttactgttttgagtcctaaacttagagttgttaatgcttatatataatctaaccaaagagttacccagtagggttttagtttttgaacttttattttcttgttgattataaatcctgattttggaatctattgcgcaaaagaagtttcattttggttacttagacctaagatcacttattaaaaatccttattttctccaagcccagcaaacgttgacttctgggcaaacctgaaaacctgaaaatgccactttcatgcagtttgtttgaagttaagtggaatcctttcaaatgacgagctgcagagaactcagcaccaagggctgcctatctgtagatagctgtaaaatggaatatttttaaatgaaggcaaataagtacttaaaagtgagctgagcaataaaatggtccaataataggtaaatgcaacagaaacagaaggagacctggttgccttatgcctttactcttacatggaataaattcccaatgcatatcctatgtaaaccataagtgaagggaaataaacctcgtcatgctccatgctgtgaggtgtcctttggatattctgtgatgacagagaagcctattttgttttgttttcagcatctttctctgatgtacgtttttaaggattttgtaagagctgttttcagtgtttaaattagtgctatttttccttgtttttaaaaatgaatctcgtactgtatcttactatgtccatacagatgttacaaatcgacagttttattcttagactcatgtgatccaagctgtatataccatatataaacattttacatg

SEQ ID NO: 310274 - DNA, 255 bp, Homo sapiens
gcacgaggactgcatcttttttcaatataaagggatgcagtcaaagtcttttcagacatgcccaaactttgagaatttcttcaaccatctaatgctataaagatttttgttcttcctgttcacaaccagttgtataacagaaatactagctactgttttccttcctgtgtgtgaagtaatgaatcattgattatgtgacttgttatgtattcaattaaacactaaagaataaaacattcactcctttaattattc

SEQ ID NO: 310275 - DNA, 6195 bp, Homo sapiens
  misc_feature (119)..(119): n is a, c, g, or t
gcacagcggcgcgctcgcaccgctcggctccgcgcggctctaggaggtggcggcggtggcggtggcggcggtggcggcggcggcggcggcggggcgcagggctgagcgagcgtccgggntccggggctccggggaaggcggttgcagctcctgagtgcagcgcggcttcctgccactgtcccggcccggccacctctctgtcatggctctggcggacagcacacgtggattacccaacgggggcggcggcgggggcggcagtggctcctcgtcgtcctccgcggagccaccgctcttccccgacatcgtggagctgaacgtggggggccaggtgtacgtgacccggcgctgcacggtggtgtcggtgcccgactcgctgctctggcgcatgttcacgcagcagcagccgcaggagctggcccgggacagcaaaggccgcttctttctggaccgggacggcttcctcttccgctacatcctggattacctgcgggacttgcagctcgtgctgcccgactacttccccgagcgcagccggctgcagcgcgaggccgagtacttcgagctgccagagctcgtgcgccgcctcggggcgccccagcagcccggcccggggccgccgccctcgcggcgcggggtgcacaaggagggctcgctgggtgacgagctgctgccgcttggctactcggagcccgaacagcaggagggcgcctctgccggggcgccgtcgcccacgctggagctggctagccgcagtccgtccgggggcgcggcgggcccgctgctcacgccgtcccagtcgctggacggcagccggcgctcgggctacatcaccatcggctaccgcggctcctacaccatcgggcgggacgcgcaggcggacgccaagttccggcgagtggcgcgcatcaccgtttgcggaaagacgtcgctggccaaggaggtgtttggggacaccctgaacgaaagccgggaccccgaccgtcccccggagcgctacacctcgcgctattacctcaagttcaacttcctggagcaggccttcgacaagctgtccgagtcgggcttccacatggtggcgtgcagctccacgggcacctgcgcctttgccagcagcaccgaccagagcgaggacaagatctggaccagctacaccgagtacgtcttctgcagggagtgagctccccagaccccctcgccactccagcgcccagtccttctcctgcccgagagatgattacagagcctcttgtcccacctttgtcccctggctgctgccctcccattctccccctccagtagtagctgggtgagacctgtccgcccaccttccctccactacagaacctgcagccgcaaatcctctgggctgcttcgtcttctttggacctcctgaaccgagagaacccagaggaacccccaccccacccccacctaccactccatgctttctctactccctgcctcaaaccacccctcccccagatggtacttcagtttggatctattgggggagtgtggccacagaccgggggatgattgaattgttcagaacctgattggaccgtgtccaatgtgcggaagatttccttgaaatcttctcaagctcttatgactcactgggggtttaagagatcaggattggttccactgtctggggttagtgttttacaaggtcattacacagtctttttgacctcttttgaaggtagagttttagaaggctggatggaagattctgagcctggaattaggaccccatggaggcagttcagtaactaaactaataaagttttgaaaagttacacgtaaagtagaagaatctagtgcgtgggacagtaaaggatcctttctcgtacagaataaaaggtctcagcctgtagcttaaacttatagaaagtgatccgcctgcctgcagaggcgcccttttcagctgctgctcgccagaagcccttgattccactggttgacatggcagcagttactggcaagagggagaaaggacgctgccgcctaagagtgcaaggctgctcaggtctccaagcgccgtaggaggtcacctggcagtgactgtagggagctgggtcatagtgcacgtcgtgggtattaggaaagcctgtattctttcaatgaatgtcagtaggaccttcctttagctgtaagacttggtgggcggggtggggtggggagggaggaaagggtaggaagggtgggaagggagaagcagacatagtcatttatgatttgaaagttggaaatttgtaccatctgtttgagtatatgcacatttaaaaaatatcatatagtaaatgcaaacatgccaagtattttataaagattaataacagacctactcttacctggcagtttacttaacttactgttttgagtcctaaacttagagttgttaatgcttatatataatctaaccaaagagttacccagtagggttttagtttttgaacttttattttcttgttgattataaatcctgattttggaatctattgcgcaaaagaagtttcattttggttacttagacctaagatcacttattaaaaatccttattttctccaagcccagcaaacgttgacttctgggcaaacctgaaaacctgaaaatgccactttcatgcagtttgtttgaagttaagtggaatcctttcaaatgacgagctgcagagaactcagcaccaagggctgcctatctgtagatagctgtaaaatggaatatttttaaatgaaggcaaataagtacttaaaagtgagctgagcaataaaatggtccaataataggtaaatgcaacagaaacagaaggagacctggttgccttatgcctttactcttacatggaataaattcccaatgcatatcctatgtaaaccataagtgaagggaaataaacctcgtcatgctccatgctgtgaggtgtcctttggatattctgtgatgacagagaagcctattttgttttgttttcagcatctttctctgatgtacgtttttaaggattttgtaagagctgttttcagtgtttaaattagtgctatttttccttgtttttaaaaatgaatctcgtactgtatcttactatgtccatacagatgttacaaatcgacagttttattcttagactcatgtgatccaagctgtatataccatatataaacattttacatgaatcatttagttttttaattcatttactaatgctataaaatttcctatattaccccagtaatttgcatcagctggtttatatactaaagcaacatgttttgatgagtttcttacatccttatcgaggaattgggttaggaaaaaatacataattgtaaaactgagtttgctgtattatactttttttcttgagtattagttgtattactaatcatatgttgattaactgtctacttaaagtcaaggtacctgtatttttaatccactaatttttttttagttgggaaatagatttcaggtcttttattagactaacattttttgagaagtaaaattgacttcatatacaaagcctgtaattttaggcgaaatggaagcagaaatctaggaagttgtgcttgcttgtatgttgagtttggtctcagactaagtaatgcatcagaattcatctgtttgaagcctgaaataatttaggactctgattcactgaccaaaagtcagtgttgcagagatttctctaccccgtatggtattttgttagattgttcaacaggaagcacatgattgagaacatcttgggacagaccaaaaccactgacagatggcaaggctcggcgattctgatttcccttctcaaatctgctcaactccaagagtcttgagaaactgctaaaattttgcctctgtcactcaagtcttacaaatgttatcttgtaaacctttgaggtgaactattccactgtcttgtacataggcatcttattcactgcaccctgtcacacccagcaccccccgccccgcacattatttgaaagactgggaatttaatggttagggacagtaaatctacttctttttccagggacgactgtcccctctaaagttaaagtcaatacaagaaaactgtctatttttagcctaaagtaaaggctgtgaagaaaattcattttacattgggtagacagtaaaaaacaagtaaaataacttgacatgagcacctttagatcccttcccctccatgggctttgggccacagaatgaacctttgaggcctgtaaagtggattgtaatttcctataagctgtaatagtggaggtattgtgggttcatttgagtaagccctccaaagataccattcaaataacctgggagaatgtcataaattattcagataattaacactgcatgaatctgattcagaggcatgcatttacatatgttgccctaattaccatttgatgatcataaatacaagtgaatgacattggacttttagtaacaaacttaatttttaaaaaggtgtagacaatggtggttaaaaaaaaaaaaaaaacaggtaccaggttctgtgtgtttgcaccaagtaattgacatgttttttgtttaatacatgtggaccatgaacagtattcattctcctttttcaaatgatatgctgtagaaaatattccttgaagatgtgagatttaaaaatttttccctttcaatgttgttttaattgtatttcttacttggtttttttgattgatagcacagtgataaatcataatactagacaaaattgtcttctctttcaaaccagagccatatatatgtctgtatatatgggacctactgcttctctgaggaaatgcataatctgttaatatcagacaaaatgagcaattggcagtgctcataatatattccaatttttattggaattttcgatggaatgttatttcaataaagccatgtaaggtgaaactttgataactttttactcttcaagttagggtaaattctgatccaatattcaattcatttgtgtactcccacatgcaaaatgctaaattacaatgcagacattaagaaaaagtattgactggaggggttgaattccttgagaatttattttatagtctaaatcacaaatactttactcaatttagtttttaaaatagtaaactgaatatttttgttgtaagcctatcagagtcaatccttcgtttggaattgttttcctgtttttccttactataaatcatttaaaaactgaattcattttcttagatggcataagtctgtctcttgagaaataagtaaaatactcctattttcagtatctgtagcacctgaaataggtctttgtatagccagaaacaagttatgttgaagttagcttttctttgtcaacagttttggacaataaaaatctgaaagtattaacacttgattttctactggggcccttcaaacttggttggaagaaattcaaccagaatatctacattagagtataatcatgtgtggtaggaagatggactagttaatcaagatttgttgtcacttaaattttttgtgatttttttccaagccagtttttttaaattctaaatgtgttttgaggtatgggtacattaattgtaatgtaaactattatacaactgtttttgcgactttataggcaggtaaattttgctattactattgaatacaaatgacaattcatttatgaccactcaaacagcgttagtaaccatttagtgacaaaggattaaaacatccatctggatgttaattttgaagatgtaaattatatgttgtttaaatttttccaggcatctgaaaaccttatctgctagacaatgtaagattcacacagagttatctgggattctgattttttaaatagtacatatcattaaaccattttctctaaatgtaagaagagcagaaaaaatcttataagattatcagatttttctaatgacacagaaatgtaagaaaaaaatccctttatattgaaaaaagatgcagtcaaagtcttttcagacatgcccaaactttgagaatttcttcaaccatctaatgctataaagatttttgttcttcctgttcacaaccagttgtataacagaaatactagctactgttttccttcctgtgtgtgaagtaatgaatcattgattatgtgacttgttatgtattcaattaaacactaaagaataaaacattcactcctttaattattc

SEQ ID NO: 310276 - DNA, 6136 bp, Homo sapiens
  misc_feature (119)..(119): n is a, c, g, or t
gcacagcggcgcgctcgcaccgctcggctccgcgcggctctaggaggtggcggcggtggcggtggcggcggtggcggcggcggcggcggcggggcgcagggctgagcgagcgtccgggntccggggctccggggaaggcggttgcagctcctgagtgcagcgcggcttcctgccactgtcccggcccggccacctctctgtcatggctctggcggacagcacacgtggattacccaacgggggcggcggcgggggcggcagtggctcctcgtcgtcctccgcggagccaccgctcttccccgacatcgtggagctgaacgtggggggccaggtgtacgtgacccggcgctgcacggtggtgtcggtgcccgactcgctgctctggcgcatgttcacgcagcagcagccgcaggagctggcccgggacagcaaaggccgcttctttctggaccgggacggcttcctcttccgctacatcctggattacctgcgggacttgcagctcgtgctgcccgactacttccccgagcgcagccggctgcagcgcgaggccgagtacttcgagctgccagagctcgtgcgccgcctcggggcgccccagcagcccggcccggggccgccgccctcgcggcgcggggtgcacaaggagggctcgctgggtgacgagctgctgccgcttggctactcggagcccgaacagcaggagggcgcctctgccggggcgccgtcgcccacgctggagctggctagccgcagtccgtccgggggcgcggcgggcccgctgctcacgccgtcccagtcgctggacggcagccggcgctcgggctacatcaccatcggctaccgcggctcctacaccatcgggcgggacgcgcaggcggacgccaagttccggcgagtggcgcgcatcaccgtttgcggaaagacgtcgctggccaaggaggtgtttggggacaccctgaacgaaagccgggaccccgaccgtcccccggagcgctacacctcgcgctattacctcaagttcaacttcctggagcaggccttcgacaagctgtccgagtcgggcttccacatggtggcgtgcagctccacgggcacctgcgcctttgccagcagcaccgaccagagcgaggacaagatctggaccagctacaccgagtacgtcttctgcagggagtgagctccccagaccccctcgccactccagcgcccagtccttctcctgcccgagagatgattacagagcctcttgtcccacctttgtcccctggctgctgccctcccattctccccctccagtagtagctgggtgagacctgtccgcccaccttccctccactacagaacctgcagccgcaaatcctctgggctgcttcgtcttctttggacctcctgaaccgagagaacccagaggaacccccaccccacccccacctaccactccatgctttctctactccctgcctcaaaccacccctcccccagatggtacttcagtttggatctattgggggagtgtggccacagaccgggggatgattgaattgttcagaacctgattggaccgtgtccaatgtgcggaagatttccttgaaatcttctcaagctcttatgactcactgggggtttaagagatcaggattggttccactgtctggggttagtgttttacaaggtcattacacagtctttttgacctcttttgaaggtagagttttagaaggctggatggaagattctgagcctggaattaggaccccatggaggcagttcagtaactaaactaataaagttttgaaaagttacacgtaaagtagaagaatctagtgcgtgggacagtaaaggatcctttctcgtacagaataaaaggtctcagcctgtagcttaaacttatagaaagtgatccgcctgcctgcagaggcgcccttttcagctgctgctcgccagaagcccttgattccactggttgacatggcagcagttactggcaagagggagaaaggacgctgccgcctaagagtgcaaggctgctcaggtctccaagcgccgtaggaggtcacctggcagtgactgtagggagctgggtcatagtgcacgtcgtgggtattaggaaagcctgtattctttcaatgaatgtcagtaggaccttcctttagctgtaagacttggtgggcggggtggggtggggagggaggaaagggtaggaagggtgggaagggagaagcagacatagtcatttatgatttgaaagttggaaatttgtaccatctgtttgagtatatgcacatttaaaaaatatcatatagtaaatgcaaacatgccaagtattttataaagattaataacagacctactcttacctggcagtttacttaacttactgttttgagtcctaaacttagagttgttaatgcttatatataatctaaccaaagagttacccagtagggttttagtttttgaacttttattttcttgttgattataaatcctgattttggaatctattgcgcaaaagaagtttcattttggttacttagacctaagatcacttattaaaaatccttattttctccaagcccagcaaacgttgacttctgggcaaacctgaaaacctgaaaatgccactttcatgcagtttgtttgaagttaagtggaatcctttcaaatgacgagctgcagagaactcagcaccaagggctgcctatctgtagatagctgtaaaatggaatatttttaaatgaaggcaaataagtacttaaaagtgagctgagcaataaaatggtccaataataggtaaatgcaacagaaacagaaggagacctggttgccttatgcctttactcttacatggaataaattcccaatgcatatcctatgtaaaccataagtgaagggaaataaacctcgtcatgctccatgctgtgaggtgtcctttggatattctgtgatgacagagaagcctattttgttttgttttcagcatctttctctgatgtacgtttttaaggattttgtaagagctgttttcagtgtttaaattagtgctatttttccttgtttttaaaaatgaatctcgtactgtatcttactatgtccatacagatgttacaaatcgacagttttattcttagactcatgtgatccaagctgtatataccatatataaacattttacatgaatcatttagttttttaattcatttactaatgctataaaatttcctatattaccccagtaatttgcatcagctggtttatatactaaagcaacatgttttgatgagtttcttacatccttatcgaggaattgggttaggaaaaaatacataattgtaaaactgagtttgctgtattatactttttttcttgagtattagttgtattactaatcatatgttgattaactgtctacttaaagtcaaggtacctgtatttttaatccactaatttttttttagttgggaaatagatttcaggtcttttattagactaacattttttgagaagtaaaattgacttcatatacaaagcctgtaattttaggcgaaatggaagcagaaatctaggaagttgtgcttgcttgtatgttgagtttggtctcagactaagtaatgcatcagaattcatctgtttgaagcctgaaataatttaggactctgattcactgaccaaaagtcagtgttgcagagatttctctaccccgtatggtattttgttagattgttcaacaggaagcacatgattgagaacatcttgggacagaccaaaaccactgacagatggcaaggctcggcgattctgatttcccttctcaaatctgctcaactccaagagtcttgagaaactgctaaaattttgcctctgtcactcaagtcttacaaatgttatcttgtaaacctttgaggtgaactattccactgtcttgtacataggcatcttattcactgcaccctgtcacacccagcaccccccgccccgcacattatttgaaagactgggaatttaatggttagggacagtaaatctacttctttttccagggacgactgtcccctctaaagttaaagtcaatacaagaaaactgtctatttttagcctaaagtaaaggctgtgaagaaaattcattttacattgggtagacagtaaaaaacaagtaaaataacttgacatgagcacctttagatcccttcccctccatgggctttgggccacagaatgaacctttgaggcctgtaaagtggattgtaatttcctataagctgtaatagtggaggtattgtgggttcatttgagtaagccctccaaagataccattcaaataacctgggagaatgtcataaattattcagataattaacactgcatgaatctgattcagaggcatgcatttacatatgttgccctaattaccatttgatgatcataaatacaagtgaatgacattggacttttagtaacaaacttaatttttaaaaaggtgtagacaatggtggttaaaaaaattaatacatgtggaccatgaacagtattcattctcctttttcaaatgatatgctgtagaaaatattccttgaagatgtgagatttaaaaatttttccctttcaatgttgttttaattgtatttcttacttggtttttttgattgatagcacagtgataaatcataatactagacaaaattgtcttctctttcaaaccagagccatatatatgtctgtatatatgggacctactgcttctctgaggaaatgcataatctgttaatatcagacaaaatgagcaattggcagtgctcataatatattccaatttttattggaattttcgatggaatgttatttcaataaagccatgtaaggtgaaactttgataactttttactcttcaagttagggtaaattctgatccaatattcaattcatttgtgtactcccacatgcaaaatgctaaattacaatgcagacattaagaaaaagtattgactggaggggttgaattccttgagaatttattttatagtctaaatcacaaatactttactcaatttagtttttaaaatagtaaactgaatatttttgttgtaagcctatcagagtcaatccttcgtttggaattgttttcctgtttttccttactataaatcatttaaaaactgaattcattttcttagatggcataagtctgtctcttgagaaataagtaaaatactcctattttcagtatctgtagcacctgaaataggtctttgtatagccagaaacaagttatgttgaagttagcttttctttgtcaacagttttggacaataaaaatctgaaagtattaacacttgattttctactggggcccttcaaacttggttggaagaaattcaaccagaatatctacattagagtataatcatgtgtggtaggaagatggactagttaatcaagatttgttgtcacttaaattttttgtgatttttttccaagccagtttttttaaattctaaatgtgttttgaggtatgggtacattaattgtaatgtaaactattatacaactgtttttgcgactttataggcaggtaaattttgctattactattgaatacaaatgacaattcatttatgaccactcaaacagcgttagtaaccatttagtgacaaaggattaaaacatccatctggatgttaattttgaagatgtaaattatatgttgtttaaatttttccaggcatctgaaaaccttatctgctagacaatgtaagattcacacagagttatctgggattctgattttttaaatagtacatatcattaaaccattttctctaaatgtaagaagagcagaaaaaatcttataagattatcagatttttctaatgacacagaaatgtaagaaaaaaatccctttatattgaaaaaagatgcagtcaaagtcttttcagacatgcccaaactttgagaatttcttcaaccatctaatgctataaagatttttgttcttcctgttcacaaccagttgtataacagaaatactagctactgttttccttcctgtgtgtgaagtaatgaatcattgattatgtgacttgttatgtattcaattaaacactaaagaataaaacattcactcctttaattattc

SEQ ID NO: 310277 - DNA, 6141 bp, Homo sapiens
  misc_feature (119)..(119): n is a, c, g, or t
gcacagcggcgcgctcgcaccgctcggctccgcgcggctctaggaggtggcggcggtggcggtggcggcggtggcggcggcggcggcggcggggcgcagggctgagcgagcgtccgggntccggggctccggggaaggcggttgcagctcctgagtgcagcgcggcttcctgccactgtcccggcccggccacctctctgtcatggctctggcggacagcacacgtggattacccaacgggggcggcggcgggggcggcagtggctcctcgtcgtcctccgcggagccaccgctcttccccgacatcgtggagctgaacgtggggggccaggtgtacgtgacccggcgctgcacggtggtgtcggtgcccgactcgctgctctggcgcatgttcacgcagcagcagccgcaggagctggcccgggacagcaaaggccgcttctttctggaccgggacggcttcctcttccgctacatcctggattacctgcgggacttgcagctcgtgctgcccgactacttccccgagcgcagccggctgcagcgcgaggccgagtacttcgagctgccagagctcgtgcgccgcctcggggcgccccagcagcccggcccggggccgccgccctcgcggcgcggggtgcacaaggagggctcgctgggtgacgagctgctgccgcttggctactcggagcccgaacagcaggagggcgcctctgccggggcgccgtcgcccacgctggagctggctagccgcagtccgtccgggggcgcggcgggcccgctgctcacgccgtcccagtcgctggacggcagccggcgctcgggctacatcaccatcggctaccgcggctcctacaccatcgggcgggacgcgcaggcggacgccaagttccggcgagtggcgcgcatcaccgtttgcggaaagacgtcgctggccaaggaggtgtttggggacaccctgaacgaaagccgggaccccgaccgtcccccggagcgctacacctcgcgctattacctcaagttcaacttcctggagcaggccttcgacaagctgtccgagtcgggcttccacatggtggcgtgcagctccacgggcacctgcgcctttgccagcagcaccgaccagagcgaggacaagatctggaccagctacaccgagtacgtcttctgcagggagtgagctccccagaccccctcgccactccagcgcccagtccttctcctgcccgagagatgattacagagcctcttgtcccacctttgtcccctggctgctgccctcccattctccccctccagtagtagctgggtgagacctgtccgcccaccttccctccactacagaacctgcagccgcaaatcctctgggctgcttcgtcttctttggacctcctgaaccgagagaacccagaggaacccccaccccacccccacctaccactccatgctttctctactccctgcctcaaaccacccctcccccagatggtacttcagtttggatctattgggggagtgtggccacagaccgggggatgattgaattgttcagaacctgattggaccgtgtccaatgtgcggaagatttccttgaaatcttctcaagctcttatgactcactgggggtttaagagatcaggattggttccactgtctggggttagtgttttacaaggtcattacacagtctttttgacctcttttgaaggtagagttttagaaggctggatggaagattctgagcctggaattaggaccccatggaggcagttcagtaactaaactaataaagttttgaaaagttacacgtaaagtagaagaatctagtgcgtgggacagtaaaggatcctttctcgtacagaataaaaggtctcagcctgtagcttaaacttatagaaagtgatccgcctgcctgcagaggcgcccttttcagctgctgctcgccagaagcccttgattccactggttgacatggcagcagttactggcaagagggagaaaggacgctgccgcctaagagtgcaaggctgctcaggtctccaagcgccgtaggaggtcacctggcagtgactgtagggagctgggtcatagtgcacgtcgtgggtattaggaaagcctgtattctttcaatgaatgtcagtaggaccttcctttagctgtaagacttggtgggcggggtggggtggggagggaggaaagggtaggaagggtgggaagggagaagcagacatagtcatttatgatttgaaagttggaaatttgtaccatctgtttgagtatatgcacatttaaaaaatatcatatagtaaatgcaaacatgccaagtattttataaagattaataacagacctactcttacctggcagtttacttaacttactgttttgagtcctaaacttagagttgttaatgcttatatataatctaaccaaagagttacccagtagggttttagtttttgaacttttattttcttgttgattataaatcctgattttggaatctattgcgcaaaagaagtttcattttggttacttagacctaagatcacttattaaaaatccttattttctccaagcccagcaaacgttgacttctgggcaaacctgaaaacctgaaaatgccactttcatgcagtttgtttgaagttaagtggaatcctttcaaatgacgagctgcagagaactcagcaccaagggctgcctatctgtagatagctgtaaaatggaatatttttaaatgaaggcaaataagtacttaaaagtgagctgagcaataaaatggtccaataataggtaaatgcaacagaaacagaaggagacctggttgccttatgcctttactcttacatggaataaattcccaatgcatatcctatgtaaaccataagtgaagggaaataaacctcgtcatgctccatgctgtgaggtgtcctttggatattctgtgatgacagagaagcctattttgttttgttttcagcatctttctctgatgtacgtttttaaggattttgtaagagctgttttcagtgtttaaattagtgctatttttccttgtttttaaaaatgaatctcgtactgtatcttactatgtccatacagatgttacaaatcgacagttttattcttagactcatgtgatccaagctgtatataccatatataaacattttacatgaatcatttagttttttaattcatttactaatgctataaaatttcctatattaccccagtaatttgcatcagctggtttatatactaaagcaacatgttttgatgagtttcttacatccttatcgaggaattgggttaggaaaaaatacataattgtaaaactgagtttgctgtattatactttttttcttgagtattagttgtattactaatcatatgttgattaactgtctacttaaagtcaaggtacctgtatttttaatccactaatttttttttagttgggaaatagatttcaggtcttttattagactaacattttttgagaagtaaaattgacttcatatacaaagcctgtaattttaggcgaaatggaagcagaaatctaggaagttgtgcttgcttgtatgttgagtttggtctcagactaagtaatgcatcagaattcatctgtttgaagcctgaaataatttaggactctgattcactgaccaaaagtcagtgttgcagagatttctctaccccgtatggtattttgttagattgttcaacaggaagcacatgattgagaacatcttgggacagaccaaaaccactgacagatggcaaggctcggcgattctgatttcccttctcaaatctgctcaactccaagagtcttgagaaactgctaaaattttgcctctgtcactcaagtcttacaaatgttatcttgtaaacctttgaggtgaactattccactgtcttgtacataggcatcttattcactgcaccctgtcacacccagcaccccccgccccgcacattatttgaaagactgggaatttaatggttagggacagtaaatctacttctttttccagggacgactgtcccctctaaagttaaagtcaatacaagaaaactgtctatttttagcctaaagtaaaggctgtgaagaaaattcattttacattgggtagacagtaaaaaacaagtaaaataacttgacatgagcacctttagatcccttcccctccatgggctttgggccacagaatgaacctttgaggcctgtaaagtggattgtaatttcctataagctgtaatagtggaggtattgtgggttcatttgagtaagccctccaaagataccattcaaataacctgggagaatgtcataaattattcagataattaacactgcatgaatctgattcagaggcatgcatttacatatgttgccctaattaccatttgatgatcataaatacaagtgaatgacattggacttttagtaacaaacttaatttttaaaaaggtgtagacaatggtggttaaaaaaaaaaaaaaaacaggtaccaggttctgtgtgtttgcaccaagtaattgacatgttttttgtttaatacatgtggaccatgaacagtattcattctcctttttcaaatgatatgctgtagaaaatattccttgaagatgtgagatttaaaaatttttccctttcaatgttgttttaattgtatttcttacttggtttttttgattgatagcacagtgataaatcataatactagacaaaattgtcttctctttcaaaccagagccatatatatgtctgtatatatgggacctactgcttctctgaggaaatgcataatctgttaatatcagacaaaatgagcaattggcagtgctcataatatattccaatttttattggaattttcgatggaatgttatttcaataaagccatgtaaggtgaaactttgataactttttactcttcaagttagggtaaattctgatccaatattcaattcatttgtgtactcccacatgcaaaatgctaaattacaatgcagacattaagaaaaagtattgactggaggggttgaattccttgagaatttattttatagtctaaatcacaaatactttactcaatttagtttttaaaatagtaaactgaatatttttgttgtaagcctatcagagtcaatccttcgtttggaattgttttcctgtttttccttactataaatcatttaaaaactgaattcattttcttagatggcataagtctgtctcttgagaaataagtaaaatactcctattttcagtatctgtagcacctgaaataggtctttgtatagccagaaacaagttatgttgaagttagcttttctttgtcaacagttttggacaataggaagaaattcaaccagaatatctacattagagtataatcatgtgtggtaggaagatggactagttaatcaagatttgttgtcacttaaattttttgtgatttttttccaagccagtttttttaaattctaaatgtgttttgaggtatgggtacattaattgtaatgtaaactattatacaactgtttttgcgactttataggcaggtaaattttgctattactattgaatacaaatgacaattcatttatgaccactcaaacagcgttagtaaccatttagtgacaaaggattaaaacatccatctggatgttaattttgaagatgtaaattatatgttgtttaaatttttccaggcatctgaaaaccttatctgctagacaatgtaagattcacacagagttatctgggattctgattttttaaatagtacatatcattaaaccattttctctaaatgtaagaagagcagaaaaaatcttataagattatcagatttttctaatgacacagaaatgtaagaaaaaaatccctttatattgaaaaaagatgcagtcaaagtcttttcagacatgcccaaactttgagaatttcttcaaccatctaatgctataaagatttttgttcttcctgttcacaaccagttgtataacagaaatactagctactgttttccttcctgtgtgtgaagtaatgaatcattgattatgtgacttgttatgtattcaattaaacactaaagaataaaacattcactcctttaattattc

SEQ ID NO: 310278 - DNA, 4225 bp, Homo sapiens
  misc_feature (119)..(119): n is a, c, g, or t
  misc_feature (4001)..(4001): n is a, c, g, or t
  misc_feature (4225)..(4225): n is a, c, g, or t
gcacagcggcgcgctcgcaccgctcggctccgcgcggctctaggaggtggcggcggtggcggtggcggcggtggcggcggcggcggcggcggggcgcagggctgagcgagcgtccgggntccggggctccggggaaggcggttgcagctcctgagtgcagcgcggcttcctgccactgtcccggcccggccacctctctgtcatggctctggcggacagcacacgtggattacccaacgggggcggcggcgggggcggcagtggctcctcgtcgtcctccgcggagccaccgctcttccccgacatcgtggagctgaacgtggggggccaggtgtacgtgacccggcgctgcacggtggtgtcggtgcccgactcgctgctctggcgcatgttcacgcagcagcagccgcaggagctggcccgggacagcaaaggccgcttctttctggaccgggacggcttcctcttccgctacatcctggattacctgcgggacttgcagctcgtgctgcccgactacttccccgagcgcagccggctgcagcgcgaggccgagtacttcgagctgccagagctcgtgcgccgcctcggggcgccccagcagcccggcccggggccgccgccctcgcggcgcggggtgcacaaggagggctcgctgggtgacgagctgctgccgcttggctactcggagcccgaacagcaggagggcgcctctgccggggcgccgtcgcccacgctggagctggctagccgcagtccgtccgggggcgcggcgggcccgctgctcacgccgtcccagtcgctggacggcagccggcgctcgggctacatcaccatcggctaccgcggctcctacaccatcgggcgggacgcgcaggcggacgccaagttccggcgagtggcgcgcatcaccgtttgcggaaagacgtcgctggccaaggaggtgtttggggacaccctgaacgaaagccgggaccccgaccgtcccccggagcgctacacctcgcgctattacctcaagttcaacttcctggagcaggccttcgacaagctgtccgagtcgggcttccacatggtggcgtgcagctccacgggcacctgcgcctttgccagcagcaccgaccagagcgaggacaagatctggaccagctacaccgagtacgtcttctgcagggagtgagctccccagaccccctcgccactccagcgcccagtccttctcctgcccgagagatgattacagagcctcttgtcccacctttgtcccctggctgctgccctcccattctccccctccagtagtagctgggtgagacctgtccgcccaccttccctccactacagaacctgcagccgcaaatcctctgggctgcttcgtcttctttggacctcctgaaccgagagaacccagaggaacccccaccccacccccacctaccactccatgctttctctactccctgcctcaaaccacccctcccccagatggtacttcagtttggatctattgggggagtgtggccacagaccgggggatgattgaattgttcagaacctgattggaccgtgtccaatgtgcggaagatttccttgaaatcttctcaagctcttatgactcactgggggtttaagagatcaggattggttccactgtctggggttagtgttttacaaggtcattacacagtctttttgacctcttttgaaggtagagttttagaaggctggatggaagattctgagcctggaattaggaccccatggaggcagttcagtaactaaactaataaagttttgaaaagttacacgtaaagtagaagaatctagtgcgtgggacagtaaaggatcctttctcgtacagaataaaaggtctcagcctgtagcttaaacttatagaaagtgatccgcctgcctgcagaggcgcccttttcagctgctgctcgccagaagcccttgattccactggttgacatggcagcagttactggcaagagggagaaaggacgctgccgcctaagagtgcaaggctgctcaggtctccaagcgccgtaggaggtcacctggcagtgactgtagggagctgggtcatagtgcacgtcgtgggtattaggaaagcctgtattctttcaatgaatgtcagtaggaccttcctttagctgtaagacttggtgggcggggtggggtggggagggaggaaagggtaggaagggtgggaagggagaagcagacatagtcatttatgatttgaaagttggaaatttgtaccatctgtttgagtatatgcacatttaaaaaatatcatatagtaaatgcaaacatgccaagtattttataaagattaataacagacctactcttacctggcagtttacttaacttactgttttgagtcctaaacttagagttgttaatgcttatatataatctaaccaaagagttacccagtagggttttagtttttgaacttttattttcttgttgattataaatcctgattttggaatctattgcgcaaaagaagtttcattttggttacttagacctaagatcacttattaaaaatccttattttctccaagcccagcaaacgttgacttctgggcaaacctgaaaacctgaaaatgccactttcatgcagtttgtttgaagttaagtggaatcctttcaaatgacgagctgcagagaactcagcaccaagggctgcctatctgtagatagctgtaaaatggaatatttttaaatgaaggcaaataagtacttaaaagtgagctgagcaataaaatggtccaataataggtaaatgcaacagaaacagaaggagacctggttgccttatgcctttactcttacatggaataaattcccaatgcatatcctatgtaaaccataagtgaagggaaataaacctcgtcatgctccatgctgtgaggtgtcctttggatattctgtgatgacagagaagcctattttgttttgttttcagcatctttctctgatgtacgtttttaaggattttgtaagagctgttttcagtgtttaaattagtgctatttttccttgtttttaaaaatgaatctcgtactgtatcttactatgtccatacagatgttacaaatcgacagttttattcttagactcatgtgatccaagctgtatataccatatataaacattttacatgaatcatttagttttttaattcatttactaatgctataaaatttcctatattaccccagtaatttgcatcagctggtttatatactaaagcaacatgttttgatgagtttcttacatccttatcgaggaattgggttaggaaaaaatacataattgtaaaactgagtttgctgtattatactttttttcttgagtattagttgtattactaatcatatgttgattaactgtctacttaaagtcaaggtacctgtatttttaatccactaatttttttttagttgggaaatagatttcaggtcttttattagactaacattttttgagaagtaaaattgacttcatatacaaagcctgtaattttaggcgaaatggaagcagaaatctaggaagttgtgcttgcttgtatgttgagtttggtctcagactaagtaatgcatcagaattcatctgtttgaagcctgaaataatttaggactctgattcactgaccaaaagtcagtgttgcagagatttctctaccccgtatggtattttgttagattgttcaacaggaagcacatgattgagaacatcttgggacagaccaaaaccactgacagatggcaaggctcggcgattctgatttcccttctcaaatctgctcaactccaagagtcttgagaaactgctgcgtgctctattccactgccttgtacatagagatcatattaactgcaccctcgaacacccagcctcccccgccccgtatattatttcaaccgcctgcccctctcctcctcacgcgcccgcaacccctcctcctctccccagcgccctcnctccctcttcacatttcaccccttctccagtaccctcgctttcttaacactactttacaggctgcggatccacccccgcctgactcttttttctccccaccacgcctcattctccttctctgccgtcccttctcccctcccgtccccacctccctctacgtcatctcacttcttttgagcctcctcctctgtctccgcacgcctccctctttctcttctccccn

SEQ ID NO: 310279 - DNA, 2914 bp, Homo sapiens
gaattcagagggaccagcccaggtggggcaggcagaaaactccggagggataattggcagggcagttcggtcctcccagtttccgctaagacacaaattactcagcgggcagtggcgcttggctggcatcacctgcaattaccttaatagggcgggaaggcggtgcagcagtggtggtcggggcagccccgctctgctgcatgcctgcgatgggagggacggagtctccaggttccagccgtctcatggctagggaagtttccagaaacccgctggaccctctcttctccaccaagcctctcacctgtctgttctctccccagtcagcctgggcttctgcccaccacagccctaccgggagccggaaccctctgtggccgaacccccttcctgcccgctggctttgaacatgagccttcgagactctagctacagcatggcccccgggccctgtgtggtggcccagctgccctctgaagacatgggccacttgacagacccccagagcagagaccatggcttcctgcgcaccaagatgaaggtgacccttggggacagtcccagtggagacctgttcacctgccgtgtctgccagaaggccttcacctaccagcgcatgctgaaccgccacatgaagtgtcacaacgacgtcaagaggcacctctgcacgtactgcgggaagggcttcaatgacaccttcgacctcaagagacacgtccgaactcacactggcgtgcggccctacaagtgcagcctgtgtgacaaggccttcacgcagcgctgctctctggagtctcacctcaagaagatccatggtgtgcagcagaagtacgcgtacaaggagcggcgggccaagctgtacgtgtgtgaggagtgcggctgcacatctgagagccaggagggccacgtcctgcacctgaaggagcaccaccctgacagcccgctgctgcgcaagacctccaagaaggtggccgtggcactacagaacactgtcacttccctgctgcagggcagcccccacctgtgagtggctcgagccctgggggtgctcctggaagccccaagagcatccaggattgcctcccagctgcctggccagcccaccctcctgcaacctctcacccgaacaccagtgatcaggactggagcccccgtgccttggtctcccccctgggcacacgtgctcactcaggcccagcaatgacctctgctcatttttgcatttttgacttatgggccgaggctgttctgagcctgggaagatgtacctatgtcaagagaagggatgaggccaaggctgccttcaattagaagcagccgcccacagagacaggcactgtgtgcctggcagcaggacttcctacccagaggaggttcgagctaggatcccactgcccccgcctctcagcacagggcaggggctgcaggtccccagtggacatcagagtcaaaagcactggcaaagggtacccctgcaaacaactgtggtgggggctggcagcagaccccccacctggcagggcttctaatgctcagggttctggagggctctgtccttccggcaaggagaggcacacatgtgtgcccagccgtgtgtgtgcgtgtgcttgtgtgtgtgcactgctgtgtgtgtgtgcacgcacaggaagcctttccacatatcacctcatttctaagaaataaactacaaggtgccaagaaggttttatttccttttattttttaaagatgacaaatgtacagatgttaatatatttttggtgccaatgcgatgtttttaagagtgggatggagctggcttttctccattcccgtgcgcttctatttatcctggacatttcaaacctcctctgtgccttggctctgggcgggggctgccccaacccacccccgttctttgtacgtgctgagacagccactagaagatcttcctccagcggcgccctggacggctgctcctgcgaacagcccatggcatcttctgctcttccctcccggctctgccctgcacatcctgttgagccaagccccagtgacccggagagctggcctgatgctgagagtgtgtcctcctggggctttagggggcaggaaggtgggacgaatgacgatgcccatccactacctgaagcactaggacactcttgcagggccaggctggaagaccggcccttttcttggttgagtcaaaagccttagcacagtggcaaaaaatgggacagaatgatgaccagcacctcagaaacttccagagggaggagaggatttgatggctaccaaattgtatctgttgccttttttctgactttttcacctgaccaggctggggtttggagtggctgtggggagacccgtcctggctggctggctggctcccttgctcccttgctgcagctgggaaaggggttctgggtgtaaagaggtgtgcgtcttgtgggccaaagggaaaaacaggcaggggtcagagccagcctgccagaggcaaatgcaaaagaggtccccagaacacagccagctgggcagccccttaaagccaaaccccacctgaagcagaaccactttggcctcccctgcccaaaatgggtagtgtctacacgtccccgggctcaggctcaggcccagccctgggctgacctgagaggaaggctccttcctggactgccctctgaaatgtgtatagattgattctaaaatctcttgtttcacttgactttagagtgtctgggacgctgctgtattctgaaagtcacatagcacacagtaatgttatctggaagctctgtttttgtttacatttctgtatccctgggttgactgccaatccgaggccgtcatgaagctctgtgttgtctgttttattttataaccttcctctcaactattaaaattagagatctaatgtttaaaaaaattc

SEQ ID NO: 310280 - DNA, 2684 bp, Homo sapiens
gaattcagagggaccagcccaggtggggcaggcagaaaactccggagggataattggcagggcagttcggtcctcccagtttccgctaagacacaaattactcagcgggcagtggcgcttggctggcatcacctgcaattaccttaatagggcgggaaggcggtgcagcagtggtggtcggggcagccccgctctgctgcatgcctgcgatgggagggacggagtctccaggttccagccgtctcatggctagggaagtttccagaaacccgctggaccctctcttctccaccaagcctctcacctgtctgttctctccccagtcagcctgggcttctgcccaccacagccctaccgggagccggaaccctctgtggccgaacccccttcctgcccgctggctttgaacatgagccttcgagactctagctacagcatggcccccgggccctgtgtggtggcccagctgccctctgaagacatgggccacttgacagacccccagagcagagaccatggcttcctgcgcaccaagatgaaggtgacccttggggacagtcccagtggagacctgttcacctgccgtgtctgccagaaggccttcacctaccagcgcatgctgaaccgccacatgaagtgtcacaacgacgtcaagaggcacctctgcacgtactgcgggaagggcttcaatgacaccttcgacctcaagagacacgtccgaactcacactggcgtgcggccctacaagtgcagcctgtgtgacaaggccttcacgcagcgctgctctctggagtctcacctcaagaagatccatggtgtgcagcagaagtacgcgtacaaggagcggcgggccaagctgtacgtgtgtgaggagtgcggctgcacatctgagagccaggagggccacgtcctgcacctgaaggagcaccaccctgacagcccgctgctgcgcaagacctccaagaaggtggccgtggcactacagaacactgtcacttccctgctgcagggcagcccccacctgtgagtggctcgagccctgggggtgctcctggaagccccaagagcatccaggattgcctcccagctgcctggccagcccaccctcctgcaacctctcacccgaacaccagtgatcaggactggagcccccgtgccttggtctcccccctgggcacacgtgctcactcaggcccagcaatgacctctgctcatttttgcatttttgacttatgggccgaggctgttctgagcctgggaagatgtacctatgtcaagagaagggatgaggccaaggctgccttcaattagaagcagccgcccacagagacaggcactgtgtgcctggcagcaggacttcctacccagaggaggttcgagctaggatcccactgcccccgcctctcagcacagggcaggggctgcaggtccccagtggacatcagagtcaaaagcactggcaaagggtacccctgcaaacaactgtggtgggggctggcagcagaccccccacctggcagggcttctaatgctcagggttctggagggctctgtccttccggcaaggagaggcacacatgtgtgcccagccgtgtgtgtgcgtgtgcttgtgtgtgtgcactgctgtgtgtgtgtgcacgcacaggaagcctttccacatatcacctcatttctaagaaataaactacaaggtgccaagaaggttttatttccttttattttttaaagatgacaaatgtacagatgttaatatatttttggtgccaatgcgatgtttttaagagtgggatggagctggcttttctccattcccgtgcgcttctatttatcctggacatttcaaacctcctctgtgccttggctctgggcgggggctgccccaacccacccccgttctttgtacgtgctgagacagccactagaagatcttcctccagcggcgccctggacggctgctcctgcgaacagcccatggcatcttctgctcttccctcccggctctgccctgcacatcctgttgagccaagccccagtgacccggagagctggcctgatgctgagagtgtgtcctcctggggctttagggggcaggaaggtgggacgaatgacgatgcccatccactacctgaagcactaggacactcttgcagggccaggctggaagaccggcccttttcttggttgagtcaaaagccttagcacagtggcaaaaaatgggacagaatgatgaccagcacctcagaaacttccagagggaggagaggatttgatggctaccaaattgtatctgttgccttttttctgactttttcacctgaagcagaaccactttggcctcccctgcccaaaatgggtagtgtctacacgtccccgggctcaggctcaggcccagccctgggctgacctgagaggaaggctccttcctggactgccctctgaaatgtgtatagattgattctaaaatctcttgtttcacttgactttagagtgtctgggacgctgctgtattctgaaagtcacatagcacacagtaatgttatctggaagctctgtttttgtttacatttctgtatccctgggttgactgccaatccgaggccgtcatgaagctctgtgttgtctgttttattttataaccttcctctcaactattaaaattagagatctaatgtttaaaaaaattc

SEQ ID NO: 310281 - DNA, 2656 bp, Homo sapiens
agcgggccttccggcctggggcacccgcggcggcgtcgaggctgcgggcgggcgggcgggcgcagtcagcctgggcttctgcccaccacagccctaccgggagccggaaccctctgtggccgaacccccttcctgcccgctggctttgaacatgagccttcgagactctagctacagcatggcccccgggccctgtgtggtggcccagctgccctctgaagacatgggccacttgacagacccccagagcagagaccatggcttcctgcgcaccaagatgaaggtgacccttggggacagtcccagtggagacctgttcacctgccgtgtctgccagaaggccttcacctaccagcgcatgctgaaccgccacatgaagtgtcacaacgacgtcaagaggcacctctgcacgtactgcgggaagggcttcaatgacaccttcgacctcaagagacacgtccgaactcacactggcgtgcggccctacaagtgcagcctgtgtgacaaggccttcacgcagcgctgctctctggagtctcacctcaagaagatccatggtgtgcagcagaagtacgcgtacaaggagcggcgggccaagctgtacgtgtgtgaggagtgcggctgcacatctgagagccaggagggccacgtcctgcacctgaaggagcaccaccctgacagcccgctgctgcgcaagacctccaagaaggtggccgtggcactacagaacactgtcacttccctgctgcagggcagcccccacctgtgagtggctcgagccctgggggtgctcctggaagccccaagagcatccaggattgcctcccagctgcctggccagcccaccctcctgcaacctctcacccgaacaccagtgatcaggactggagcccccgtgccttggtctcccccctgggcacacgtgctcactcaggcccagcaatgacctctgctcatttttgcatttttgacttatgggccgaggctgttctgagcctgggaagatgtacctatgtcaagagaagggatgaggccaaggctgccttcaattagaagcagccgcccacagagacaggcactgtgtgcctggcagcaggacttcctacccagaggaggttcgagctaggatcccactgcccccgcctctcagcacagggcaggggctgcaggtccccagtggacatcagagtcaaaagcactggcaaagggtacccctgcaaacaactgtggtgggggctggcagcagaccccccacctggcagggcttctaatgctcagggttctggagggctctgtccttccggcaaggagaggcacacatgtgtgcccagccgtgtgtgtgcgtgtgcttgtgtgtgtgcactgctgtgtgtgtgtgcacgcacaggaagcctttccacatatcacctcatttctaagaaataaactacaaggtgccaagaaggttttatttccttttattttttaaagatgacaaatgtacagatgttaatatatttttggtgccaatgcgatgtttttaagagtgggatggagctggcttttctccattcccgtgcgcttctatttatcctggacatttcaaacctcctctgtgccttggctctgggcgggggctgccccaacccacccccgttctttgtacgtgctgagacagccactagaagatcttcctccagcggcgccctggacggctgctcctgcgaacagcccatggcatcttctgctcttccctcccggctctgccctgcacatcctgttgagccaagccccagtgacccggagagctggcctgatgctgagagtgtgtcctcctggggctttagggggcaggaaggtgggacgaatgacgatgcccatccactacctgaagcactaggacactcttgcagggccaggctggaagaccggcccttttcttggttgagtcaaaagccttagcacagtggcaaaaaatgggacagaatgatgaccagcacctcagaaacttccagagggaggagaggatttgatggctaccaaattgtatctgttgccttttttctgactttttcacctgaccaggctggggtttggagtggctgtggggagacccgtcctggctggctggctggctcccttgctcccttgctgcagctgggaaaggggttctgggtgtaaagaggtgtgcgtcttgtgggccaaagggaaaaacaggcaggggtcagagccagcctgccagaggcaaatgcaaaagaggtccccagaacacagccagctgggcagccccttaaagccaaaccccacctgaagcagaaccactttggcctcccctgcccaaaatgggtagtgtctacacgtccccgggctcaggctcaggcccagccctgggctgacctgagaggaaggctccttcctggactgccctctgaaatgtgtatagattgattctaaaatctcttgtttcacttgactttagagtgtctgggacgctgctgtattctgaaagtcacatagcacacagtaatgttatctggaagctctgtttttgtttacatttctgtatccctgggttgactgccaatccgaggccgtcatgaagctctgtgttgtctgttttattttataaccttcctctcaactattaaaattagagatctaatgtttaaaaaaattc

SEQ ID NO: 310282 - DNA, 1439 bp, Homo sapiens
agcgggccttccggcctggggcacccgcggcggcgtcgaggctgcgggcgggcgggcgggcgcagtcagcctgggcttctgcccaccacagccctaccgggagccggaaccctctgtggccgaacccccttcctgcccgctggctttgaacatgagccttcgagactctagctacagcatggcccccgggccctgtgtggtggcccagctgccctctgaagacatgggccacttgacagacccccagagcagagaccatggcttcctgcgcaccaagatgaaggtgacccttggggacagtcccagtggagacctgttcacctgccgtgtctgccagaaggccttcacctaccagcgcatgctgaaccgccacatgaagtgtcacaacgacgtcaagaggcacctctgcacgtactgcgggaagggcttcaatgacaccttcgacctcaagagacacgtccgaactcacactggcgtgcggccctacaagtgcagcctgtgtgacaaggccttcacgcagcgctgctctctggagtctcacctcaagaagatccatggtgtgcagcagaagtacgcgtacaaggagcggcgggccaagctgtacgtgtgtgaggagtgcggctgcacatctgagagccaggagggccacgtcctgcacctgaaggagcaccaccctgacagcccgctgctgcgcaagacctccaagaaggtggccgtggcactacagaacactgtcacttccctgctgcagggcagcccccacctgtgagtggctcgagccctgggggtgctcctggaagccccaagagcatccaggattgcctcccagctgcctggccagcccaccctcctgcaacctctcacccgaacaccagtgatcaggactggagcccccgtgccttggtctcccccctgggcacacgtgctcactcaggcccagcaatgacctctgctcatttttgcatttttgacttatgggccgaggctgttctgagcctgggaagatgtacctatgtcaagagaagggatgaggccaaggctgccttcaattagaagcagccgcccacagagacaggcactgtgtgcctggcagcaggacttcctacccagaggaggttcgagctaggatcccactgcccccgcctctcagcacagggcaggggctgcaggtccccagtggacatcagagtcaaaagcactggcaaagggtacccctgcaaacaactgtggtgggggctggcagcagaccccccacctggcagggcttctaatgctcagggttctggagggctctgtccttccggcaaggagaggcacacatgtgtgcccagccgtgtgtgtgcgtgtgcttgtgtgtgtgcactgctgtgtgtgtgtgcacgcacaggaagcctttccacatatcacctcatttctaagaaataaactacaaggtgcca

SEQ ID NO: 310283 - DNA, 2408 bp, Homo sapiens
gatctactgctttggccttggtaaattatattctccaggatgcatatttgggtgggcaagagaaggaatatgaaggcatggtggcccctcaggctcacctcctctgcagagaactgctgctcctgcagtgatgtgctgctgctggggctggatagcagccatggtactatgacagtgtcctccctcaaccccggccatcccttagccctccagtccctggctagacaattccttgcacataaactaaactacttagtcatttaggagcaaatggagatgtaataaactgggctagatcatttcttgactgttattttctttaagttttcactgttaagatcaaatgaaaaataatgccaaaggagttttttcttcaaaggtttgaaaagaattttcatagaaagcgaaaaatggcagtaatgtatatgttaattaagaccaagttataataatagcctttgtgtagtgctttgagaatacttttacatacacaattgtgttggatgatttaataatgtatcgaccaggaaaatgagaaagcacccctcccccttaccttttacattgaaggtagcccagacttggcagcctctagggaaccagcaaggtcagagtccatcacacaactttcctgctaaagtggtatttgccaaatcatgtccagaggtgttgtttctacaatcttcttggcaactccgaaatgggctgcatttggggcacttccttttgccatccttctggcccttcttgcccgtcaaaagcttttgtctgtgggctttggaaatagtccagtttttaaggtgttttatttttcagagttaatggtttcttgactaatcagactatgaaaatgccttctctaggttctttaatagttataccaagtgttattcccattttaggaatgaagaaactaaggctgacaggcaaaggtcatgtagccagcatgtggcaacactagaataaattggcagactcaacaccattagcagacctgtctggagggaatggtgggtcttgaactttcaagtaccctctaaactttttcagcaggaatttcagaagtctcaagaattctgagctccctgctggccatgggacattgtgctgatatggtgggaaaaatgcaggttgagaaagccttcgcatcctgccctgttggaggctggtgtttgggatgggtatgaaggcctttggcggtggctatagcttatgcagacctgaagcaatatacctctgggatggaagatcctgcttattttgggataatttctaaatctgtcatatctatccccaaccctgtccccattaaatggctaattgccaaaaaagaggaagcaacatcttcagctctagcaagtctcggggatgtctcactcattgtgaggactgtgaggattcggtatatatttttaagtgagtgaaccttgttacatgttttaaccttggttcctcctgtcaagaattttatcttctcatgtcttgggcaccttttccctctacccagatcaaatagcaaaatgcttagttaatctttgagaggatagaatccatgggaagcacaggatgaaatgatgacgctgtgctaagctgtgtcaccgtgggtaagcccctgcccttgctgtgactttccacttcctaaattagaatggaagggggaaaaaaaaaaaccataacccaacttcatttttatgagtggccctttagaaaatagtgtaatccgttgagtttccattgtacctttcctcagagatgctcaaaggggcgggggtgcccttacatggaacatgatgagagtgaggattaatcactcccagtcctctgggaggggggaagtgacctgaactttctaattgaaaaagtaggaagtgtgtgcccaatgcccagatgagtgggaagattactgtagttgattgaggaaatgccgtatttatcattcacccttcccatgacctttgtttttccctaatgccttaaaaaataataaggaaacattgtcctacctgattctaccactgttcatctcacgcagtgtgcactccctgactctgaattttgcagctttgagactgaggtaattgagactgatagggatttaaggatatttggttcccacaagaataagctaatattaagttattattttacttgtggagaagaactaaattgtataagctgcctggttcttctagacacacattgcctagtgaaaaaattaaaattttgaagaaaaagcagttttacttgttaatacttgccatgtgtctcacccacaaatagcctcatttaaaactttgccttacctagcatgaatggataaagaaaaaggagagttattagggaatctaaattcccaactaactttagcactgatagtggtgaagctatgggcaagacatttattttgt

SEQ ID NO: 310284 - DNA, 431 bp, Homo sapiens
agacataagctgaacctctggcctgcagttccagatccaaggtgactgagacaaactgccagctgccactggcttatcaggagcacctggagatggacgacatgtctcccaggctgagagccttcctctccgaacccattggagaaaaggatgtctgctgggtggatggcatcagccatgagctcgcgatcaatttggtcaccaaaggtatcaataaggcctacatcctgctgggacaattccttctgatgcacaagaatgaagccgagtttcagaggtggctcatttgctgttttggtgccactgagtgtgaggcccagcagacttctcactgcctcaaggagtggtgtgcctgcttcctgtagacacaaacctcattgctgccccccaccaccctctggggaaaatgacgccttctccacctaaaaaca

SEQ ID NO: 310285 - DNA, 594 bp, Homo sapiens
agacataagctgaacctctggcctgcagttccagatccaaggtgactgagacaaactgccagctgccactggcttatcaggagcacctgaatctgctgacacatcaaggccacttttcttaggagccccctgacttccaaaatcagtgcctttggattcatctcttccgggagagttcagtgtcttctgaaatgttacaaaacgtccttcagagcaagaaggcgtacacgaggagctcgactctgtagaaaggagatggacgacatgtctcccaggctgagagccttcctctccgaacccattggagaaaaggatgtctgctgggtggatggcatcagccatgagctcgcgatcaatttggtcaccaaaggtatcaataaggcctacatcctgctgggacaattccttctgatgcacaagaatgaagccgagtttcagaggtggctcatttgctgttttggtgccactgagtgtgaggcccagcagacttctcactgcctcaaggagtggtgtgcctgcttcctgtagacacaaacctcattgctgccccccaccaccctctggggaaaatgacgccttctccacctaaaaaca

SEQ ID NO: 310286 - DNA, 543 bp, Homo sapiens
cttgaacctggaaggtggaggttgcagtgagccgctatcgtgccactgcactccaacctgggctatagagtgagactctgtctcaaaataaaagaagaagaaaaaaaaacacacaagagtttaaacctgaaatgacatgaagacttaggcgactggcgagagagaatcaaagaaagttgtgtcactgcaccatggagtctggtggtgattgaagtccgttcagcacaggtgctcaggacctgcggacttgggcagagggcattgtaagcagctagagaacaagagagggcagagacagcttatctctgcttgacaaggcccagcattatggcctacatcctgctgggacaattccttctgatgcacaagaatgaagccgagtttcagaggtggctcatttgctgttttggtgccactgagtgtgaggcccagcagacttctcactgcctcaaggagtggtgtgcctgcttcctgtagacacaaacctcattgctgccccccaccaccctctggggaaaatgacgccttctccacctaaaaaca

SEQ ID NO: 310287 - DNA, 349 bp, Homo sapiens
  misc_feature (4)..(4): n is a, c, g, or t
  misc_feature (6)..(7): n is a, c, g, or t
  misc_feature (9)..(10): n is a, c, g, or t
  misc_feature (40)..(40): n is a, c, g, or t
gctncnncnnctactactactactaaattcgcggccgcgncagcacttatgaattggcaaagtttcagagaccctccctcccctatgtcagatactacaataccatacaggattaaaggtgtaatatgcagatcaagacctagagattaaatacagacttcaggtaggctgctgcttggaatacttattatttttatacttattttttaatatatttccaggaagaggaagatcaaaacgttgtaccagaaactacctctgaaggctacactttccaagttcaggatggggctcctgggacctttaacttttagatcatgtagctgagacataaatttgttgtgtacta

SEQ ID NO: 310288 - DNA, 406 bp, Homo sapiens
gctggttatcctggataatcttggtatctttgcagttaagaggttcatcaacggttctattatgccacagtgaacaagataccaagattattctggttatcctggatgccatttcaaatatctttcaggctgctgagaaactaggtgaaactgagaaacttagtataatgattgaagaatgtggaggcttagacaaaattgaagctctacaaaaccatgaaaatgagtctgtgtataaggcttcgttaagcttaattgagaagtatttctctgtagaggaagaggaagatcaaaacgttgtaccagaaactacctctgaaggctacactttccaagttcaggatggggctcctgggacctttaacttttagatcatgtagctgagacataaatttgttgtgtacta

SEQ ID NO: 310289 - DNA, 1013 bp, Homo sapiens
  misc_feature (64)..(64): n is a, c, g, or t
  misc_feature (913)..(913): n is a, c, g, or t
cagtgatgatagtacgggcgggtgttaatcaggacgagggggtgcgcgagccgtaacggtcttngagctgagtcgaggtggaccctttgaacgcagtcgccctacagccgctgattccccccgcatcgcctcccgtggaagcccaggcccgcttcgcagctttctccctttgtctcataaccatgtccaccaacgagaatgctaatacaccagctgcccgtcttcacagattcaagaacaagggaaaagacagtacagaaatgaggcgtcgcagaatagaggtcaatgtggagctgaggaaagctaagaaggatgaccagatgctgaagaggagaaatgtaagctcatttcctgatgatgctacttctccgctgcaggaaaaccgcaacaaccagggcactgtaaattggtctgttgatgacattgtcaaaggcataaatagcagcaatgtggaaaatcagctccaagctactcaagctgccaggaaactactttccagagaaaaacagccccccatagacaacataatccgggctggtttgattccgaaatttgtgtccttcttgggcagaactgattgtagtcccattcagtttgaatctgcttgggcactcactaacattgcttctgggacatcagaacaaaccaaggctgtggtagatggaggtgccatcccagcattcatttctctgttggcatctccccatgctcacatcagtgaacaagctgtctgggctctaggaaacattgcaggtgatggctcagtgttccgagacttggttattaagtacggtgcagttgaaccactgttgggtctccttgcagtcctgatatgtcatctttagcatgtggctacttacgtaatcttacctggacactttctaatctttgccgcaacaagatctgccccganaatgctgtgggcagatcttcctaccttgcggccgctcaagatccagtttcaaacgcgggtttccctttgggccccgacctggcggcggccggttgccccg

SEQ ID NO: 310290 - DNA, 9678 bp, Homo sapiens
  misc_feature (1)..(1): n is a, c, g, or t
  misc_feature (5)..(5): n is a, c, g, or t
  misc_feature (8)..(8): n is a, c, g, or t
  misc_feature (14)..(14): n is a, c, g, or t
  misc_feature (18)..(18): n is a, c, g, or t
  misc_feature (27)..(27): n is a, c, g, or t
  misc_feature (29)..(30): n is a, c, g, or t
  misc_feature (45)..(45): n is a, c, g, or t
  misc_feature (52)..(52): n is a, c, g, or t
  misc_feature (59)..(59): n is a, c, g, or t
  misc_feature (63)..(63): n is a, c, g, or t
  misc_feature (86)..(86): n is a, c, g, or t
  misc_feature (173)..(173): n is a, c, g, or t
  misc_feature (179)..(179): n is a, c, g, or t
  misc_feature (181)..(183): n is a, c, g, or t
  misc_feature (189)..(189): n is a, c, g, or t
  misc_feature (192)..(192): n is a, c, g, or t
  misc_feature (210)..(210): n is a, c, g, or t
  misc_feature (259)..(259): n is a, c, g, or t
  misc_feature (355)..(355): n is a, c, g, or t
  misc_feature (387)..(387): n is a, c, g, or t
  misc_feature (451)..(451): n is a, c, g, or t
ngccnccnctgcgnccgnccctccccntnngctttccttctcccnccgcctnggctccnacangaggggccggcggggcaggccgnccaagcagcccgcggctcccgctgcggagcgctgcgccccggccccgccgccgccgccgcccacgtccggacccatcgggggctccnctcgcngnnncgcggnagnagccggggcaggtgggcngccgccaggctgaggtggcgcccaagacgcggctgagctcgcccagggngggcagcagtagccggaggaagccgccgccgccgccgccggccccccccagcaccagcgccccgggccggggggggcgaggaggcgggggcggcangacggggggcgggggcggcggcggccacctgncccggaccaccgcggcccggagggccgtcaacaaagtggtgtacgatgaccacgagagcgaggnggaggaggaagaggaggacatggtctccgaggaggaggaggaggaggacggcgacgccgaggagacccaggattctgaggacgacgaggaggatgagatggaagaggacgacgatgactccgattatccggaggagatggaagacgacgacgacgacgccagttactgcacggaaagcagcttcaggagccatagtacctacagcagcactccaggtaggcgaaaaccaagagtacatcggcctcgttctcctatattggaagaaaaagacatcccgccccttgaatttcccaagtcctctgaggatttaatggtgcctaatgagcatataatgaatgtcattgccatttacgaggtactgcggaactttggcactgttttgagattatctccttttcgctttgaggacttttgtgcagctctggtgagccaagagcagtgcacactcatggcagagatgcatgttgtgcttttgaaagcagttctgcgtgaagaagacacttccaatactacctttggacctgctgatctgaaagatagcgttaattccacactgtatttcatagatgggatgacgtggccagaggtgctgcgggtgtactgtgagagtgataaggagtaccatcacgttcttccttaccaagaggcagaggactacccatatggaccagtagagaacaagatcaaagttctacagtttctagtcgatcagtttcttacaacaaatattgctcgagaggaattgatgtctgaaggggtgatacagtatgatgaccattgtagggtttgtcacaaacttggggatttgctttgctgtgagacatgttcagcagtataccatttggaatgtgtgaagccacctcttgaggaggtgccagaggacgagtggcagtgtgaagtctgtgtagcacacaaggtgcctggtgtgactgactgtgttgctgaaatccaaaaaaataaaccatatattcgacatgaacctattggatatgatagaagtcggaggaaatactggttcttgaaccgaagactcataatagaagaagatacagaaaatgaaaatgaaaagaaaatttggtattacagcacaaaggtccaacttgcagaattaattgactgtctagacaaagattattgggaagcagaactctgcaaaattctagaagaaatgcgtgaagaaatccaccgacacatggacataactgaagacctgaccaataaggctcggggcagtaacaaatcctttctggcggcagctaatgaagaaattttggaatccataagagccaaaaagggagacattgataatgttaaaagcccagaagaaacagaaaaagacaagaatgagactgagaatgactctaaagatgctgagaaaaacagagaagaatttgaagaccagtcccttgaaaaagacagtgacgacaaaacaccagatgatgaccctgagcaaggaaaatctgaggtaggtgatttcacatcggagaagtccaacggggagctaagtgaatctcctggagctggaaaaggagcatctggctcaactcgaatcatcaccagattgcggaatccagatagcaaacttagtcagctgaagagccagcaggtggcagccgctgcacatgaagcaaataaattatttaaggagggcaaagaggtactggtagttaactctcaaggagaaatttcacggttgagcaccaaaaaggaagtgatcatgaaaggaaatatcaacaattattttaaattgggtcaagaagggaagtatcgcgtctaccacaatcaatactccaccaattcatttgctttgaataagcaccagcacagagaagaccatgataagagaaggcatcttgcacataagttctgtctgactccagcaggagagttcaaatggaacggttctgtccatgggtccaaagttcttaccatatctactctgagactgactatcacccaattagaaaacaacatcccttcatcctttcttcatcccaactgggcatcacatagggcaaattggatcaaggcagttcagatgtgtagcaaacccagagaatttgcattggctttagccattttggagtgtgcagttaaaccagttgtgatgctaccaatatggcgagaatctttaggacataccaggttacaccggatgacatcaattgaaagagaagaaaaggagaaagtcaaaaaaaaagagaagaaacaggaagaagaagaaacgatgcagcaagcgacatgggtaaaatacacatttccagttaagcatcaggtttggaaacaaaaaggtgaagagtacagagtgacaggatatggtggttggagctggattagtaaaactcatgtttataggtttgttcctaaattgccaggcaatactaatgtgaattacagaaagtcgttagaaggaaccaaaaataatatggatgaaaatatggatgagtcagataaaagaaaatgttcacgaagtccaaaaaaaataaaaatagagcctgattctgaaaaagatgaggtaaaaggttcagatgctgcaaaaggagcagaccaaaatgaaatggatatctcaaagattactgagaagaaggaccaagatgtgaaggagctcttagattctgacagtgataaaccctgcaaggaagaaccaatggaagtagacgatgacatgaaaacagagtcacatgtaaattgtcaggagagttctcaagtagatgtggtcaatgttagtgagggttttcatctaaggactagttacaaaaagaaaacaaaatcatccaaactagatggacttcttgaaaggagaattaaacagtttacactggaagaaaaacagcgactcgaaaaaatcaagttggagggtggaattaagggtataggaaagacttctacaaattcttcaaaaaatctctctgaatcaccagtaataacgaaagcaaaagaagggtgtcagagtgactcgatgagacaagaacagagcccaaatgcaaataatgatcaacctgaggacttgattcagggatgttcacaaagtgattcctcagttcttagaatgagtgatcctagtcataccacaaacaaactttatccaaaagatcgagtgttagatgatgtctccattcggagcccagaaacaaaatgtccgaaacaaaattccattgaaaatgacatagaagaaaaagtctctgaccttgccagtagaggccaggaacccactaagagtaaaaccaaaggaaatgattttttcatcgatgactctaaactagccagtgcagatgatattggtactttgatctgtaagaacaaaaaaccgctcatacaggaggaaagtgacaccattgtttcttcttccaagagtgctttacattcatcagtgcctaaaagtaccaatgacagagatgccacacctctgtcaagagcaatggactttgaaggaaaactgggatgtgactctgaatctaatagcactttggaaaatagttctgataccgtgtctattcaggatagcagtgaagaagatatgattgttcagaatagcaatgaaagcatttctgaacagttcagaactcgagaacaagatgttgaagtcttggagccgttaaagtgtgagttggtttctggtgagtccactggaaactgtgaggacaggctgccggtcaaggggactgaagcaaatggtaaaaaaccaagtcagcagaagaaattagaggagagaccagttaataaatgtagtgatcaaataaagctaaaaaataccactgacaaaaagaataatgaaaatcgagagtctgaaaagaaaggacagagaacaagtacatttcaaataaatggaaaagataataaacccaaaatatatttgaaaggtgaatgcttgaaagaaatttctgagagtagagtagtaagtggtaatgttgaaccaaaggttaataatataaataaaataatccctgagaatgatattaaatcattgactgttaaagaatctgctataaggccattcattaatggtgatgtcatcatggaagattttaatgaaagaaacagctccgaaacaaaatcgcatttgctgagttcttcagatgctgaaggtaactaccgagatagccttgagaccctgccatcaaccaaagagtctgacagtacacagacgaccacaccctcagcatcttgtccagaaagcaattcagttaatcaggtagaagatatggaaatagaaacctcagaagttaagaaagttacttcatcacctattacttctgaagaggaatctaatctcagtaatgactttattgatgaaaatggtctgcccatcaacaaaaatgaaaatgtcaatggagaatctaaaagaaaaaccgtcatcacagaagtcaccacgatgacctccacagtggccacagaatcaaaaactgtgatcaaggtagaaaaaggcgataagcaaactgtggtttcttccacagaaaattgtgcaaaatccactgtcacaaccaccactacaacagtgaccaagctttccacaccctccacaggcggcagtgtggacatcatctctgtaaaggagcagagcaaaaccgtggtcaccacgacagtgacagactccctgaccaccacgggaggcacactggttacatctatgactgtgagcaaagagtattccacacgagacaaagtgaaactgatgaaattttcaagaccaaagaagactcgttcaggtacagctctgccatcctatagaaaatttgttaccaagagcaccaagaagagcatttttgttttgcctaatgatgacttaaaaaagttggcccgaaaaggaggaatccgagaggtcccttattttaattacaatgcaaaacctgctttggatatatggccatatccttctcctagaccgacctttggcatcacttggaggtatagacttcagacagtaaagtccttagctggagtgagcctgatgttacggttactgtgggcaagtttgagatgggatgatatggcggccaaggttcctccaggaggagggagtacacggacagaaacatccgaaactgaaatcacaacaacagaaataattaagaggagagatgttggtccttatggcattcgatttgaatattgtatcaggaaaatcatttgtcccattggagttccagaaacaccaaaagaaacgcctacacctcagaggaaaggccttcgatcaagtgcactgcggccaaagagaccagaaacgcccaagcaaactggccctgttattattgaaacctgggtagcagaagaagaactggaattgtgggagatcagggcatttgctgagagagtggagaaagaaaaggcacaagcagttgagcaacaggctaagaaacgactggagcagcagaagccgacagtgattgcaacttccactacttccccaacaagcagtacaaccagcaccatctctccagcacagaaagttatggtggcccccataagtggctcagttacaactggaaccaaaatggtactaactactaaagttggatctccagctacagtaacattccaacaaaacaagaactttcatcaaacctttgctacatgggttaagcaaggccagtcaaattcaggcgttgttcaagtacagcagaaagtcctgggtatcattccatcaagtacaggtaccagtcagcaaacctttacttcattccagcccaggacagcaacagtcacaattaggcccaatacctcaggctctggaggaaccacaagcaattcacaagtaatcacagggcctcagattcgccctggtatgaccgtgattagaacaccactccaacagtcaacactaggaaaggcaattattcgaacacctgtgatggtacagccaggtgctcctcagcaagtgatgactcaaatcatcagggggcagcctgtctccactgcagtctccgcccctaacacggtttcctcaacacctgggcagaaaagcttaacttcagcaacgtccacttcaaatatacagtcttcagcctcacaaccccctcgcccccaacaaggacaagtgaagctcaccatggctcaacttactcagttaacacagggccacggtggcaatcaaggtttgacagtagtaattcaaggacaaggtcaaactactggacagttgcagttgatacctcaaggggtgactgtactcccaggcccaggccagcagctaatgcaagctgcaatgccaaatggtactgttcagcgattcctctttaccccattggcaacaacagccaccacagccagcaccaccaccaccactgtttccacgacagcagcaggtacaggtgaacaaaggcagagtaaactgtcaccccagatgcaggtacatcaagacaaaaccctgccaccagctcagtcatcaagtgtgggtccagcaaaagcccagccacagactgctcagccttcagctcggccccagccccaaacccagccccagtccccagctcagcctgaagttcagactcagcctgaagttcagacccaaacaactgtttcatcccatgtcccttctgaagcacaacccacccacgcacagtcatccaagccccaagttgcagcacagtctcagcctcaaagtaatgtccaaggacagtctcctgttcgtgtccaaagtccatcacagactcgaatacgtccatcaactccatcccaactgtctcctggacaacaatcccaggttcagactacaacctcacaaccgattccaattcaaccacatacatctcttcagataccttcccaaggccagccacagtcacaaccccaggtacagtcttcaactcaaactctttcatcaggacaaactttaaatcaagttagtgtttcatccccatcccgtcctcagctacaaatacagcagccacagccccaagtcattgctgtgcctcagctgcaacaacaagtccaggttctctctcagatccagtcacaggttgtggctcagatacaggctcagcaaagtggtgtgccccagcaaatcaaactccagttacctatccaaattcagcaaagcagtgctgtgcagactcaccagattcagaatgtggttacagtgcaggcagccagtgtgcaagagcagttgcaaagggttcagcaactcagggatcagcagcaaaagaagaaacagcaacagatagaaattaagcgtgaacacaccctccaagcttctaatcaaagtgaaatcattcagaaacaggtggtgatgaagcataatgctgtaatagaacatttaaaacagaaaaagagcatgactccagctgaaagagaagagaatcaaagaatgattgtctgtaaccaggtgatgaagtatattttggataagatagataaagaagaaaaacaggcagcaaaaaaacggaagcgtgaagagagtgtggagcagaaacgtagcaagcagaatgccactaagctgtcagctctgctcttcaagcacaaagagcagctcagagccgagatcctgaagaagagagcactcctggacaaggatctgcaaattgaagtgcaggaagagctgaagagagacctgaaaattaagaaagaaaaagacctgatgcagttggctcaggccacagcagtagctgcaccctgccccccagtgacaccagttcttccagcccctccagcccctccaccttcacctccccctccacctggtgtgcaacacacaggccttctgtccacgcccaccttacctgttgcttcccagaagaggaagcgggaagaggaaaaagactccagctcaaagtccaagaaaaagaaaatgatctctactacctcaaaggaaactaagaaggacacaaagctttactgtatctgtaaaacgccttatgatgaatctaaattttatattggctgtgatcggtgtcagaattggtaccatgggcgctgcgttggcatcttgcaaagtgaggcagagctcattgatgagtatgtctgtccacagtgccagtcaacagaggatgccatgacagtgctcacgccactaacagagaaggattatgaggggttgaagagggtgctccgttccttacaggcccataagatggcctggcctttccttgaaccagtagaccctaatgatgcaccagattattatggtgttattaaggaacctatggaccttgccaccatggaagaaagagtacaaagacgatattatgaaaagctgacggaatttgtggcagatatgaccaaaatttttgataactgtcgttactacaatccaagtgactccccattttaccagtgtgcagaagttctcgaatcattctttgtacagaaattgaaaggcttcaaagctagcaggtctcataacaacaaactgcagtctacagcttcttaaagttcagcgtgttaacctaacataaaacacagcaagaatctggttgtctgaactattttaaattaaggagccagatgtttttagtcaggctatcctgacaagacttgacctaaacttcgtttttattggtcataacagtccaattatattcttggccaatttagtccaacggacaagaaaaaagccaagtcaacgacaccattatctgtcaagatcagatggtttactattgtggcgaagcgagaaaactttgtttattgaaaaaaaaagaaaaagaaagcaagaaaaaaagatactatggggtcaagtgtaactccatggaaatgccacgtctgctcttcagtgaagaagctggtttagagtctcacagaaaacttttgactgtatttatttattgttgcaaaaaagacgcttttttattgctgccctcatttgtcagctaagtattttttcttataaaatccagccccggttacatataatcatctgtatcttatcatgattcctgtaggtaaaagtacaagacgacctctagatgtcttttctttctatgaaaggagctgctatgtacacatgtgcacacacacacaactgggaatcaacaatgagtttattgttcatggtagattaaaattaagcttgcataaaggttgggctaagtggtccttgggctacagactctgttgccttgaatataacagtacaatttgtcaattactctgcaccaggctaaagtgagtaaaatctatttgaaggtatcttgtttgtaaacatttgtcagattctaatttttttcttttgtattaaaattcaactatggatgtatatgaaacaaaataaatggagataatttttctcccac

SEQ ID NO: 310291 - DNA, 1022 bp, Homo sapiens
tattttgaccatttatcttctacacctggctgacctgcatggtccttgtagtgtaacttctacttggtgtttgcgctttgctttgttttcaaatttaaattgtgagatacatttttaaacctatctaagaaatagccctgatattgaaatggcttctgtggaataggtttgacagatgtaagtctttgattctttggctttggtttttgtgcttgttacagttttacacacattcattcagaggaagacattaccatcaatgtgttgtttcttttttcaaattccagtatgtttttaaagacccatatttcactaagcagtgtacttgttgaaactgatgtgagtgactttatgtttccacatgtgatagagcatcagatactggagtttgccaggggtagaatggttggattcagaaatgtttagctgactcattgcaggaagttacactgtaaaaaagtgaatcaaggcagggaagacagatttaagtaccatgcagctcaaaatgacaattacattgtcattttcattgtgaatacttttaggttctatattggctgtgatctttgtactaactggtatcatggagaatgtgttggcatcacagaaaaggaggctaagaaaatggatgtgtacatctgtaatgattgtaaacgggcacaagagggcagcagtgaggaattgtactgtatctgcagaacaccttatgatgagtcacagtgagttctgataagagcatcacatttaataatttaggaagccaaattgctctgactggttacttatttactttaaaataaaaagcagattttttctacatttgttatacacttacattacaaattccttttcattttttttttctctttttccctttttacctacccttcaaaatttatcttgcttcatagtgaatgtttgagacacattggggaaaatgtggtttaatggtagatttgattcttcaatatgtaacatagaaattaatgagattaaaatagcctgacttgtttggactttat

SEQ ID NO: 310292 - DNA, 3023 bp, Homo sapiens
ggggaaatttaaatcgcgccggccggctgcacgagccacacggtctttgagctgagtcgaggtggaccctttgaacgcagtcgccctacagccgctgattccccccgcatcgcctcccgtggaagcccaggcccgcttcgcagctttctccctttgtctcataaccatgtccaccaacgagaatgctaatacaccagctgcccgtcttcacagattcaagaacaagggaaaagacagtacagaaatgaggcgtcgcagaatagaggtcaatgtggagctgaggaaagctaagaaggatgaccagatgctgaagaggagaaatgtaagctcatttcctgatgatgctacttctccgctgcaggaaaaccgcaacaaccagggcactgtaaattggtctgttgatgacattgtcaaaggcataaatagcagcaatgtggaaaatcagctccaagctactcaagctgccaggaaactactttccagagaaaaacagccccccatagacaacataatccgggctggtttgattccgaaatttgtgtccttcttgggcagaactgattgtagtcccattcagtttgaatctgcttgggcactcactaacattgcttctgggacatcagaacaaaccaaggctgtggtagatggaggtgccatcccagcattcatttctctgttggcatctccccatgctcacatcagtgaacaagctgtctgggctctaggaaacattgcaggtgatggctcagtgttccgagacttggttattaagtacggtgcagttgacccactgttggctctccttgcagttcctgatatgtcatctttagcatgtggctacttacgtaatcttacctggacactttctaatctttgccgcaacaagaatcctgcacccccgatagatgctgttgagcagattcttcctaccttagttcggctcctgcatcatgatgatccagaagtgttagcagatacctgctgggctatttcctaccttactgatggtccaaatgaacgaattggcatggtggtgaaaacaggagttgtgccccaacttgtgaagcttctaggagcttctgaattgccaattgtgactcctgccctaagagccatagggaatattgtcactggtacagatgaacagactcaggttgtgattgatgcaggagcactcgccgtctttcccagcctgctcaccaaccccaaaactaacattcagaaggaagctacgtggacaatgtcaaacatcacagccggccgccaggaccagatacagcaagttgtgaatcatggattagtcccattccttgtcagtgttctctctaaggcagattttaagacacaaaaggaagctgtgtgggccgtgaccaactataccagtggtggaacagttgaacagattgtgtaccttgttcactgtggcataatagaaccgttgatgaacctcttaactgcaaaagataccaagattattctggttatcctggatgccatttcaaatatctttcaggctgctgagaaactaggtgaaactgagaaacttagtataatgattgaagaatgtggaggcttagacaaaattgaagctctacaaaaccatgaaaatgagtctgtgtataaggcttcgttaagcttaattgagaagtatttctctgtagaggaagaggaagatcaaaacgttgtaccagaaactacctctgaaggctacactttccaagttcaggatggggctcctgggacctttaacttttagatcatgtagctgagacataaatttgttgtgtactacgtttggtattttgtcttattgtttctctactaagaactctttcttaaatgtggtttgttactgtagcactttttacactgaaactatacttgaacagttccaactgtacatacatactgtatgaagcttgtcctctgactaggtttctaatttctatgtggaatttcctatcttgcagcatcctgtaaataaacattcaagtccacccttttcttgacttcaccatgcctatgtgttgctttctaatttggggcctttaatgttgctagtgaaaggtaacctgtccaaactgatgggattaaccagaggtagtcctggctgcagtttttgcagaagaatgaataacattttctggaaaccctcagccagtgtctccttaagtctccttggccagggagatgggctaaataccgtaaatttaatcataaatctctgctggagctacaaatggaattctttcctcccaaacttcaaggctgaatggggttccaaggtaaatcacggctgcacatgggcctcacctgggaatgtacccagttctgtttcgttgatgaggggcatgagggtccaccttgtgtcttttttaaaaatgtaattcccaagggctcttgtacaatatagattgatcaccactattctttttgagatggagtctcgctctgtcacccaggcgaaacccgtgtctctagtaaaaatacaaacaattagctgggattacaggcatggtggtgggagcctgtaatcccagctactcaggaggctgagtgcaggagaatcgcttgaactccggaggttggaggttgcagtgaggctgagaatggcgccactgcagatcccagccttggtgacgagaagcgaaaacacttggtctaacaaaaaaaatccccctgtggcataagtatatcattaccctaataacttctgacgagtcaggataagggaacaaggaaggaaagcaaagggagcaggcaaaccgggtaattacgttcccgaaatagccaattgagagcaaagtcacattagatacgaaaactggctgacagccctaaacatgtagccatgcgtcgcaacagtaacatctgcacgaaacaagtcaccagtaaaacgaaattgatccaggggctgacagagaagacacacaacgaagacacaaagggacggagcggccggcaaacaaatcaccatcaaagggggccaccaggtcagtggcgaccacccagcaacatcagag

SEQ ID NO: 310293 - DNA, 2202 bp, Homo sapiens
ggggaaatttaaatcgcgccggccggctgcacgagccacacggtctttgagctgagtcgaggtggaccctttgaacgcagtcgccctacagccgctgattccccccgcatcgcctcccgtggaagcccaggcccgcttcgcagctttctccctttgtctcataaccatgtccaccaacgagaatgctaatacaccagctgcccgtcttcacagattcaagaacaagggaaaagacagtacagaaatgaggcgtcgcagaatagaggtcaatgtggagctgaggaaagctaagaaggatgaccagatgctgaagaggagaaatgtaagctcatttcctgatgatgctacttctccgctgcaggaaaaccgcaacaaccagggcactgtaaattggtctgttgatgacattgtcaaaggcataaatagcagcaatgtggaaaatcagctccaagctactcaagctgccaggaaactactttccagagaaaaacagccccccatagacaacataatccgggctggtttgattccgaaatttgtgtccttcttgggcagaactgattgtagtcccattcagtttgaatctgcttgggcactcactaacattgcttctgggacatcagaacaaaccaaggctgtggtagatggaggtgccatcccagcattcatttctctgttggcatctccccatgctcacatcagtgaacaagctgtctgggctctaggaaacattgcaggtgatggctcagtgttccgagacttggttattaagtacggtgcagttgacccactgttggctctccttgcagttcctgatatgtcatctttagcatgtggctacttacgtaatcttacctggacactttctaatctttgccgcaacaagaatcctgcacccccgatagatgctgttgagcagattcttcctaccttagttcggctcctgcatcatgatgatccagaagtgttagcagatacctgctgggctatttcctaccttactgatggtccaaatgaacgaattggcatggtggtgaaaacaggagttgtgccccaacttgtgaagcttctaggagcttctgaattgccaattgtgactcctgccctaagagccatagggaatattgtcactggtacagatgaacagactcaggttgtgattgatgcaggagcactcgccgtctttcccagcctgctcaccaaccccaaaactaacattcagaaggaagctacgtggacaatgtcaaacatcacagccggccgccaggaccagatacagcaagttgtgaatcatggattagtcccattccttgtcagtgttctctctaaggcagattttaagacacaaaaggaagctgtgtgggccgtgaccaactataccagtggtggaacagttgaacagattgtgtaccttgttcactgtggcataatagaaccgttgatgaacctcttaactgcaaaagataccaagattattctggttatcctggatgccatttcaaatatctttcaggctgctgagaaactaggtgaaactgagaaacttagtataatgattgaagaatgtggaggcttagacaaaattgaagctctacaaaaccatgaaaatgagtctgtgtataaggcttcgttaagcttaattgagaagtatttctctgtagaggaagaggaagatcaaaacgttgtaccagaaactacctctgaaggctacactttccaagttcaggatggggctcctgggacctttaacttttagatcatgtagctgagacataaatttgttgtgtactacgtttggtattttgtcttattgtttctctactaagaactctttcttaaatgtggtttgttactgtagcactttttacactgaaactatacttgaacagttccaactgtacatacatactgtatgaagcttgtcctctgactaggtttctaatttctatgtggaatttcctatcttgcagcatcctgtaaataaacattcaagtccacccttttcttgacttcaccatgaaaaaaaaaaacaagggcaaccaaaaaaaaaaattttgggggcgcgcgcgccccaagaaatttacacactttgggggcggcgccccgagaaaaaggctgttccacaaacacgcggcgagagggggttcccccaaacacgggggggggtgaaccccaggggggggttggctcagggcgcaccag

SEQ ID NO: 310294 - DNA, 3089 bp, Homo sapiens
ggggaaatttaaatcgcgccggccggctgcacgagccacacggtctttgagctgagtcgaggtggaccctttgaacgcagtcgccctacagccgctgattccccccgcatcgcctcccgtggaagcccaggcccgcttcgcagctttctccctttgtctcataaccatgtccaccaacgagaatgctaatacaccagctgcccgtcttcacagattcaagaacaagggaaaagacagtacagaaatgaggcgtcgcagaatagaggtcaatgtggagctgaggaaagctaagaaggatgaccagatgctgaagaggagaaatgtaagctcatttcctgatgatgctacttctccgctgcaggaaaaccgcaacaaccagggcactgtaaattggtctgttgatgacattgtcaaaggcataaatagcagcaatgtggaaaatcagctccaagctactcaagctgccaggaaactactttccagagaaaaacagccccccatagacaacataatccgggctggtttgattccgaaatttgtgtccttcttgggcagaactgattgtagtcccattcagtttgaatctgcttgggcactcactaacattgcttctgggacatcagaacaaaccaaggctgtggtagatggaggtgccatcccagcattcatttctctgttggcatctccccatgctcacatcagtgaacaagctgtctgggctctaggaaacattgcaggtgatggctcagtgttccgagacttggttattaagtacggtgcagttgacccactgttggctctccttgcagttcctgatatgtcatctttagcatgtggctacttacgtaatcttacctggacactttctaatctttgccgcaacaagaatcctgcacccccgatagatgctgttgagcagattcttcctaccttagttcggctcctgcatcatgatgatccagaagtgttagcagatacctgctgggctatttcctaccttactgatggtccaaatgaacgaattggcatggtggtgaaaacaggagttgtgccccaacttgtgaagcttctaggagcttctgaattgccaattgtgactcctgccctaagagccatagggaatattgtcactggtacagatgaacagactcaggttgtgattgatgcaggagcactcgccgtctttcccagcctgctcaccaaccccaaaactaacattcagaaggaagctacgtggacaatgtcaaacatcacagccggccgccaggaccagatacagcaagttgtgaatcatggattagtcccattccttgtcagtgttctctctaaggcagattttaagacacaaaaggaagctgtgtgggccgtgaccaactataccagtggtggaacagttgaacagattgtgtaccttgttcactgttccaccaactataccagtggtggaacaggtggaacagttgaacagattgtgtaccttgttcactgtggcataatagaaccgttgatgaacctcttaactgcaaaagataccaagattattctggttatcctggatgccatttcaaatatctttcaggctgctgagaaactaggtgaaactgagaaacttagtataatgattgaagaatgtggaggcttagacaaaattgaagctctacaaaaccatgaaaatgagtctgtgtataaggcttcgttaagcttaattgagaagtatttctctgtagaggaagaggaagatcaaaacgttgtaccagaaactacctctgaaggctacactttccaagttcaggatggggctcctgggacctttaacttttagatcatgtagctgagacataaatttgttgtgtactacgtttggtattttgtcttattgtttctctactaagaactctttcttaaatgtggtttgttactgtagcactttttacactgaaactatacttgaacagttccaactgtacatacatactgtatgaagcttgtcctctgactaggtttctaatttctatgtggaatttcctatcttgcagcatcctgtaaataaacattcaagtccacccttttcttgacttcaccatgcctatgtgttgctttctaatttggggcctttaatgttgctagtgaaaggtaacctgtccaaactgatgggattaaccagaggtagtcctggctgcagtttttgcagaagaatgaataacattttctggaaaccctcagccagtgtctccttaagtctccttggccagggagatgggctaaataccgtaaatttaatcataaatctctgctggagctacaaatggaattctttcctcccaaacttcaaggctgaatggggttccaaggtaaatcacggctgcacatgggcctcacctgggaatgtacccagttctgtttcgttgatgaggggcatgagggtccaccttgtgtcttttttaaaaatgtaattcccaagggctcttgtacaatatagattgatcaccactattctttttgagatggagtctcgctctgtcacccaggcgaaacccgtgtctctagtaaaaatacaaacaattagctgggattacaggcatggtggtgggagcctgtaatcccagctactcaggaggctgagtgcaggagaatcgcttgaactccggaggttggaggttgcagtgaggctgagaatggcgccactgcagatcccagccttggtgacgagaagcgaaaacacttggtctaacaaaaaaaatccccctgtggcataagtatatcattaccctaataacttctgacgagtcaggataagggaacaaggaaggaaagcaaagggagcaggcaaaccgggtaattacgttcccgaaatagccaattgagagcaaagtcacattagatacgaaaactggctgacagccctaaacatgtagccatgcgtcgcaacagtaacatctgcacgaaacaagtcaccagtaaaacgaaattgatccaggggctgacagagaagacacacaacgaagacacaaagggacggagcggccggcaaacaaatcaccatcaaagggggccaccaggtcagtggcgaccacccagcaacatcagag

SEQ ID NO: 310295 - DNA, 3000 bp, Homo sapiens
ggggaaatttaaatcgcgccggccggctgcacgagccacacggtctttgagctgagtcgaggtggaccctttgaacgcagtcgccctacagccgctgattccccccgcatcgcctcccgtggaagcccaggcccgcttcgcagctttctccctttgtctcataaccatgtccaccaacgagaatgctaatacaccagctgcccgtcttcacagattcaagaacaagggaaaagacagtacagaaatgaggcgtcgcagaatagaggtcaatgtggagctgaggaaagctaagaaggatgaccagatgctgaagaggagaaatgtaagctcatttcctgatgatgctacttctccgctgcaggaaaaccgcaacaaccagggcactgtaaattggtctgttgatgacattgtcaaaggcataaatagcagcaatgtggaaaatcagctccaagctactcaagctgccaggaaactactttccagagaaaaacagccccccatagacaacataatccgggctggtttgattccgaaatttgtgtccttcttgggcagaactgattgtagtcccattcagtttgaatctgcttgggcactcactaacattgcttctgggacatcagaacaaaccaaggctgtggtagatggaggtgccatcccagcattcatttctctgttggcatctccccatgctcacatcagtgaacaagctgtctgggctctaggaaacattgcaggtgatggctcagtgttccgagacttggttattaagtacggtgcagttgacccactgttggctctccttgcagttcctgatatgtcatctttagcatgtggctacttacgtaatcttacctggacactttctaatctttgccgcaacaagaatcctgcacccccgatagatgctgttgagcagattcttcctaccttagttcggctcctgcatcatgatgatccagaagtgttagcagatacctgctgggctatttcctaccttactgatggtccaaatgaacgaattggcatggtggtgaaaacaggagttgtgccccaacttgtgaagcttctaggagcttctgaattgccaattgtgactcctgccctaagagccatagggaatattgtcactggtacagatgaacagactcaggttgtgattgatgcaggagcactcgccgtctttcccagcctgctcaccaaccccaaaactaacattcagaaggaagctacgtggacaatgtcaaacatcacagccggccgccaggaccagatacagcaagttgtgaatcatggattagtcccattccttgtcagcgatctctctaagattttgagacacaaaaggaagctgtatgggccgtggaacagttgaacagattgtgtaccttgttcactgtggcataatagaaccgttgatgaacctcttaactgcaaaagataccaagattattctggttatcctggatgccatttcaaatatctttcaggctgctgagaaactaggtgaaactgagaaacttagtataatgattgaagaatgtggaggcttagacaaaattgaagctctacaaaaccatgaaaatgagtctgtgtataaggcttcgttaagcttaattgagaagtatttctctgtagaggaagaggaagatcaaaacgttgtaccagaaactacctctgaaggctacactttccaagttcaggatggggctcctgggacctttaacttttagatcatgtagctgagacataaatttgttgtgtactacgtttggtattttgtcttattgtttctctactaagaactctttcttaaatgtggtttgttactgtagcactttttacactgaaactatacttgaacagttccaactgtacatacatactgtatgaagcttgtcctctgactaggtttctaatttctatgtggaatttcctatcttgcagcatcctgtaaataaacattcaagtccacccttttcttgacttcaccatgcctatgtgttgctttctaatttggggcctttaatgttgctagtgaaaggtaacctgtccaaactgatgggattaaccagaggtagtcctggctgcagtttttgcagaagaatgaataacattttctggaaaccctcagccagtgtctccttaagtctccttggccagggagatgggctaaataccgtaaatttaatcataaatctctgctggagctacaaatggaattctttcctcccaaacttcaaggctgaatggggttccaaggtaaatcacggctgcacatgggcctcacctgggaatgtacccagttctgtttcgttgatgaggggcatgagggtccaccttgtgtcttttttaaaaatgtaattcccaagggctcttgtacaatatagattgatcaccactattctttttgagatggagtctcgctctgtcacccaggcgaaacccgtgtctctagtaaaaatacaaacaattagctgggattacaggcatggtggtgggagcctgtaatcccagctactcaggaggctgagtgcaggagaatcgcttgaactccggaggttggaggttgcagtgaggctgagaatggcgccactgcagatcccagccttggtgacgagaagcgaaaacacttggtctaacaaaaaaaatccccctgtggcataagtatatcattaccctaataacttctgacgagtcaggataagggaacaaggaaggaaagcaaagggagcaggcaaaccgggtaattacgttcccgaaatagccaattgagagcaaagtcacattagatacgaaaactggctgacagccctaaacatgtagccatgcgtcgcaacagtaacatctgcacgaaacaagtcaccagtaaaacgaaattgatccaggggctgacagagaagacacacaacgaagacacaaagggacggagcggccggcaaacaaatcaccatcaaagggggccaccaggtcagtggcgaccacccagcaacatcagag

SEQ ID NO: 310296 - DNA, 4821 bp, Homo sapiens
ggggaaatttaaatcgcgccggccggctgcacgagccacacggtctttgagctgagtcgaggtggaccctttgaacgcagtcgccctacagccgctgattccccccgcatcgcctcccgtggaagcccaggcccgcttcgcagctttctccctttgtctcataaccatgtccaccaacgagaatgctaatacaccagctgcccgtcttcacagattcaagaacaagggaaaagacagtacagaaatgaggcgtcgcagaatagaggtcaatgtggagctgaggaaagctaagaaggatgaccagatgctgaagaggagaaatgtaagctcatttcctgatgatgctacttctccgctgcaggaaaaccgcaacaaccagggcactgtaaattggtctgttgatgacattgtcaaaggcataaatagcagcaatgtggaaaatcagctccaagctactcaagctgccaggaaactactttccagagaaaaacagccccccatagacaacataatccgggctggtttgattccgaaatttgtgtccttcttgggcagaactgattgtagtcccattcagtttgaatctgcttgggcactcactaacattgcttctgggacatcagaacaaaccaaggctgtggtagatggaggtgccatcccagcattcatttctctgttggcatctccccatgctcacatcagtgaacaagctgtctgggctctaggaaacattgcaggtgatggctcagtgttccgagacttggttattaagtacggtgcagttgacccactgttggctctccttgcagttcctgatatgtcatctttagcatgtggctacttacgtaatcttacctggacactttctaatctttgccgcaacaagaatcctgcacccccgatagatgctgttgagcagattcttcctaccttagttcggctcctgcatcatgatgatccagaagtgttagcagatacctgctgggctatttcctaccttactgatggtccaaatgaacgaattggcatggtggtgaaaacaggagttgtgccccaacttgtgaagcttctaggagcttctgaattgccaattgtgactcctgccctaagagccatagggaatattgtcactggtacagatgaacagactcaggttgtgattgatgcaggagcactcgccgtctttcccagcctgctcaccaaccccaaaactaacattcagaaggaagctacgtggacaatgtcaaacatcacagccggccgccaggaccagatacagcaagttgtgaatcatggattagtcccattccttgtcagtgttctctctaaggcagattttaagacacaaaaggaagctgtgtgggccgtgaccaactataccagtggtggaacagttgaacagattgtgtaccttgttcactgtggcataatagaaccgttgatgaacctcttaactgcaaaagataccaagattattctggttatcctggatgccatttcaaatatctttcaggctgctgagaaactaggtgaaactgagaaacttagtataatgattgaagaatgtggaggcttagacaaaattgaagctctacaaaaccatgaaaatgagtctgtatataaggcttcattaagcttaactgagaagtatttctctgtagaggtgagtaatggatggtaatattaataacaacttggaaaaatgtaaagccaaggccatgagcccttttttccctcatacttttaaaaatgagcctcatatctttgttaaatatagtaaaatatcagtgtgcataggacgtaatgtacttattgcccctctgatgtttggcttgatggtaataaaatctatttatttatttatttagctttggtttctacaaattattttattagaatgtcagactcaaaaggaactaccagtaacatgcctgaacatgctatatatgatttatgcttgacccgtgacacctgctgtcactggatccagagtgtgaacaagggaaaaggacagtggatgtgggcagggacagcaccagccctggctggccagacctcaggcccacagacgtggtccccataaccaccaggatccctacaatatacacattcctaattcaggctcaactctcctttacccaagagtaaatgcctcaggactcaatctgaatcactgtccgtctcggcttctttcacatccatgctgaatttgtactcctggtcacatcccatgtaagcatcactcatgaagtatagagtgtagttgtgggcaccagtggctggagccacaaagtccaacttcaccttggccttctgctgcaggatcagcctcttgatggagatgaggctattggacttggtgtctccaatcaccacccaccagccctcttcacgtttctgcgggaagagaggcgcaatgacagggcctgtgacttcctcctctcgctccagctgcaccagcacatccgtactggcccgccactgcggatgctgtccttatccaccacctcctaagatagttcgatattagggtagcagttacaaaagcgagccacatctgtaatctggctgtcagtcagctgaagaattgtgttccgttcttcatcctccatctccatgatgtcgaaaacactcttcactcccttgtctgtgcaacgtttgatatgctcagagatgaagtgtggcagctgcttcaggtatgagtccttggaccacatggcttgggtgaccatctgggccaattccatagctgccagagcagagctgagccacccattgctggagaggacatccacgcaggcctggacgagccggactgccttactaaggatttcctccgtatctgactgcaactcagcactcagctgcatgcgggacaggtgagcctgcaggagcaggttggtcttgatgtgcggatcattgaacttagggttattcagcttgtcagggaccttctgagccaactgcctcaggaagttttcttcatggtgctggatggggatattctcgtaccctgctgcattggagatgatctcaataagccctcgcaccttggtcttggcgttgtgagattttaaaagtcaccagattagtttcaaatgaacagccttgagaatcttagaatatcttgagggtaagttaacgggtgtcattgtaggaggtgatagagaagtaggccaaacccaccaccatgctctgggcctaatacagtcttttcctattgaaaagtgacggttggggaagaaaaaaaatctcggcctgtttctgttactgtagtagctagcacttatgaattggcaaagtttcagagaccctccctcccctatgtcagatactacaataccatacaggattaaaggtgtaatatgcagatcaagacctagagattaaatacagacttcaggtaggctgctgcttggaatacttattatttttatacttattttttaatatatttccaggaagaggaagatcaaaacgttgtaccagaaactacctctgaaggctacactttccaagttcaggatggggctcctgggacctttaacttttagatcatgtagctgagacataaatttgttgtgtactacgtttggtattttgtcttattgtttctctactaagaactctttcttaaatgtggtttgttactgtagcactttttacactgaaactatacttgaacagttccaactgtacatacatactgtatgaagcttgtcctctgactaggtttctaatttctatgtggaatttcctatcttgcagcatcctgtaaataaacattcaagtccacccttttcttgacttcaccatgcctatgtgttgctttctaatttggggcctttaatgttgctagtgaaaggtaacctgtccaaactgatgggattaaccagaggtagtcctggctgcagtttttgcagaagaatgaataacattttctggaaaccctcagccagtgtctccttaagtctccttggccagggagatgggctaaataccgtaaatttaatcataaatctctgctggagctacaaatggaattctttcctcccaaacttcaaggctgaatggggttccaaggtaaatcacggctgcacatgggcctcacctgggaatgtacccagttctgtttcgttgatgaggggcatgagggtccaccttgtgtcttttttaaaaatgtaattcccaagggctcttgtacaatatagattgatcaccactattctttttgagatggagtctcgctctgtcacccaggcgaaacccgtgtctctagtaaaaatacaaacaattagctgggattacaggcatggtggtgggagcctgtaatcccagctactcaggaggctgagtgcaggagaatcgcttgaactccggaggttggaggttgcagtgaggctgagaatggcgccactgcagatcccagccttggtgacgagaagcgaaaacacttggtctaacaaaaaaaatccccctgtggcataagtatatcattaccctaataacttctgacgagtcaggataagggaacaaggaaggaaagcaaagggagcaggcaaaccgggtaattacgttcccgaaatagccaattgagagcaaagtcacattagatacgaaaactggctgacagccctaaacatgtagccatgcgtcgcaacagtaacatctgcacgaaacaagtcaccagtaaaacgaaattgatccaggggctgacagagaagacacacaacgaagacacaaagggacggagcggccggcaaacaaatcaccatcaaagggggccaccaggtcagtggcgaccacccagcaacatcagag

SEQ ID NO: 310297 - DNA, 4428 bp, Homo sapiens
ggggaaatttaaatcgcgccggccggctgcacgagccacacggtctttgagctgagtcgaggtggaccctttgaacgcagtcgccctacagccgctgattccccccgcatcgcctcccgtggaagcccaggcccgcttcgcagctttctccctttgtctcataaccatgtccaccaacgagaatgctaatacaccagctgcccgtcttcacagattcaagaacaagggaaaagacagtacagaaatgaggcgtcgcagaatagaggtcaatgtggagctgaggaaagctaagaaggatgaccagatgctgaagaggagaaatgtaagctcatttcctgatgatgctacttctccgctgcaggaaaaccgcaacaaccagggcactgtaaattggtctgttgatgacattgtcaaaggcataaatagcagcaatgtggaaaatcagctccaagctactcaagctgccaggaaactactttccagagaaaaacagccccccatagacaacataatccgggctggtttgattccgaaatttgtgtccttcttgggcagaactgattgtagtcccattcagtttgaatctgcttgggcactcactaacattgcttctgggacatcagaacaaaccaaggctgtggtagatggaggtgccatcccagcattcatttctctgttggcatctccccatgctcacatcagtgaacaagctgtctgggctctaggaaacattgcaggtgatggctcagtgttccgagacttggttattaagtacggtgcagttgacccactgttggctctccttgcagttcctgatatgtcatctttagcatgtggctacttacgtaatcttacctggacactttctaatctttgccgcaacaagaatcctgcacccccgatagatgctgttgagcagattcttcctaccttagttcggctcctgcatcatgatgatccagaagtgttagcagatacctgctgggctatttcctaccttactgatggtccaaatgaacgaattggcatggtggtgaaaacaggagttgtgccccaacttgtgaagcttctaggagcttctgaattgccaattgtgactcctgccctaagagccatagggaatattgtcactggtacagatgaacagactcaggttgtgattgatgcaggagcactcgccgtctttcccagcctgctcaccaaccccaaaactaacattcagaaggaagctacgtggacaatgtcaaacatcacagccggccgccaggaccagatacagcaagttgtgaatcatggattagtcccattccttgtcagtgttctctctaaggcagattttaagacacaaaaggaagctgtgtgggccgtgaccaactataccagtggtggaacagttgaacagattgtgtaccttgttcactgtggcataatagaaccgttgatgaacctcttaactgcaaaagataccaagattattctggttatcctggatgccatttcaaatatctttcaggctgctgagaaactaggtgaaactgagaaacttagtataatgattgaagaatgtggaggcttagacaaaattgaagctctacaaaaccatgaaaatgagtctgtatataaggcttcattaagcttaactgagaagtatttctctgtagaggtgagtaatggatggtaatattaataacaacttggaaaaatgtaaagccaaggccatgagcccttttttccctcatacttttaaaaatgagcctcatatctttgttaaatatagtaaaatatcagtgtgcataggacgtaatgtacttattgcccctctgatgtttggcttgatggtaataaaatctatttatttatttatttagctttggtttctacaaattattttattagaatgtcagactcaaaaggaactaccagtaacatgcctgaacatgctatatatgatttatgcttgacccgtgacacctgctgtcactggatccagagtgtgaacaagggaaaaggacagtggatgtgggcagggacagcaccagccctggctggccagacctcaggcccacagacgtggtccccataaccaccaggatccctacaatatacacattcctaattcaggctcaactctcctttacccaagagtaaatgcctcaggactcaatctgaatcactgtccgtctcggcttctttcacatccatgctgaatttgtactcctggtcacatcccatgtaagcatcactcatgaagtatagagtgtagttgtgggcaccagtggctggagccacaaagtccaacttcaccttggccttctgctgcaggatcagcctcttgatggagatgaggctattggacttggtgtctccaatcaccacccaccagccctcttcacgtttctgcgggaagagaggcgcaatgacagggcctgtgacttcctcctctcgctccagctgcaccagcacatccgtactggcccgccactgcggatgctgtccttatccaccacctcctaagatagttcgatattagggtagcagttacaaaagcgagccacatctgtaatctggctgtcagtcagctgaagaattgtgttccgttcttcatcctccatctccatgatgtcgaaaacactcttcactcccttgtctgtgcaacgtttgatatgctcagagatgaagtgtggcagctgcttcaggtatgagtccttggaccacatggcttgggtgaccatctgggccaattccatagctgccagagcagagctgagccacccattgctggagaggacatccacgcaggcctggacgagccggactgccttactaaggatttcctccgtatctgactgcaactcagcactcagctgcatgcgggacaggtgagcctgcaggagcaggttggtcttgatgtgcggatcattgaacttagggttattcagcttgtcagggaccttctgagccaactgcctcaggaagttttcttcatggtgctggatggggatattctcgtaccctgctgcattggagatgatctcaataagccctcgcaccttggtcttggcgttgaggaagaggaagatcaaaacgttgtaccagaaactacctctgaaggctacactttccaagttcaggatggggctcctgggacctttaacttttagatcatgtagctgagacataaatttgttgtgtactacgtttggtattttgtcttattgtttctctactaagaactctttcttaaatgtggtttgttactgtagcactttttacactgaaactatacttgaacagttccaactgtacatacatactgtatgaagcttgtcctctgactaggtttctaatttctatgtggaatttcctatcttgcagcatcctgtaaataaacattcaagtccacccttttcttgacttcaccatgcctatgtgttgctttctaatttggggcctttaatgttgctagtgaaaggtaacctgtccaaactgatgggattaaccagaggtagtcctggctgcagtttttgcagaagaatgaataacattttctggaaaccctcagccagtgtctccttaagtctccttggccagggagatgggctaaataccgtaaatttaatcataaatctctgctggagctacaaatggaattctttcctcccaaacttcaaggctgaatggggttccaaggtaaatcacggctgcacatgggcctcacctgggaatgtacccagttctgtttcgttgatgaggggcatgagggtccaccttgtgtcttttttaaaaatgtaattcccaagggctcttgtacaatatagattgatcaccactattctttttgagatggagtctcgctctgtcacccaggcgaaacccgtgtctctagtaaaaatacaaacaattagctgggattacaggcatggtggtgggagcctgtaatcccagctactcaggaggctgagtgcaggagaatcgcttgaactccggaggttggaggttgcagtgaggctgagaatggcgccactgcagatcccagccttggtgacgagaagcgaaaacacttggtctaacaaaaaaaatccccctgtggcataagtatatcattaccctaataacttctgacgagtcaggataagggaacaaggaaggaaagcaaagggagcaggcaaaccgggtaattacgttcccgaaatagccaattgagagcaaagtcacattagatacgaaaactggctgacagccctaaacatgtagccatgcgtcgcaacagtaacatctgcacgaaacaagtcaccagtaaaacgaaattgatccaggggctgacagagaagacacacaacgaagacacaaagggacggagcggccggcaaacaaatcaccatcaaagggggccaccaggtcagtggcgaccacccagcaacatcagag

SEQ ID NO: 310298 - DNA, 2005 bp, Homo sapiens
ggggaaatttaaatcgcgccggccggctgcacgagccacacggtctttgagctgagtcgaggtggaccctttgaacgcagtcgccctacagccgctgattccccccgcatcgcctcccgtggaagcccaggcccgcttcgcagctttctccctttgtctcataaccatgtccaccaacgagaatgctaatacaccagctgcccgtcttcacagattcaagaacaagggaaaagacagtacagaaatgaggcgtcgcagaatagaggtcaatgtggagctgaggaaagctaagaaggatgaccagatgctgaagaggagaaatgtaagctcatttcctgatgatgctacttctccgctgcaggaaaaccgcaacaaccagggcactgtaaattggtctgttgatgacattgtcaaaggcataaatagcagcaatgtggaaaatcagctccaagctactcaagctgccaggaaactactttccagagaaaaacagccccccatagacaacataatccgggctggtttgattccgaaatttgtgtccttcttgggcagaactgattgtagtcccattcagtttgaatctgcttgggcactcactaacattgcttctgggacatcagaacaaaccaaggctgtggtagatggaggtgccatcccagcattcatttctctgttggcatctccccatgctcacatcagtgaacaagctgtctgggctctaggaaacattgcaggtgatggctcagtgttccgagacttggttattaagtacggtgcagttgacccactgttggctctccttgcagttcctgatatgtcatctttagcatgtggctacttacgtaatcttacctggacactttctaatctttgccgcaacaagaatcctgcacccccgatagatgctgttgagcagattcttcctaccttagttcggctcctgcatcatgatgatccagaagtgttagcagatacctgctgggctatttcctaccttactgatggtccaaatgaacgaattggcatggtggtgaaaacaggagttgtgccccaacttgtgaagcttctaggagcttctgaattgccaattgtgactcctgccctaagagccatagggaatattgtcactggtacagatgaacagactcaggttgtgattgatgcaggagcactcgccgtctttcccagcctgctcaccaaccccaaaactaacattcagaaggaagctacgtggacaatgtcaaacatcacagccggccgccaggaccagatacagcaagttgtgaatcatggattagtcccattccttgtcagtgttctctctaaggcagattttaagacacaaaaggaagctgtgtgggccgtgaccaactataccagtggtggaacagttgaacagattgtgtaccttgttcactgtggcataatagaaccgttgatgaacctcttaactgcaaaagataccaagattattctggttatcctggatgccatttcaaatatctttcaggctgctgagaaactaggtgaaactgagaaacttagtataatgattgaagaatgtggaggcttagacaaaattgaagctctacaaaaccatgaaaatgagtctgtgtataaggcttcgttaagcttaattgagaagtatttctctgtagaggaagaggaagatcaaaacgttgtaccagaaactacctctgaaggctacactttccaagttcaggatggggctcctgggacctttaacttttagatcatgtagctgagacataaatttgttgtgtactacgtttggtattttgtcttattgtttctctactaagaactctttcttaaatgtggtttgttactgtagcactttttacactgaaactatacttgaacagttccaactgtacatacatactgtatgaagcttgtcctctgactaggtttctaatttctatgtggaatttcctatcttgcagcatcctgtgcattacatcccagtctgcacctgtat

SEQ ID NO: 310299 - DNA, 3555 bp, Homo sapiens
ggggaaatttaaatcgcgccggccggctgcacgagccacacggtctttgagctgagtcgaggtggaccctttgaacgcagtcgccctacagccgctgattccccccgcatcgcctcccgtggaagcccaggcccgcttcgcagctttctccctttgtctcataaccatgtccaccaacgagaatgctaatacaccagctgcccgtcttcacagattcaagaacaagggaaaagacagtacagaaatgaggcgtcgcagaatagaggtcaatgtggagctgaggaaagctaagaaggatgaccagatgctgaagaggagaaatgtaagctcatttcctgatgatgctacttctccgctgcaggaaaaccgcaacaaccagggcactgtaaattggtctgttgatgacattgtcaaaggcataaatagcagcaatgtggaaaatcagctccaagctactcaagctgccaggaaactactttccagagaaaaacagccccccatagacaacataatccgggctggtttgattccgaaatttgtgtccttcttgggcagaactgattgtagtcccattcagtttgaatctgcttgggcactcactaacattgcttctgggacatcagaacaaaccaaggctgtggtagatggaggtgccatcccagcattcatttctctgttggcatctccccatgctcacatcagtgaacaagctgtctgggctctaggaaacattgcaggtgatggctcagtgttccgagacttggttattaagtacggtgcagttgacccactgttggctctccttgcagttcctgatatgtcatctttagcatgtggctacttacgtaatcttacctggacactttctaatctttgccgcaacaagaatcctgcacccccgatagatgctgttgagcagattcttcctaccttagttcggctcctgcatcatgatgatccagaagtgttagcagatacctgctgggctatttcctaccttactgatggtccaaatgaacgaattggcatggtggtgaaaacaggagttgtgccccaacttgtgaagcttctaggagcttctgaattgccaattgtgactcctgccctaagagccatagggaatattgtcactggtacagatgaacagactcaggttgtgattgatgcaggagcactcgccgtctttcccagcctgctcaccaaccccaaaactaacattcagaaggaagctacgtggacaatgtcaaacatcacagccggccgccaggaccagatacagcaagttgtgaatcatggattagtcccattccttgtcagtgttctctctaaggcagattttaagacacaaaaggaagctgtgtgggccgtgaccaactataccagtggtggaacagttgaacagattgtgtaccttgttcactgtggcataatagaaccgttgatgaacctcttaactgcaaaagataccaagattattctggttatcctggatgccatttcaaatatctttcaggctgctgagaaactaggtgaaactgagaaacttagtataatgattgaagaatgtggaggcttagacaaaattgaagctctacaaaaccatgaaaatgagtctgtatataaggcttcattaagcttaactgagaagtatttctctgtagaggtgagtaatggatggtaatattaataacaacttggaaaaatgtaaagccaaggccatgagcccttttttccctcatacttttaaaaatgagcctcatatctttgttaaatatagtaaaatatcagtgtgcataggacgtaatgtacttattgcccctctgatgtttggcttgatggtaataaaatctatttatttatttatttagctttggtttctacaaattattttattagaatgtcagactcaaaaggaactaccagtaacatgcctgaacatgctatatatgatttatgcttgacccgtgacacctgctgtcactggatccagagtgtgaacaagggaaaaggacagtggatgtgggcagggacagcaccagccctggctggccagacctcaggcccacagacgtggtccccataaccaccaggatccctacaatatacacattcctaattcaggctcaactctcctttacccaagagtaaatgcctcaggactcaatctgaatcactgtccgtctcggcttctttcacatccatgctgaatttgtactcctggtcacatcccatgtaagcatcactcatgaagtatagagtgtagttgtgggcaccagtggctggagccacaaagtccaacttcaccttggccttctgctgcaggatcagcctcttgatggagatgaggctattggacttggtgtctccaatcaccacccaccagccctcttcacgtttctgcgggaagagaggcgcaatgacagggcctgtgacttcctcctctcgctccagctgcaccagcacatccgtactggcccgccactgcggatgctgtccttatccaccacctcctaagatagttcgatattagggtagcagttacaaaagcgagccacatctgtaatctggctgtcagtcagctgaagaattgtgttccgttcttcatcctccatctccatgatgtcgaaaacactcttcactcccttgtctgtgcaacgtttgatatgctcagagatgaagtgtggcagctgcttcaggtatgagtccttggaccacatggcttgggtgaccatctgggccaattccatagctgccagagcagagctgagccacccattgctggagaggacatccacgcaggcctggacgagccggactgccttactaaggatttcctccgtatctgactgcaactcagcactcagctgcatgcgggacaggtgagcctgcaggagcaggttggtcttgatgtgcggatcattgaacttagggttattcagcttgtcagggaccttctgagccaactgcctcaggaagttttcttcatggtgctggatggggatattctcgtaccctgctgcattggagatgatctcaataagccctcgcaccttggtcttggcgttgaggaagaggaagatcaaaacgttgtaccagaaactacctctgaaggctacactttccaagttcaggatggggctcctgggacctttaacttttagatcatgtagctgagacataaatttgttgtgtactacgtttggtattttgtcttattgtttctctactaagaactctttcttaaatgtggtttgttactgtagcactttttacactgaaactatacttgaacagttccaactgtacatacatactgtatgaagcttgtcctctgactaggtttctaatttctatgtggaatttcctatcttgcagcatcctgtaaataaacattcaagtccacccttttcttgacttcaccatgaataaagaaatatttgcttactattaaacttgagggggggcccggcccccaattcgccttttgggagtcgttttacaattcacgggcggctgtttacaaccgtgtgactgggaaaacccctggggttccca

SEQ ID NO: 310300 - DNA, 4616 bp, Homo sapiens
ggggaaatttaaatcgcgccggccggctgcacgagccacacggtctttgagctgagtcgaggtggaccctttgaacgcagtcgccctacagccgctgattccccccgcatcgcctcccgtggaagcccaggcccgcttcgcagctttctccctttgtctcataaccatgtccaccaacgagaatgctaatacaccagctgcccgtcttcacagattcaagaacaagggaaaagacagtacagaaatgaggcgtcgcagaatagaggtcaatgtggagctgaggaaagctaagaaggatgaccagatgctgaagaggagaaatgtaagctcatttcctgatgatgctacttctccgctgcaggaaaaccgcaacaaccagggcactgtaaattggtctgttgatgacattgtcaaaggcataaatagcagcaatgtggaaaatcagctccaagctactcaagctgccaggaaactactttccagagaaaaacagccccccatagacaacataatccgggctggtttgattccgaaatttgtgtccttcttgggcagaactgattgtagtcccattcagtttgaatctgcttgggcactcactaacattgcttctgggacatcagaacaaaccaaggctgtggtagatggaggtgccatcccagcattcatttctctgttggcatctccccatgctcacatcagtgaacaagctgtctgggctctaggaaacattgcaggtgatggctcagtgttccgagacttggttattaagtacggtgcagttgacccactgttggctctccttgcagttcctgatatgtcatctttagcatgtggctacttacgtaatcttacctggacactttctaatctttgccgcaacaagaatcctgcacccccgatagatgctgttgagcagattcttcctaccttagttcggctcctgcatcatgatgatccagaagtgttagcagatacctgctgggctatttcctaccttactgatggtccaaatgaacgaattggcatggtggtgaaaacaggagttgtgccccaacttgtgaagcttctaggagcttctgaattgccaattgtgactcctgccctaagagccatagggaatattgtcactggtacagatgaacagactcaggttgtgattgatgcaggagcactcgccgtctttcccagcctgctcaccaaccccaaaactaacattcagaaggaagctacgtggacaatgtcaaacatcacagccggccgccaggaccagatacagcaagttgtgaatcatggattagtcccattccttgtcagtgttctctctaaggcagattttaagacacaaaaggaagctgtgtgggccgtgaccaactataccagtggtggaacagttgaacagattgtgtaccttgttcactgtggcataatagaaccgttgatgaacctcttaactgcaaaagataccaagattattctggttatcctggatgccatttcaaatatctttcaggctgctgagaaactaggtgaaactgagaaacttagtataatgattgaagaatgtggaggcttagacaaaattgaagctctacaaaaccatgaaaatgagtctgtgtataaggcttcgttaagcttaattgagaagtatttctctgtagagctttggtttctacaaattattttattagaatgtcagactcaaaaggaactaccagtaacatgcctgaacatgctatatatgatttatgcttgacccgtgacacctgctgtcactggatccagagtgtgaacaagggaaaaggacagtggatgtgggcagggacagcaccagccctggctggccagacctcaggcccacagacgtggtccccataaccaccaggatccctacaatatacacattcctaattcaggctcaactctcctttacccaagagtaaatgcctcaggactcaatctgaatcactgtccgtctcggcttctttcacatccatgctgaatttgtactcctggtcacatcccatgtaagcatcactcatgaagtatagagtgtagttgtgggcaccagtggctggagccacaaagtccaacttcaccttggccttctgctgcaggatcagcctcttgatggagatgaggctattggacttggtgtctccaatcaccacccaccagccctcttcacgtttctgcgggaagagaggcgcaatgacagggcctgtgacttcctcctctcgctccagctgcaccagcacatccgtactggcccgccactgcggatgctgtccttatccaccacctcctaagatagttcgatattagggtagcagttacaaaagcgagccacatctgtaatctggctgtcagtcagctgaagaattgtgttccgttcttcatcctccatctccatgatgtcgaaaacactcttcactcccttgtctgtgcaacgtttgatatgctcagagatgaagtgtggcagctgcttcaggtatgagtccttggaccacatggcttgggtgaccatctgggccaattccatagctgccagagcagagctgagccacccattgctggagaggacatccacgcaggcctggacgagccggactgccttactaaggatttcctccgtatctgactgcaactcagcactcagctgcatgcgggacaggtgagcctgcaggagcaggttggtcttgatgtgcggatcattgaacttagggttattcagcttgtcagggaccttctgagccaactgcctcaggaagttttcttcatggtgctggatggggatattctcgtaccctgctgcattggagatgatctcaataagccctcgcaccttggtcttggcgttgtgagattttaaaagtcaccagattagtttcaaatgaacagccttgagaatcttagaatatcttgagggtaagttaacgggtgtcattgtaggaggtgatagagaagtaggccaaacccaccaccatgctctgggcctaatacagtcttttcctattgaaaagtgacggttggggaagaaaaaaaatctcggcctgtttctgttactgtagtagctagcacttatgaattggcaaagtttcagagaccctccctcccctatgtcagatactacaataccatacaggattaaaggtgtaatatgcagatcaagacctagagattaaatacagacttcaggtaggctgctgcttggaatacttattatttttatacttattttttaatatatttccaggaagaggaagatcaaaacgttgtaccagaaactacctctgaaggctacactttccaagttcaggatggggctcctgggacctttaacttttagatcatgtagctgagacataaatttgttgtgtactacgtttggtattttgtcttattgtttctctactaagaactctttcttaaatgtggtttgttactgtagcactttttacactgaaactatacttgaacagttccaactgtacatacatactgtatgaagcttgtcctctgactaggtttctaatttctatgtggaatttcctatcttgcagcatcctgtaaataaacattcaagtccacccttttcttgacttcaccatgcctatgtgttgctttctaatttggggcctttaatgttgctagtgaaaggtaacctgtccaaactgatgggattaaccagaggtagtcctggctgcagtttttgcagaagaatgaataacattttctggaaaccctcagccagtgtctccttaagtctccttggccagggagatgggctaaataccgtaaatttaatcataaatctctgctggagctacaaatggaattctttcctcccaaacttcaaggctgaatggggttccaaggtaaatcacggctgcacatgggcctcacctgggaatgtacccagttctgtttcgttgatgaggggcatgagggtccaccttgtgtcttttttaaaaatgtaattcccaagggctcttgtacaatatagattgatcaccactattctttttgagatggagtctcgctctgtcacccaggcgaaacccgtgtctctagtaaaaatacaaacaattagctgggattacaggcatggtggtgggagcctgtaatcccagctactcaggaggctgagtgcaggagaatcgcttgaactccggaggttggaggttgcagtgaggctgagaatggcgccactgcagatcccagccttggtgacgagaagcgaaaacacttggtctaacaaaaaaaatccccctgtggcataagtatatcattaccctaataacttctgacgagtcaggataagggaacaaggaaggaaagcaaagggagcaggcaaaccgggtaattacgttcccgaaatagccaattgagagcaaagtcacattagatacgaaaactggctgacagccctaaacatgtagccatgcgtcgcaacagtaacatctgcacgaaacaagtcaccagtaaaacgaaattgatccaggggctgacagagaagacacacaacgaagacacaaagggacggagcggccggcaaacaaatcaccatcaaagggggccaccaggtcagtggcgaccacccagcaacatcagag

SEQ ID NO: 310301 - DNA, 3695 bp, Homo sapiens
  misc_feature (3445)..(3445): n is a, c, g, or t
  misc_feature (3463)..(3463): n is a, c, g, or t
  misc_feature (3509)..(3509): n is a, c, g, or t
ggggaaatttaaatcgcgccggccggctgcacgagccacacggtctttgagctgagtcgaggtggaccctttgaacgcagtcgccctacagccgctgattccccccgcatcgcctcccgtggaagcccaggcccgcttcgcagctttctccctttgtctcataaccatgtccaccaacgagaatgctaatacaccagctgcccgtcttcacagattcaagaacaagggaaaagacagtacagaaatgaggcgtcgcagaatagaggtcaatgtggagctgaggaaagctaagaaggatgaccagatgctgaagaggagaaatgtaagctcatttcctgatgatgctacttctccgctgcaggaaaaccgcaacaaccagggcactgtaaattggtctgttgatgacattgtcaaaggcataaatagcagcaatgtggaaaatcagctccaagctactcaagctgccaggaaactactttccagagaaaaacagccccccatagacaacataatccgggctggtttgattccgaaatttgtgtccttcttgggcagaactgattgtagtcccattcagtttgaatctgcttgggcactcactaacattgcttctgggacatcagaacaaaccaaggctgtggtagatggaggtgccatcccagcattcatttctctgttggcatctccccatgctcacatcagtgaacaagctgtctgggctctaggaaacattgcaggtgatggctcagtgttccgagacttggttattaagtacggtgcagttgacccactgttggctctccttgcagttcctgatatgtcatctttagcatgtggctacttacgtaatcttacctggacactttctaatctttgccgcaacaagaatcctgcacccccgatagatgctgttgagcagattcttcctaccttagttcggctcctgcatcatgatgatccagaagtgttagcagatacctgctgggctatttcctaccttactgatggtccaaatgaacgaattggcatggtggtgaaaacaggagttgtgccccaacttgtgaagcttctaggagcttctgaattgccaattgtgactcctgccctaagagccatagggaatattgtcactggtacagatgaacagactcaggttgtgattgatgcaggagcactcgccgtctttcccagcctgctcaccaaccccaaaactaacattcagaaggaagctacgtggacaatgtcaaacatcacagccggccgccaggaccagatacagcaagttgtgaatcatggattagtcccattccttgtcagtgttctctctaaggcagattttaagacacaaaaggaagctgtgtgggccgtgaccaactataccagtggtggaacagttgaacagattgtgtaccttgttcactgtggcataatagaaccgttgatgaacctcttaactgcaaaagataccaagattattctggttatcctggatgccatttcaaatatctttcaggctgctgagaaactaggtgaaactgagaaacttagtataatgattgaagaatgtggaggcttagacaaaattgaagctctacaaaaccatgaaaatgagtctgtatataaggcttcattaagcttaactgagaagtatttctctgtagaggtgagtaatggatggtaatattaataacaacttggaaaaatgtaaagccaaggccatgagcccttttttccctcatacttttaaaaatgagcctcatatctttgttaaatatagtaaaatatcagtgtgcataggacgtaatgtacttattgcccctctgatgtttggcttgatggtaataaaatctatttatttatttatttagctttggtttctacaaattattttattagaatgtcagactcaaaaggaactaccagtaacatgcctgaacatgctatatatgatttatgcttgacccgtgacacctgctgtcactggatccagagtgtgaacaagggaaaaggacagtggatgtgggcagggacagcaccagccctggctggccagacctcaggcccacagacgtggtccccataaccaccaggatccctacaatatacacattcctaattcaggctcaactctcctttacccaagagtaaatgcctcaggactcaatctgaatcactgtccgtctcggcttctttcacatccatgctgaatttgtactcctggtcacatcccatgtaagcatcactcatgaagtatagagtgtagttgtgggcaccagtggctggagccacaaagtccaacttcaccttggccttctgctgcaggatcagcctcttgatggagatgaggctattggacttggtgtctccaatcaccacccaccagccctcttcacgtttctgcgggaagagaggcgcaatgacagggcctgtgacttcctcctctcgctccagctgcaccagcacatccgtactggcccgccactgcggatgctgtccttatccaccacctcctaagatagttcgatattagggtagcagttacaaaagcgagccacatctgtaatctggctgtcagtcagctgaagaattgtgttccgttcttcatcctccatctccatgatgtcgaaaacactcttcactcccttgtctgtgcaacgtttgatatgctcagagatgaagtgtggcagctgcttcaggtatgagtccttggaccacatggcttgggtgaccatctgggccaattccatagctgccagagcagagctgagccacccattgctggagaggacatccacgcaggcctggacgagccggactgccttactaaggatttcctccgtatctgactgcaactcagcactcagctgcatgcgggacaggtgagcctgcaggagcaggttggtcttgatgtgcggatcattgaacttagggttattcagcttgtcagggaccttctgagccaactgcctcaggaagttttcttcatggtgctggatggggatattctcgtaccctgctgcattggagatgatctcaataagccctcgcaccttggtcttggcgttgaggaagaggaagatcaaaacgttgtaccagaaactacctctgaaggctacactttccaagttcaggatggggctcctgggacctttaacttttagatcatgtagctgagacataaatttgttgtgtactacgtttggtattttgtcttattgtttctctactaagaactctttcttaaatgtggtttgttactgtagcactttttacactgaaactatacttgaacagttccaactgtacatacatactgtatgaagcttgtcctctgactaggtttctaatttctatgtggaatttcctatcttgcagcatcctgtaaataaacattcaagtccacccttttcttgacttcaccatgaaaaaaaaaaaaaaaaaaaanaaaaaaaaaaaaaaaaanaaaaaaaaaaaaaaaaaaaaaagagggggggggaaaaaaaaataanaaaaaaaaaaaaaacaaagaaaaacagaaaaaacaaaacaaaaaacacaaacgaagaacaaaaaaacaaatcatagaaagagagggcggggcgcatcacaaaatgccacgactcgcagcgcgcgacacaacaacaagacaccaacaccctatttagagactagaagacccaccacgagagcggcac

SEQ ID NO: 310302 - DNA, 4374 bp, Homo sapiens
ggggaaatttaaatcgcgccggccggctgcacgagccacacggtctttgagctgagtcgaggtggaccctttgaacgcagtcgccctacagccgctgattccccccgcatcgcctcccgtggaagcccaggcccgcttcgcagctttctccctttgtctcataaccatgtccaccaacgagaatgctaatacaccagctgcccgtcttcacagattcaagaacaagggaaaagacagtacagaaatgaggcgtcgcagaatagaggtcaatgtggagctgaggaaagctaagaaggatgaccagatgctgaagaggagaaatgtaagctcatttcctgatgatgctacttctccgctgcaggaaaaccgcaacaaccagggcactgtaaattggtctgttgatgacattgtcaaaggcataaatagcagcaatgtggaaaatcagctccaagctactcaagctgccaggaaactactttccagagaaaaacagccccccatagacaacataatccgggctggtttgattccgaaatttgtgtccttcttgggcagaactgattgtagtcccattcagtttgaatctgcttgggcactcactaacattgcttctgggacatcagaacaaaccaaggctgtggtagatggaggtgccatcccagcattcatttctctgttggcatctccccatgctcacatcagtgaacaagctgtctgggctctaggaaacattgcaggtgatggctcagtgttccgagacttggttattaagtacggtgcagttgacccactgttggctctccttgcagttcctgatatgtcatctttagcatgtggctacttacgtaatcttacctggacactttctaatctttgccgcaacaagaatcctgcacccccgatagatgctgttgagcagattcttcctaccttagttcggctcctgcatcatgatgatccagaagtgttagcagatacctgctgggctatttcctaccttactgatggtccaaatgaacgaattggcatggtggtgaaaacaggagttgtgccccaacttgtgaagcttctaggagcttctgaattgccaattgtgactcctgccctaagagccatagggaatattgtcactggtacagatgaacagactcaggttgtgattgatgcaggagcactcgccgtctttcccagcctgctcaccaaccccaaaactaacattcagaaggaagctacgtggacaatgtcaaacatcacagccggccgccaggaccagatacagcaagttgtgaatcatggattagtcccattccttgtcagtgttctctctaaggcagattttaagacacaaaaggaagctgtgtgggccgtgaccaactataccagtggtggaacagttgaacagattgtgtaccttgttcactgtggcataatagaaccgttgatgaacctcttaactgcaaaagataccaagattattctggttatcctggatgccatttcaaatatctttcaggctgctgagaaactaggtgaaactgagaaacttagtataatgattgaagaatgtggaggcttagacaaaattgaagctctacaaaaccatgaaaatgagtctgtatataaggcttcattaagcttaactgagaagtatttctctgtagaggtgagtaatggatggtaatattaataacaacttggaaaaatgtaaagccaaggccatgagcccttttttccctcatacttttaaaaatgagcctcatatctttgttaaatatagtaaaatatcagtgtgcataggacgtaatgtacttattgcccctctgatgtttggcttgatggtaataaaatctatttatttatttatttagctttggtttctacaaattattttattagaatgtcagactcaaaaggaactaccagtaacatgcctgaacatgctatatatgatttatgcttgacccgtgacacctgctgtcactggatccagagtgtgaacaagggaaaaggacagtggatgtgggcagggacagcaccagccctggctggccagacctcaggcccacagacgtggtccccataaccaccaggatccctacaatatacacattcctaattcaggctcaactctcctttacccaagagtaaatgcctcaggactcaatctgaatcactgtccgtctcggcttctttcacatccatgctgaatttgtactcctggtcacatcccatgtaagcatcactcatgaagtatagagtgtagttgtgggcaccagtggctggagccacaaagtccaacttcaccttggccttctgctgcaggatcagcctcttgatggagatgaggctattggacttggtgtctccaatcaccacccaccagccctcttcacgtttctgcgggaagagaggcgcaatgacagggcctgtgacttcctcctctcgctccagctgcaccagcacatccgtactggcccgccactgcggatgctgtccttatccaccacctcctaagatagttcgatattagggtagcagttacaaaagcgagccacatctgtaatctggctgtcagtcagctgaagaattgtgttccgttcttcatcctccatctccatgatgtcgtgtggcagctgcttcaggtatgagtccttggaccacatggcttgggtgaccatctgggccaattccatagctgccagagcagagctgagccacccattgctggagaggacatccacgcaggcctggacgagccggactgccttactaaggatttcctccgtatctgactgcaactcagcactcagctgcatgcgggacaggtgagcctgcaggagcaggttggtcttgatgtgcggatcattgaacttagggttattcagcttgtcagggaccttctgagccaactgcctcaggaagttttcttcatggtgctggatggggatattctcgtaccctgctgcattggagatgatctcaataagccctcgcaccttggtcttggcgttgaggaagaggaagatcaaaacgttgtaccagaaactacctctgaaggctacactttccaagttcaggatggggctcctgggacctttaacttttagatcatgtagctgagacataaatttgttgtgtactacgtttggtattttgtcttattgtttctctactaagaactctttcttaaatgtggtttgttactgtagcactttttacactgaaactatacttgaacagttccaactgtacatacatactgtatgaagcttgtcctctgactaggtttctaatttctatgtggaatttcctatcttgcagcatcctgtaaataaacattcaagtccacccttttcttgacttcaccatgcctatgtgttgctttctaatttggggcctttaatgttgctagtgaaaggtaacctgtccaaactgatgggattaaccagaggtagtcctggctgcagtttttgcagaagaatgaataacattttctggaaaccctcagccagtgtctccttaagtctccttggccagggagatgggctaaataccgtaaatttaatcataaatctctgctggagctacaaatggaattctttcctcccaaacttcaaggctgaatggggttccaaggtaaatcacggctgcacatgggcctcacctgggaatgtacccagttctgtttcgttgatgaggggcatgagggtccaccttgtgtcttttttaaaaatgtaattcccaagggctcttgtacaatatagattgatcaccactattctttttgagatggagtctcgctctgtcacccaggcgaaacccgtgtctctagtaaaaatacaaacaattagctgggattacaggcatggtggtgggagcctgtaatcccagctactcaggaggctgagtgcaggagaatcgcttgaactccggaggttggaggttgcagtgaggctgagaatggcgccactgcagatcccagccttggtgacgagaagcgaaaacacttggtctaacaaaaaaaatccccctgtggcataagtatatcattaccctaataacttctgacgagtcaggataagggaacaaggaaggaaagcaaagggagcaggcaaaccgggtaattacgttcccgaaatagccaattgagagcaaagtcacattagatacgaaaactggctgacagccctaaacatgtagccatgcgtcgcaacagtaacatctgcacgaaacaagtcaccagtaaaacgaaattgatccaggggctgacagagaagacacacaacgaagacacaaagggacggagcggccggcaaacaaatcaccatcaaagggggccaccaggtcagtggcgaccacccagcaacatcagag

SEQ ID NO: 310303 - DNA, 2580 bp, Homo sapiens
ggggaaatttaaatcgcgccggccggctgcacgagccacacggtctttgagctgagtcgaggtggaccctttgaacgcagtcgccctacagccgctgattccccccgcatcgcctcccgtggaagcccaggcccgcttcgcagctttctccctttgtctcataaccatgtccaccaacgagaatgctaatacaccagctgcccgtcttcacagattcaagaacaagggaaaagacagtacagaaatgaggcgtcgcagaatagaggtcaatgtggagctgaggaaagctaagaaggatgaccagatgctgaagaggagaaatgtaagctcatttcctgatgatgctacttctccgctgcaggaaaaccgcaacaaccagggcactgtaaattggtctgttgatgacattgtcaaaggcataaatagcagcaatgtggaaaatcagctccaagctactcaagctgccaggaaactactttccagagaaaaacagccccccatagacaacataatccgggctggtttgattccgaaatttgtgtccttcttgggcagaactgattgtagtcccattcagtttgaatctgcttgggcactcactaacattgcttctgggacatcagaacaaaccaaggctgtggtagatggaggtgccatcccagcattcatttctctgttggcatctccccatgctcacatcagtgaacaagctgtctgggctctaggaaacattgcaggtgatggctcagtgttccgagacttggttattaagtacggtgcagttgacccactgttggctctccttgcagttcctgatatgtcatctttagcatgtggctacttacgtaatcttacctggacactttctaatctttgccgcaacaagaatcctgcacccccgatagatgctgttgagcagattcttcctaccttagttcggctcctgcatcatgatgatccagaagtgttagcagatacctgctgggctatttcctaccttactgatggtccaaatgaacgaattggcatggtggtgaaaacaggagttgtgccccaacttgtgaagcttctaggagcttctgaattgccaattgtgactcctgccctaagagccatagggaatattgtcactggtacagatgaacagactcaggttgtgattgatgcaggagcactcgccgtctttcccagcctgctcaccaaccccaaaactaacattcagaaggaagctacgtggacaatgtcaaacatcacagccggccgccaggaccagatacagcaagttgtgaatcatggattagtcccattccttgtcagtgttctctctaaggcagattttaagacacaaaaggaagctgtgtgggccgtgaccaactataccagtggtggaacagttgaacagattgtgtaccttgttcactgtggcataatagaaccgttgatgaacctcttaactgcaaaagataccaagattattctggttatcctggatgccatttcaaatatctttcaggctgctgagaaactaggtgaaactgagaaacttagtataatgattgaagaatgtggaggcttagacaaaattgaagctctacaaaaccatgaaaatgagtctgtgtataaggcttcgttaagcttaattgagaagtatttctctgtagaggaagaggaagatcaaaacgttgtaccagaaactacctctgaaggctacactttccaagttcaggatggggctcctgggacctttaacttttagatcatgtagctgagacataaatttgttgtgtactacgtttggtattttgtcttattgtttctctactaagaactctttcttaaatgtggtttgttactgtagcactttttacactgaaactatacttgaacagttccaactgtacatacatactgtatgaagcttgtcctctgactaggtttctaatttctatgtggaatttcctatcttgcagcatcctgtaaataaacattcaaaggtccaacgccaaaaaaatcacaccacaaacaacaacacaccgaaaaacattgtgggcgcggccggcttcttcgggcccttcgaaaaagagcgcttcaacacaagcacaacttcggagttggcggccacgggcgccaccgataagcgaaaggagaaactgcgggcaaacaacggtggtcccccaaaggaagaacaccgggggcacaagaacaaaaggcgcgcggaggaggtcccccccagatataaaaaagacgccgcggggggaacaccacaagagagatttaagtggaaaacaaataccacaagcaggaggaccaacagagcgggccaaaacccggggggcatcccaataacaacaaagggggagcgccacacaacagagggggccgatcacagacaaacacaaaaaaagtaaaccgccccacatctggggggggcaaacacccgagcagaagcggcagcgagagagcagaaccacacgagacagagcaccaaggcaagaagagagaacacggacaaagacacaacaacagaagaaaaggacaacgaaagacgacacaaaaggacagcaagcatacagcgcagat

SEQ ID NO: 310304 - DNA, 3487 bp, Homo sapiens
  misc_feature (3255)..(3255): n is a, c, g, or t
  misc_feature (3301)..(3301): n is a, c, g, or t
ggggaaatttaaatcgcgccggccggctgcacgagccacacggtctttgagctgagtcgaggtggaccctttgaacgcagtcgccctacagccgctgattccccccgcatcgcctcccgtggaagcccaggcccgcttcgcagctttctccctttgtctcataaccatgtccaccaacgagaatgctaatacaccagctgcccgtcttcacagattcaagaacaagggaaaagacagtacagaaatgaggcgtcgcagaatagaggtcaatgtggagctgaggaaagctaagaaggatgaccagatgctgaagaggagaaatgtaagctcatttcctgatgatgctacttctccgctgcaggaaaaccgcaacaaccagggcactgtaaattggtctgttgatgacattgtcaaaggcataaatagcagcaatgtggaaaatcagctccaagctactcaagctgccaggaaactactttccagagaaaaacagccccccatagacaacataatccgggctggtttgattccgaaatttgtgtccttcttgggcagaactgattgtagtcccattcagtttgaatctgcttgggcactcactaacattgcttctgggacatcagaacaaaccaaggctgtggtagatggaggtgccatcccagcattcatttctctgttggcatctccccatgctcacatcagtgaacaagctgtctgggctctaggaaacattgcaggtgatggctcagtgttccgagacttggttattaagtacggtgcagttgacccactgttggctctccttgcagttcctgatatgtcatctttagcatgtggctacttacgtaatcttacctggacactttctaatctttgccgcaacaagaatcctgcacccccgatagatgctgttgagcagattcttcctaccttagttcggctcctgcatcatgatgatccagaagtgttagcagatacctgctgggctatttcctaccttactgatggtccaaatgaacgaattggcatggtggtgaaaacaggagttgtgccccaacttgtgaagcttctaggagcttctgaattgccaattgtgactcctgccctaagagccatagggaatattgtcactggtacagatgaacagactcaggttgtgattgatgcaggagcactcgccgtctttcccagcctgctcaccaaccccaaaactaacattcagaaggaagctacgtggacaatgtcaaacatcacagccggccgccaggaccagatacagcaagttgtgaatcatggattagtcccattccttgtcagtgttctctctaaggcagattttaagacacaaaaggaagctgtgtgggccgtgaccaactataccagtggtggaacagttgaacagattgtgtaccttgttcactgtggcataatagaaccgttgatgaacctcttaactgcaaaagataccaagattattctggttatcctggatgccatttcaaatatctttcaggctgctgagaaactaggtgaaactgagaaacttagtataatgattgaagaatgtggaggcttagacaaaattgaagctctacaaaaccatgaaaatgagtctgtatataaggcttcattaagcttaactgagaagtatttctctgtagaggtgagtaatggatggtaatattaataacaacttggaaaaatgtaaagccaaggccatgagcccttttttccctcatacttttaaaaatgagcctcatatctttgttaaatatagtaaaatatcagtgtgcataggacgtaatgtacttattgcccctctgatgtttggcttgatggtaataaaatctatttatttatttatttagctttggtttctacaaattattttattagaatgtcagactcaaaaggaactaccagtaacatgcctgaacatgctatatatgatttatgcttgacccgtgacacctgctgtcactggatccagagtgtgaacaagggaaaaggacagtggatgtgggcagggacagcaccagccctggctggccagacctcaggcccacagacgtggtccccataaccaccaggatccctacaatatacacattcctaattcaggctcaactctcctttacccaagagtaaatgcctcaggactcaatctgaatcactgtccgtctcggcttctttcacatccatgctgaatttgtactcctggtcacatcccatgtaagcatcactcatgaagtatagagtgtagttgtgggcaccagtggctggagccacaaagtccaacttcaccttggccttctgctgcaggatcagcctcttgatggagatgaggctattggacttggtgtctccaatcaccacccaccagccctcttcacgtttctgcgggaagagaggcgcaatgacagggcctgtgacttcctcctctcgctccagctgcaccagcacatccgtactggcccgccactgcggatgctgtccttatccaccacctcctaagatagttcgatattagggtagcagttacaaaagcgagccacatctgtaatctggctgtcagtcagctgaagaattgtgttccgttcttcatcctccatctccatgatgtcgaaaacactcttcactcccttgtctgtgcaacgtttgatatgctcagagatgaagtgtggcagctgcttcaggtatgagtccttggaccacatggcttgggtgaccatctgggccaattccatagctgccagagcagagctgagccacccattgctggagaggacatccacgcaggcctggacgagccggactgccttactaaggatttcctccgtatctgactgcaactcagcactcagctgcatgcgggacagaggaagaggaagatcaaaacgttgtaccagaaactacctctgaaggctacactttccaagttcaggatggggctcctgggacctttaacttttagatcatgtagctgagacataaatttgttgtgtactacgtttggtattttgtcttattgtttctctactaagaactctttcttaaatgtggtttgttactgtagcactttttacactgaaactatacttgaacagttccaactgtacatacatactgtatgaagcttgtcctctgactaggtttctaatttctatgtggaatttcctatcttgcagcatcctgtaaataaacattcaagtccacccttttcttgacttcaccatgaaaaaaaaaaaaaaaaanaaaaaaaaaaaaaaaaaaaaaagagggggggggaaaaaaaaataanaaaaaaaaaaaaaacaaagaaaaacagaaaaaacaaaacaaaaaacacaaacgaagaacaaaaaaacaaatcatagaaagagagggcggggcgcatcacaaaatgccacgactcgcagcgcgcgacacaacaacaagacaccaacaccctatttagagactagaagacccaccacgagagcggcac

SEQ ID NO: 310305 - DNA, 4162 bp, Homo sapiens
ggggaaatttaaatcgcgccggccggctgcacgagccacacggtctttgagctgagtcgaggtggaccctttgaacgcagtcgccctacagccgctgattccccccgcatcgcctcccgtggaagcccaggcccgcttcgcagctttctccctttgtctcataaccatgtccaccaacgagaatgctaatacaccagctgcccgtcttcacagattcaagaacaagggaaaagacagtacagaaatgaggcgtcgcagaatagaggtcaatgtggagctgaggaaagctaagaaggatgaccagatgctgaagaggagaaatgtaagctcatttcctgatgatgctacttctccgctgcaggaaaaccgcaacaaccagggcactgtaaattggtctgttgatgacattgtcaaaggcataaatagcagcaatgtggaaaatcagctccaagctactcaagctgccaggaaactactttccagagaaaaacagccccccatagacaacataatccgggctggtttgattccgaaatttgtgtccttcttgggcagaactgattgtagtcccattcagtttgaatctgcttgggcactcactaacattgcttctgggacatcagaacaaaccaaggctgtggtagatggaggtgccatcccagcattcatttctctgttggcatctccccatgctcacatcagtgaacaagctgtctgggctctaggaaacattgcaggtgatggctcagtgttccgagacttggttattaagtacggtgcagttgacccactgttggctctccttgcagttcctgatatgtcatctttagcatgtggctacttacgtaatcttacctggacactttctaatctttgccgcaacaagaatcctgcacccccgatagatgctgttgagcagattcttcctaccttagttcggctcctgcatcatgatgatccagaagtgttagcagatacctgctgggctatttcctaccttactgatggtccaaatgaacgaattggcatggtggtgaaaacaggagttgtgccccaacttgtgaagcttctaggagcttctgaattgccaattgtgactcctgccctaagagccatagggaatattgtcactggtacagatgaacagactcaggttgtgattgatgcaggagcactcgccgtctttcccagcctgctcaccaaccccaaaactaacattcagaaggaagctacgtggacaatgtcaaacatcacagccggccgccaggaccagatacagcaagttgtgaatcatggattagtcccattccttgtcagtgttctctctaaggcagattttaagacacaaaaggaagctgtgtgggccgtgaccaactataccagtggtggaacagttgaacagattgtgtaccttgttcactgtggcataatagaaccgttgatgaacctcttaactgcaaaagataccaagattattctggttatcctggatgccatttcaaatatctttcaggctgctgagaaactaggtgaaactgagaaacttagtataatgattgaagaatgtggaggcttagacaaaattgaagctctacaaaaccatgaaaatgagtctgtatataaggcttcattaagcttaactgagaagtatttctctgtagaggatcagcctcttgatggagatgaggctattggacttggtgtctccaatcaccacccaccagccctcttcacgtttctgcgggaagagaggcgcaatgacagggcctgtgacttcctcctctcgctccagctgcaccagcacatccgtactggcccgccactgcggatgctgtccttatccaccacctcctaagatagttcgatattagggtagcagttacaaaagcgagccacatctgtaatctggctgtcagtcagctgaagaattgtgttccgttcttcatcctccatctccatgatgtcgaaaacactcttcactcccttgtctgtgcaacgtttgatatgctcagagatgaagtgtggcagctgcttcaggtatgagtccttggaccacatggcttgggtgaccatctgggccaattccatagctgccagagcagagctgagccacccattgctggagaggacatccacgcaggcctggacgagccggactgccttactaaggatttcctccgtatctgactgcaactcagcactcagctgcatgcgggacaggtgagcctgcaggagcaggttggtcttgatgtgcggatcattgaacttagggttattcagcttgtcagggaccttctgagccaactgcctcaggaagttttcttcatggtgctggatggggatattctcgtaccctgctgcattggagatgatctcaataagccctcgcaccttggtcttggcgttgtgagattttaaaagtcaccagattagtttcaaatgaacagccttgagaatcttagaatatcttgagggtaagttaacgggtgtcattgtaggaggtgatagagaagtaggccaaacccaccaccatgctctgggcctaatacagtcttttcctattgaaaagtgacggttggggaagaaaaaaaatctcggcctgtttctgttactgtagtagctagcacttatgaattggcaaagtttcagagaccctccctcccctatgtcagatactacaataccatacaggattaaaggtgtaatatgcagatcaagacctagagattaaatacagacttcaggtaggctgctgcttggaatacttattatttttatacttattttttaatatatttccaggaagaggaagatcaaaacgttgtaccagaaactacctctgaaggctacactttccaagttcaggatggggctcctgggacctttaacttttagatcatgtagctgagacataaatttgttgtgtactacgtttggtattttgtcttattgtttctctactaagaactctttcttaaatgtggtttgttactgtagcactttttacactgaaactatacttgaacagttccaactgtacatacatactgtatgaagcttgtcctctgactaggtttctaatttctatgtggaatttcctatcttgcagcatcctgtaaataaacattcaagtccacccttttcttgacttcaccatgcctatgtgttgctttctaatttggggcctttaatgttgctagtgaaaggtaacctgtccaaactgatgggattaaccagaggtagtcctggctgcagtttttgcagaagaatgaataacattttctggaaaccctcagccagtgtctccttaagtctccttggccagggagatgggctaaataccgtaaatttaatcataaatctctgctggagctacaaatggaattctttcctcccaaacttcaaggctgaatggggttccaaggtaaatcacggctgcacatgggcctcacctgggaatgtacccagttctgtttcgttgatgaggggcatgagggtccaccttgtgtcttttttaaaaatgtaattcccaagggctcttgtacaatatagattgatcaccactattctttttgagatggagtctcgctctgtcacccaggcgaaacccgtgtctctagtaaaaatacaaacaattagctgggattacaggcatggtggtgggagcctgtaatcccagctactcaggaggctgagtgcaggagaatcgcttgaactccggaggttggaggttgcagtgaggctgagaatggcgccactgcagatcccagccttggtgacgagaagcgaaaacacttggtctaacaaaaaaaatccccctgtggcataagtatatcattaccctaataacttctgacgagtcaggataagggaacaaggaaggaaagcaaagggagcaggcaaaccgggtaattacgttcccgaaatagccaattgagagcaaagtcacattagatacgaaaactggctgacagccctaaacatgtagccatgcgtcgcaacagtaacatctgcacgaaacaagtcaccagtaaaacgaaattgatccaggggctgacagagaagacacacaacgaagacacaaagggacggagcggccggcaaacaaatcaccatcaaagggggccaccaggtcagtggcgaccacccagcaacatcagag

SEQ ID NO: 310306 - DNA, 4798 bp, Homo sapiens
ggggaaatttaaatcgcgccggccggctgcacgagccacacggtctttgagctgagtcgaggtggaccctttgaacgcagtcgccctacagccgctgattccccccgcatcgcctcccgtggaagcccaggcccgcttcgcagctttctccctttgtctcataaccatgtccaccaacgagaatgctaatacaccagctgcccgtcttcacagattcaagaacaagggaaaagacagtacagaaatgaggcgtcgcagaatagaggtcaatgtggagctgaggaaagctaagaaggatgaccagatgctgaagaggagaaatgtaagctcatttcctgatgatgctacttctccgctgcaggaaaaccgcaacaaccagggcactgtaaattggtctgttgatgacattgtcaaaggcataaatagcagcaatgtggaaaatcagctccaagctactcaagctgccaggaaactactttccagagaaaaacagccccccatagacaacataatccgggctggtttgattccgaaatttgtgtccttcttgggcagaactgattgtagtcccattcagtttgaatctgcttgggcactcactaacattgcttctgggacatcagaacaaaccaaggctgtggtagatggaggtgccatcccagcattcatttctctgttggcatctccccatgctcacatcagtgaacaagctgtctgggctctaggaaacattgcaggtgatggctcagtgttccgagacttggttattaagtacggtgcagttgacccactgttggctctccttgcagttcctgatatgtcatctttagcatgtggctacttacgtaatcttacctggacactttctaatctttgccgcaacaagaatcctgcacccccgatagatgctgttgagcagattcttcctaccttagttcggctcctgcatcatgatgatccagaagtgttagcagatacctgctgggctatttcctaccttactgatggtccaaatgaacgaattggcatggtggtgaaaacaggagttgtgccccaacttgtgaagcttctaggagcttctgaattgccaattgtgactcctgccctaagagccatagggaatattgtcactggtacagatgaacagactcaggttgtgattgatgcaggagcactcgccgtctttcccagcctgctcaccaaccccaaaactaacattcagaaggaagctacgtggacaatgtcaaacatcacagccggccgccaggaccagatacagcaagttgtgaatcatggattagtcccattccttgtcagcgatctctctaagattttgagacacaaaaggaagctgtatgggccgtggaacagttgaacagattgtgtaccttgttcactgtggcataatagaaccgttgatgaacctcttaactgcaaaagataccaagattattctggttatcctggatgccatttcaaatatctttcaggctgctgagaaactaggtgaaactgagaaacttagtataatgattgaagaatgtggaggcttagacaaaattgaagctctacaaaaccatgaaaatgagtctgtatataaggcttcattaagcttaactgagaagtatttctctgtagaggtgagtaatggatggtaatattaataacaacttggaaaaatgtaaagccaaggccatgagcccttttttccctcatacttttaaaaatgagcctcatatctttgttaaatatagtaaaatatcagtgtgcataggacgtaatgtacttattgcccctctgatgtttggcttgatggtaataaaatctatttatttatttatttagctttggtttctacaaattattttattagaatgtcagactcaaaaggaactaccagtaacatgcctgaacatgctatatatgatttatgcttgacccgtgacacctgctgtcactggatccagagtgtgaacaagggaaaaggacagtggatgtgggcagggacagcaccagccctggctggccagacctcaggcccacagacgtggtccccataaccaccaggatccctacaatatacacattcctaattcaggctcaactctcctttacccaagagtaaatgcctcaggactcaatctgaatcactgtccgtctcggcttctttcacatccatgctgaatttgtactcctggtcacatcccatgtaagcatcactcatgaagtatagagtgtagttgtgggcaccagtggctggagccacaaagtccaacttcaccttggccttctgctgcaggatcagcctcttgatggagatgaggctattggacttggtgtctccaatcaccacccaccagccctcttcacgtttctgcgggaagagaggcgcaatgacagggcctgtgacttcctcctctcgctccagctgcaccagcacatccgtactggcccgccactgcggatgctgtccttatccaccacctcctaagatagttcgatattagggtagcagttacaaaagcgagccacatctgtaatctggctgtcagtcagctgaagaattgtgttccgttcttcatcctccatctccatgatgtcgaaaacactcttcactcccttgtctgtgcaacgtttgatatgctcagagatgaagtgtggcagctgcttcaggtatgagtccttggaccacatggcttgggtgaccatctgggccaattccatagctgccagagcagagctgagccacccattgctggagaggacatccacgcaggcctggacgagccggactgccttactaaggatttcctccgtatctgactgcaactcagcactcagctgcatgcgggacaggtgagcctgcaggagcaggttggtcttgatgtgcggatcattgaacttagggttattcagcttgtcagggaccttctgagccaactgcctcaggaagttttcttcatggtgctggatggggatattctcgtaccctgctgcattggagatgatctcaataagccctcgcaccttggtcttggcgttgtgagattttaaaagtcaccagattagtttcaaatgaacagccttgagaatcttagaatatcttgagggtaagttaacgggtgtcattgtaggaggtgatagagaagtaggccaaacccaccaccatgctctgggcctaatacagtcttttcctattgaaaagtgacggttggggaagaaaaaaaatctcggcctgtttctgttactgtagtagctagcacttatgaattggcaaagtttcagagaccctccctcccctatgtcagatactacaataccatacaggattaaaggtgtaatatgcagatcaagacctagagattaaatacagacttcaggtaggctgctgcttggaatacttattatttttatacttattttttaatatatttccaggaagaggaagatcaaaacgttgtaccagaaactacctctgaaggctacactttccaagttcaggatggggctcctgggacctttaacttttagatcatgtagctgagacataaatttgttgtgtactacgtttggtattttgtcttattgtttctctactaagaactctttcttaaatgtggtttgttactgtagcactttttacactgaaactatacttgaacagttccaactgtacatacatactgtatgaagcttgtcctctgactaggtttctaatttctatgtggaatttcctatcttgcagcatcctgtaaataaacattcaagtccacccttttcttgacttcaccatgcctatgtgttgctttctaatttggggcctttaatgttgctagtgaaaggtaacctgtccaaactgatgggattaaccagaggtagtcctggctgcagtttttgcagaagaatgaataacattttctggaaaccctcagccagtgtctccttaagtctccttggccagggagatgggctaaataccgtaaatttaatcataaatctctgctggagctacaaatggaattctttcctcccaaacttcaaggctgaatggggttccaaggtaaatcacggctgcacatgggcctcacctgggaatgtacccagttctgtttcgttgatgaggggcatgagggtccaccttgtgtcttttttaaaaatgtaattcccaagggctcttgtacaatatagattgatcaccactattctttttgagatggagtctcgctctgtcacccaggcgaaacccgtgtctctagtaaaaatacaaacaattagctgggattacaggcatggtggtgggagcctgtaatcccagctactcaggaggctgagtgcaggagaatcgcttgaactccggaggttggaggttgcagtgaggctgagaatggcgccactgcagatcccagccttggtgacgagaagcgaaaacacttggtctaacaaaaaaaatccccctgtggcataagtatatcattaccctaataacttctgacgagtcaggataagggaacaaggaaggaaagcaaagggagcaggcaaaccgggtaattacgttcccgaaatagccaattgagagcaaagtcacattagatacgaaaactggctgacagccctaaacatgtagccatgcgtcgcaacagtaacatctgcacgaaacaagtcaccagtaaaacgaaattgatccaggggctgacagagaagacacacaacgaagacacaaagggacggagcggccggcaaacaaatcaccatcaaagggggccaccaggtcagtggcgaccacccagcaacatcagag

SEQ ID NO: 310307 - DNA, 4593 bp, Homo sapiens
ggggaaatttaaatcgcgccggccggctgcacgagccacacggtctttgagctgagtcgaggtggaccctttgaacgcagtcgccctacagccgctgattccccccgcatcgcctcccgtggaagcccaggcccgcttcgcagctttctccctttgtctcataaccatgtccaccaacgagaatgctaatacaccagctgcccgtcttcacagattcaagaacaagggaaaagacagtacagaaatgaggcgtcgcagaatagaggtcaatgtggagctgaggaaagctaagaaggatgaccagatgctgaagaggagaaatgtaagctcatttcctgatgatgctacttctccgctgcaggaaaaccgcaacaaccagggcactgtaaattggtctgttgatgacattgtcaaaggcataaatagcagcaatgtggaaaatcagctccaagctactcaagctgccaggaaactactttccagagaaaaacagccccccatagacaacataatccgggctggtttgattccgaaatttgtgtccttcttgggcagaactgattgtagtcccattcagtttgaatctgcttgggcactcactaacattgcttctgggacatcagaacaaaccaaggctgtggtagatggaggtgccatcccagcattcatttctctgttggcatctccccatgctcacatcagtgaacaagctgtctgggctctaggaaacattgcaggtgatggctcagtgttccgagacttggttattaagtacggtgcagttgacccactgttggctctccttgcagttcctgatatgtcatctttagcatgtggctacttacgtaatcttacctggacactttctaatctttgccgcaacaagaatcctgcacccccgatagatgctgttgagcagattcttcctaccttagttcggctcctgcatcatgatgatccagaagtgttagcagatacctgctgggctatttcctaccttactgatggtccaaatgaacgaattggcatggtggtgaaaacaggagttgtgccccaacttgtgaagcttctaggagcttctgaattgccaattgtgactcctgccctaagagccatagggaatattgtcactggtacagatgaacagactcaggttgtgattgatgcaggagcactcgccgtctttcccagcctgctcaccaaccccaaaactaacattcagaaggaagctacgtggacaatgtcaaacatcacagccggccgccaggaccagatacagcaagttgtgaatcatggattagtcccattccttgtcagcgatctctctaagattttgagacacaaaaggaagctgtatgggccgtggaacagttgaacagattgtgtaccttgttcactgtggcataatagaaccgttgatgaacctcttaactgcaaaagataccaagattattctggttatcctggatgccatttcaaatatctttcaggctgctgagaaactaggtgaaactgagaaacttagtataatgattgaagaatgtggaggcttagacaaaattgaagctctacaaaaccatgaaaatgagtctgtgtataaggcttcgttaagcttaattgagaagtatttctctgtagagctttggtttctacaaattattttattagaatgtcagactcaaaaggaactaccagtaacatgcctgaacatgctatatatgatttatgcttgacccgtgacacctgctgtcactggatccagagtgtgaacaagggaaaaggacagtggatgtgggcagggacagcaccagccctggctggccagacctcaggcccacagacgtggtccccataaccaccaggatccctacaatatacacattcctaattcaggctcaactctcctttacccaagagtaaatgcctcaggactcaatctgaatcactgtccgtctcggcttctttcacatccatgctgaatttgtactcctggtcacatcccatgtaagcatcactcatgaagtatagagtgtagttgtgggcaccagtggctggagccacaaagtccaacttcaccttggccttctgctgcaggatcagcctcttgatggagatgaggctattggacttggtgtctccaatcaccacccaccagccctcttcacgtttctgcgggaagagaggcgcaatgacagggcctgtgacttcctcctctcgctccagctgcaccagcacatccgtactggcccgccactgcggatgctgtccttatccaccacctcctaagatagttcgatattagggtagcagttacaaaagcgagccacatctgtaatctggctgtcagtcagctgaagaattgtgttccgttcttcatcctccatctccatgatgtcgaaaacactcttcactcccttgtctgtgcaacgtttgatatgctcagagatgaagtgtggcagctgcttcaggtatgagtccttggaccacatggcttgggtgaccatctgggccaattccatagctgccagagcagagctgagccacccattgctggagaggacatccacgcaggcctggacgagccggactgccttactaaggatttcctccgtatctgactgcaactcagcactcagctgcatgcgggacaggtgagcctgcaggagcaggttggtcttgatgtgcggatcattgaacttagggttattcagcttgtcagggaccttctgagccaactgcctcaggaagttttcttcatggtgctggatggggatattctcgtaccctgctgcattggagatgatctcaataagccctcgcaccttggtcttggcgttgtgagattttaaaagtcaccagattagtttcaaatgaacagccttgagaatcttagaatatcttgagggtaagttaacgggtgtcattgtaggaggtgatagagaagtaggccaaacccaccaccatgctctgggcctaatacagtcttttcctattgaaaagtgacggttggggaagaaaaaaaatctcggcctgtttctgttactgtagtagctagcacttatgaattggcaaagtttcagagaccctccctcccctatgtcagatactacaataccatacaggattaaaggtgtaatatgcagatcaagacctagagattaaatacagacttcaggtaggctgctgcttggaatacttattatttttatacttattttttaatatatttccaggaagaggaagatcaaaacgttgtaccagaaactacctctgaaggctacactttccaagttcaggatggggctcctgggacctttaacttttagatcatgtagctgagacataaatttgttgtgtactacgtttggtattttgtcttattgtttctctactaagaactctttcttaaatgtggtttgttactgtagcactttttacactgaaactatacttgaacagttccaactgtacatacatactgtatgaagcttgtcctctgactaggtttctaatttctatgtggaatttcctatcttgcagcatcctgtaaataaacattcaagtccacccttttcttgacttcaccatgcctatgtgttgctttctaatttggggcctttaatgttgctagtgaaaggtaacctgtccaaactgatgggattaaccagaggtagtcctggctgcagtttttgcagaagaatgaataacattttctggaaaccctcagccagtgtctccttaagtctccttggccagggagatgggctaaataccgtaaatttaatcataaatctctgctggagctacaaatggaattctttcctcccaaacttcaaggctgaatggggttccaaggtaaatcacggctgcacatgggcctcacctgggaatgtacccagttctgtttcgttgatgaggggcatgagggtccaccttgtgtcttttttaaaaatgtaattcccaagggctcttgtacaatatagattgatcaccactattctttttgagatggagtctcgctctgtcacccaggcgaaacccgtgtctctagtaaaaatacaaacaattagctgggattacaggcatggtggtgggagcctgtaatcccagctactcaggaggctgagtgcaggagaatcgcttgaactccggaggttggaggttgcagtgaggctgagaatggcgccactgcagatcccagccttggtgacgagaagcgaaaacacttggtctaacaaaaaaaatccccctgtggcataagtatatcattaccctaataacttctgacgagtcaggataagggaacaaggaaggaaagcaaagggagcaggcaaaccgggtaattacgttcccgaaatagccaattgagagcaaagtcacattagatacgaaaactggctgacagccctaaacatgtagccatgcgtcgcaacagtaacatctgcacgaaacaagtcaccagtaaaacgaaattgatccaggggctgacagagaagacacacaacgaagacacaaagggacggagcggccggcaaacaaatcaccatcaaagggggccaccaggtcagtggcgaccacccagcaacatcagag

SEQ ID NO: 310308 - DNA, 2470 bp, Homo sapiens
  misc_feature (2238)..(2238): n is a, c, g, or t
  misc_feature (2284)..(2284): n is a, c, g, or t
ggggaaatttaaatcgcgccggccggctgcacgagccacacggtctttgagctgagtcgaggtggaccctttgaacgcagtcgccctacagccgctgattccccccgcatcgcctcccgtggaagcccaggcccgcttcgcagctttctccctttgtctcataaccatgtccaccaacgagaatgctaatacaccagctgcccgtcttcacagattcaagaacaagggaaaagacagtacagaaatgaggcgtcgcagaatagaggtcaatgtggagctgaggaaagctaagaaggatgaccagatgctgaagaggagaaatgtaagctcatttcctgatgatgctacttctccgctgcaggaaaaccgcaacaaccagggcactgtaaattggtctgttgatgacattgtcaaaggcataaatagcagcaatgtggaaaatcagctccaagctactcaagctgccaggaaactactttccagagaaaaacagccccccatagacaacataatccgggctggtttgattccgaaatttgtgtccttcttgggcagaactgattgtagtcccattcagtttgaatctgcttgggcactcactaacattgcttctgggacatcagaacaaaccaaggctgtggtagatggaggtgccatcccagcattcatttctctgttggcatctccccatgctcacatcagtgaacaagctgtctgggctctaggaaacattgcaggtgatggctcagtgttccgagacttggttattaagtacggtgcagttgacccactgttggctctccttgcagttcctgatatgtcatctttagcatgtggctacttacgtaatcttacctggacactttctaatctttgccgcaacaagaatcctgcacccccgatagatgctgttgagcagattcttcctaccttagttcggctcctgcatcatgatgatccagaagtgttagcagatacctgctgggctatttcctaccttactgatggtccaaatgaacgaattggcatggtggtgaaaacaggagttgtgccccaacttgtgaagcttctaggagcttctgaattgccaattgtgactcctgccctaagagccatagggaatattgtcactggtacagatgaacagactcaggttgtgattgatgcaggagcactcgccgtctttcccagcctgctcaccaaccccaaaactaacattcagaaggaagctacgtggacaatgtcaaacatcacagccggccgccaggaccagatacagcaagttgtgaatcatggattagtcccattccttgtcagtgttctctctaaggcagattttaagacacaaaaggaagctgtgtgggccgtgaccaactataccagtggtggaacagttgaacagattgtgtaccttgttcactgtggcataatagaaccgttgatgaacctcttaactgcaaaagataccaagattattctggttatcctggatgccatttcaaatatctttcaggctgctgagaaactaggtgaaactgagaaacttagtataatgattgaagaatgtggaggcttagacaaaattgaagctctacaaaaccatgaaaatgagtctgtatataaggcttcattaagcttaactgagaagtatttctctgtaggtgtggcagctgcttcaggtatgagtccttggaccacatggcttgggtgaccatctgggccaattccatagctgccagagcagagctgagccacccattgctggagaggacatccacgcaggcctggacgagccggactgccttactaaggatttcctccgtatctgactgcaactcagcactcagctgcatgcgggacagaggaagaggaagatcaaaacgttgtaccagaaactacctctgaaggctacactttccaagttcaggatggggctcctgggacctttaacttttagatcatgtagctgagacataaatttgttgtgtactacgtttggtattttgtcttattgtttctctactaagaactctttcttaaatgtggtttgttactgtagcactttttacactgaaactatacttgaacagttccaactgtacatacatactgtatgaagcttgtcctctgactaggtttctaatttctatgtggaatttcctatcttgcagcatcctgtaaataaacattcaagtccacccttttcttgacttcaccatgaaaaaaaaaaaaaaaaanaaaaaaaaaaaaaaaaaaaaaagagggggggggaaaaaaaaataanaaaaaaaaaaaaaacaaagaaaaacagaaaaaacaaaacaaaaaacacaaacgaagaacaaaaaaacaaatcatagaaagagagggcggggcgcatcacaaaatgccacgactcgcagcgcgcgacacaacaacaagacaccaacaccctatttagagactagaagacccaccacgagagcggcac

SEQ ID NO: 310309 - DNA, 4371 bp, Homo sapiens
ggggaaatttaaatcgcgccggccggctgcacgagccacacggtctttgagctgagtcgaggtggaccctttgaacgcagtcgccctacagccgctgattccccccgcatcgcctcccgtggaagcccaggcccgcttcgcagctttctccctttgtctcataaccatgtccaccaacgagaatgctaatacaccagctgcccgtcttcacagattcaagaacaagggaaaagacagtacagaaatgaggcgtcgcagaatagaggtcaatgtggagctgaggaaagctaagaaggatgaccagatgctgaagaggagaaatgtaagctcatttcctgatgatgctacttctccgctgcaggaaaaccgcaacaaccagggcactgtaaattggtctgttgatgacattgtcaaaggcataaatagcagcaatgtggaaaatcagctccaagctactcaagctgccaggaaactactttccagagaaaaacagccccccatagacaacataatccgggctggtttgattccgaaatttgtgtccttcttgggcagaactgattgtagtcccattcagtttgaatctgcttgggcactcactaacattgcttctgggacatcagaacaaaccaaggctgtggtagatggaggtgccatcccagcattcatttctctgttggcatctccccatgctcacatcagtgaacaagctgtctgggctctaggaaacattgcaggtgatggctcagtgttccgagacttggttattaagtacggtgcagttgacccactgttggctctccttgcagttcctgatatgtcatctttagcatgtggctacttacgtaatcttacctggacactttctaatctttgccgcaacaagaatcctgcacccccgatagatgctgttgagcagattcttcctaccttagttcggctcctgcatcatgatgatccagaagtgttagcagatacctgctgggctatttcctaccttactgatggtccaaatgaacgaattggcatggtggtgaaaacaggagttgtgccccaacttgtgaagcttctaggagcttctgaattgccaattgtgactcctgccctaagagccatagggaatattgtcactggtacagatgaacagactcaggttgtgattgatgcaggagcactcgccgtctttcccagcctgctcaccaaccccaaaactaacattcagaaggaagctacgtggacaatgtcaaacatcacagccggccgccaggaccagatacagcaagttgtgaatcatggattagtcccattccttgtcagtgttctctctaaggcagattttaagacacaaaaggaagctgtgtgggccgtgaccaactataccagtggtggaacagttgaacagattgtgtaccttgttcactgtggcataatagaaccgttgatgaacctcttaactgcaaaagataccaagattattctggttatcctggatgccatttcaaatatctttcaggctgctgagaaactaggtgaaactgagaaacttagtataatgattgaagaatgtggaggcttagacaaaattgaagctctacaaaaccatgaaaatgagtctgtatataaggcttcattaagcttaactgagaagtatttctctgtagaggtgagtaatggatggtaatattaataacaacttggaaaaatgtaaagccaaggccatgagcccttttttccctcatacttttaaaaatgagcctcatatctttgttaaatatagtaaaatatcagtgtgcataggacgtaatgtacttattgcccctctgatgtttggcttgatggtaataaaatctatttatttatttatttagctttggtttctacaaattattttattagaatgtcagactcaaaaggaactaccagtaacatgcctgaacatgctatatatgatttatgcttgacccgtgacacctgctgtcactggatccagagtgtgaacaagggaaaaggacagtggatgtgggcagggacagcaccagccctggctggccagacctcaggcccacagacgtggtccccataaccaccaggatccctacaatatacacattcctaattcaggctcaactctcctttacccaagagtaaatgcctcaggactcaatctgaatcactgtccgtctcggcttctttcacatccatgctgaatttgtactcctggtcacatcccatgtaagcatcactcatgaagtatagagtgtagttgtgggcaccagtggctggagccacaaagtccaacttcaccttggccttctgctgcaggatcagcctcttgatggagatgaggctattggacttggtgtctccaatcaccacccaccagccctcttcacgtttctgcgggaagagaggcgcaatgacagggcctgtgacttcctcctctcgctccagctgcaccagcacatccgtactggcccgccactgcggatgctgtccttatccaccacctcctaagatagttcgatattagggtagcagttacaaaagcgagccacatctgtaatctggctgtcagtcagctgaagaattgtgttccgttcttcatcctccatctccatgatgtcgaaaacactcttcactcccttgtctgtgcaacgtttgatatgctcagagatgaagtgtggcagctgcttcaggtatgagtccttggaccacatggcttgggtgaccatctgggccaattccatagctgccagagcagagctgagccacccattgctggagaggacatccacgcaggcctggacgagccggactgccttactaaggatttcctccgtatctgactgcaactcagcactcagctgcatgcgggacaggtgagcctgcaggagcaggttggtcttgatgtgcggatcattgaacttagggttattcagcttgtcagggaccttctgagccaactgcctcaggaagttttcttcatggtgctggatggggatattctcgtaccctgctgcattggagatgatctcaataagccctcgcaccttggtcttggcgttgaagttcaggatggggctcctgggacctttaacttttagatcatgtagctgagacataaatttgttgtgtactacgtttggtattttgtcttattgtttctctactaagaactctttcttaaatgtggtttgttactgtagcactttttacactgaaactatacttgaacagttccaactgtacatacatactgtatgaagcttgtcctctgactaggtttctaatttctatgtggaatttcctatcttgcagcatcctgtaaataaacattcaagtccacccttttcttgacttcaccatgcctatgtgttgctttctaatttggggcctttaatgttgctagtgaaaggtaacctgtccaaactgatgggattaaccagaggtagtcctggctgcagtttttgcagaagaatgaataacattttctggaaaccctcagccagtgtctccttaagtctccttggccagggagatgggctaaataccgtaaatttaatcataaatctctgctggagctacaaatggaattctttcctcccaaacttcaaggctgaatggggttccaaggtaaatcacggctgcacatgggcctcacctgggaatgtacccagttctgtttcgttgatgaggggcatgagggtccaccttgtgtcttttttaaaaatgtaattcccaagggctcttgtacaatatagattgatcaccactattctttttgagatggagtctcgctctgtcacccaggcgaaacccgtgtctctagtaaaaatacaaacaattagctgggattacaggcatggtggtgggagcctgtaatcccagctactcaggaggctgagtgcaggagaatcgcttgaactccggaggttggaggttgcagtgaggctgagaatggcgccactgcagatcccagccttggtgacgagaagcgaaaacacttggtctaacaaaaaaaatccccctgtggcataagtatatcattaccctaataacttctgacgagtcaggataagggaacaaggaaggaaagcaaagggagcaggcaaaccgggtaattacgttcccgaaatagccaattgagagcaaagtcacattagatacgaaaactggctgacagccctaaacatgtagccatgcgtcgcaacagtaacatctgcacgaaacaagtcaccagtaaaacgaaattgatccaggggctgacagagaagacacacaacgaagacacaaagggacggagcggccggcaaacaaatcaccatcaaagggggccaccaggtcagtggcgaccacccagcaacatcagag

SEQ ID NO: 310310 - DNA, 3023 bp, Homo sapiens; identical to SEQ ID NO: 310292

SEQ ID NO: 310311 - DNA, 1791 bp, Homo sapiens
ggggaaatttaaatcgcgccggccggctgcacgagccacacggtctttgagctgagtcgaggtggaccctttgaacgcagtcgccctacagccgctgattccccccgcatcgcctcccgtggaagcccaggcccgcttcgcagctttctccctttgtctcataaccatgtccaccaacgagaatgctaatacaccagctgcccgtcttcacagattcaagaacaagggaaaagacagtacagaaatgaggcgtcgcagaatagaggtcaatgtggagctgaggaaagctaagaaggatgaccagatgctgaagaggagaaatgtaagctcatttcctgatgatgctacttctccgctgcaggaaaaccgcaacaaccagggcactgtaaattggtctgttgatgacattgtcaaaggcataaatagcagcaatgtggaaaatcagctccaagctactcaagctgccaggaaactactttccagagaaaaacagccccccatagacaacataatccgggctggtttgattccgaaatttgtgtccttcttgggcagaactgattgtagtcccattcagtttgaatctgcttgggcactcactaacattgcttctgggacatcagaacaaaccaaggctgtggtagatggaggtgccatcccagcattcatttctctgttggcatctccccatgctcacatcagtgaacaagctgtctgggctctaggaaacattgcaggtgatggctcagtgttccgagacttggttattaagtacggtgcagttgacccactgttggctctccttgcagttcctgatatgtcatctttagcatgtggctacttacgtaatcttacctggacactttctaatctttgccgcaacaagaatcctgcacccccgatagatgctgttgagcagattcttcctaccttagttcggctcctgcatcatgatgatccagaagtgttagcagatacctgctgggctatttcctaccttactgatggtccaaatgaacgaattggcatggtggtgaaaacaggagttgtgccccaacttgtgaagcttctaggagcttctgaattgccaattgtgactcctgccctaagagccatagggaatattgtcactggtacagatgaacagactcaggttgtgattgatgcaggagcactcgccgtctttcccagcctgctcaccaaccccaaaactaacattcagaaggaagctacgtggacaatgtcaaacatcacagccggccgccaggaccagatacagcaagttgtgaatcatggattagtcccattccttgtcagtgttctctctaaggcagattttaagacacaaaaggaagctgtgtgggccgtgaccaactataccagtggtggaacagttgaacagattgtgtaccttgttcactgtggcataatagaaccgttgatgaacctcttaactgcaaaagataccaagattattctggttatcctggatgccatttcaaatatctttcaggctgctgagaaactaggtgaaactgagaaacttagtataatgattgaagaatgtggaggcttagacaaaattgaagctctacaaaaccatgaaaatgagtctgtgtataaggcttcgttaagcttaattgagaagtatttctctgtagaggaagaggaagatcaaaacgttgtaccagaaactacctctgaaggctacactttccaagttcaggatggggctcctgggacctttaacttttagatcatgtagctgagacataaatttgttgtgtacta

SEQ ID NO: 310312 - DNA, 3784 bp, Homo sapiens
ggggaaatttaaatcgcgccggccggctgcacgagccacacggtctttgagctgagtcgaggtggaccctttgaacgcagtcgccctacagccgctgattccccccgcatcgcctcccgtggaagcccaggcccgcttcgcagctttctccctttgtctcataaccatgtccaccaacgagaatgctaatacaccagctgcccgtcttcacagattcaagaacaagggaaaagacagtacagaaatgaggcgtcgcagaatagaggtcaatgtggagctgaggaaagctaagaaggatgaccagatgctgaagaggagaaatgtaagctcatttcctgatgatgctacttctccgctgcaggaaaaccgcaacaaccagggcactgtaaattggtctgttgatgacattgtcaaaggcataaatagcagcaatgtggaaaatcagctccaagctactcaagctgccaggaaactactttccagagaaaaacagccccccatagacaacataatccgggctggtttgattccgaaatttgtgtccttcttgggcagaactgattgtagtcccattcagtttgaatctgcttgggcactcactaacattgcttctgggacatcagaacaaaccaaggctgtggtagatggaggtgccatcccagcattcatttctctgttggcatctccccatgctcacatcagtgaacaagctgtctgggctctaggaaacattgcaggtgatggctcagtgttccgagacttggttattaagtacggtgcagttgacccactgttggctctccttgcagttcctgatatgtcatctttagcatgtggctacttacgtaatcttacctggacactttctaatctttgccgcaacaagaatcctgcacccccgatagatgctgttgagcagattcttcctaccttagttcggctcctgcatcatgatgatccagaagtgttagcagatacctgctgggctatttcctaccttactgatggtccaaatgaacgaattggcatggtggtgaaaacaggagttgtgccccaacttgtgaagcttctaggagcttctgaattgccaattgtgactcctgccctaagagccatagggaatattgtcactggtacagatgaacagactcaggttgtgattgatgcaggagcactcgccgtctttcccagcctgctcaccaaccccaaaactaacattcagaaggaagctacgtggacaatgtcaaacatcacagccggccgccaggaccagatacagcaagttgtgaatcatggattagtcccattccttgtcagtgttctctctaaggcagattttaagacacaaaaggaagctgtgtgggccgtgaccaactataccagtggtggaacagttgaacagattgtgtaccttgttcactgtggcataatagaaccgttgatgaacctcttaactgcaaaagataccaagattattctggttatcctggatgccatttcaaatatctttcaggctgctgagaaactaggtgaaactgagaaacttagtataatgattgaagaatgtggaggcttagacaaaattgaagctctacaaaaccatgaaaatgagtctgtatataaggcttcattaagcttaactgagaagtatttctctgtagaggtgagtaatggatggtaatattaataacaacttggaaaaatgtaaagccaaggccatgagcccttttttccctcatacttttaaaaatgagcctcatatctttgttaaatatagtaaaatatcagtgtgcataggacgtaatgtacttattgcccctctgatgtttggcttgatggtaataaaatctatttatttatttatttagctttggtttctacaaattattttattagaatgtcagactcaaaaggaactaccagtaacatgcctgaacatgctatatatgatttatgcttgacccgtgacacctgctgtcactggatccagagtgtgaacaagggaaaaggacagtggatgtgggcagggacagcaccagccctggctggccagacctcaggcccacagacgtggtccccataaccaccaggatccctacaatatacacattcctaattcaggctcaactctcctttacccaagagtaaatgcctcaggactcaatctgaatcactgtccgtctcggcttctttcacatccatgctgaatttgtactcctggtcacatcccatgtaagcatcactcatgaagtatagagtgtagttgtgggcaccagtggctggagccacaaagtccaacttcaccttggccttctgctgcaggatcagcctcttgatggagatgaggctattggacttggtgtctccaatcaccacccaccagccctcttcacgtttctgcgggaagagaggcgcaatgacagggcctgtgacttcctcctctcgctccagctgcaccagcacatccgtactggcccgccactgcggatgctgtccttatccaccacctcctaagatagttcgatattagggtagcagttacaaaagcgagccacatctgtaatctggctgtcagtcagctgaagaattgtgttccgttcttcatcctccatctccatgatgtcgaaaacactcttcactcccttgtctgtgcaacgtttgatatgctcagagatgaagtgtggcagctgcttcaggtatgagtccttggaccacatggcttgggtgaccatctgggccaattccatagctgccagagcagagctgagccacccattgctggagaggacatccacgcaggcctggacgagccggactgccttactaaggatttcctccgtatctgactgcaactcagcactcagctgcatgcgggacaggtgagcctgcaggagcaggttggtcttgatgtgcggatcattgaacttagggttattcagcttgtcagggaccttctgagccaactgcctcaggaagttttcttcatggtgctggatggggatattctcgtaccctgctgcattggagatgatctcaataagccctcgcaccttggtcttggcgttgtgagattttaaaagtcaccagattagtttcaaatgaacagccttgagaatcttagaatatcttgagggtaagttaacgggtgtcattgtaggaggtgatagagaagtaggccaaacccaccaccatgctctgggcctaatacagtcttttcctattgaaaagtgacggttggggaagaaaaaaaatctcggcctgtttctgttactgtagtagctagcacttatgaattggcaaagtttcagagaccctccctcccctatgtcagatactacaataccatacaggattaaaggtgtaatatgcagatcaagacctagagattaaatacagacttcaggtaggctgctgcttggaatacttattatttttatacttattttttaatatatttccaggaagaggaagatcaaaacgttgtaccagaaactacctctgaaggctacactttccaagttcaggatggggctcctgggacctttaacttttagatcatgtagctgagacataaatttgttgtgtactacgtttggtattttgtcttattgtttctctactaagaactctttcttaaatgtggtttgttactgtagcactttttacactgaaactatacttgaacagttccaactgtacatacatacaggatgctgcaagataggaaattccacatagaaattagaaacctagtcagaggacaagcttcatacagtgtcgacgc

SEQ ID NO: 310313 - DNA, 3822 bp, Homo sapiens
  misc_feature (3815)..(3815): n is a, c, g, or t
ggggaaatttaaatcgcgccggccggctgcacgagccacacggtctttgagctgagtcgaggtggaccctttgaacgcagtcgccctacagccgctgattccccccgcatcgcctcccgtggaagcccaggcccgcttcgcagctttctccctttgtctcataaccatgtccaccaacgagaatgctaatacaccagctgcccgtcttcacagattcaagaacaagggaaaagacagtacagaaatgaggcgtcgcagaatagaggtcaatgtggagctgaggaaagctaagaaggatgaccagatgctgaagaggagaaatgtaagctcatttcctgatgatgctacttctccgctgcaggaaaaccgcaacaaccagggcactgtaaattggtctgttgatgacattgtcaaaggcataaatagcagcaatgtggaaaatcagctccaagctactcaagctgccaggaaactactttccagagaaaaacagccccccatagacaacataatccgggctggtttgattccgaaatttgtgtccttcttgggcagaactgattgtagtcccattcagtttgaatctgcttgggcactcactaacattgcttctgggacatcagaacaaaccaaggctgtggtagatggaggtgccatcccagcattcatttctctgttggcatctccccatgctcacatcagtgaacaagctgtctgggctctaggaaacattgcaggtgatggctcagtgttccgagacttggttattaagtacggtgcagttgacccactgttggctctccttgcagttcctgatatgtcatctttagcatgtggctacttacgtaatcttacctggacactttctaatctttgccgcaacaagaatcctgcacccccgatagatgctgttgagcagattcttcctaccttagttcggctcctgcatcatgatgatccagaagtgttagcagatacctgctgggctatttcctaccttactgatggtccaaatgaacgaattggcatggtggtgaaaacaggagttgtgccccaacttgtgaagcttctaggagcttctgaattgccaattgtgactcctgccctaagagccatagggaatattgtcactggtacagatgaacagactcaggttgtgattgatgcaggagcactcgccgtctttcccagcctgctcaccaaccccaaaactaacattcagaaggaagctacgtggacaatgtcaaacatcacagccggccgccaggaccagatacagcaagttgtgaatcatggattagtcccattccttgtcagtgttctctctaaggcagattttaagacacaaaaggaagctgtgtgggccgtgaccaactataccagtggtggaacagttgaacagattgtgtaccttgttcactgtggcataatagaaccgttgatgaacctcttaactgcaaaagataccaagattattctggttatcctggatgccatttcaaatatctttcaggctgctgagaaactaggtgaaactgagaaacttagtataatgattgaagaatgtggaggcttagacaaaattgaagctctacaaaaccatgaaaatgagtctgtatataaggcttcattaagcttaactgagaagtatttctctgtagaggtgagtaatggatggtaatattaataacaacttggaaaaatgtaaagccaaggccatgagcccttttttccctcatacttttaaaaatgagcctcatatctttgttaaatatagtaaaatatcagtgtgcataggacgtaatgtacttattgcccctctgatgtttggcttgatggtaataaaatctatttatttatttatttagctttggtttctacaaattattttattagaatgtcagactcaaaaggaactaccagtaacatgcctgaacatgctatatatgatttatgcttgacccgtgacacctgctgtcactggatccagagtgtgaacaagggaaaaggacagtggatgtgggcagggacagcaccagccctggctggccagacctcaggcccacagacgtggtccccataaccaccaggatccctacaatatacacattcctaattcaggctcaactctcctttacccaagagtaaatgcctcaggactcaatctgaatcactgtccgtctcggcttctttcacatccatgctgaatttgtactcctggtcacatcccatgtaagcatcactcatgaagtatagagtgtagttgtgggcaccagtggctggagccacaaagtccaacttcaccttggccttctgctgcaggatcagcctcttgatggagatgaggctattggacttggtgtctccaatcaccacccaccagccctcttcacgtttctgcgggaagagaggcgcaatgacagggcctgtgacttcctcctctcgctccagctgcaccagcacatccgtactggcccgccactgcggatgctgtccttatccaccacctcctaagatagttcgatattagggtagcagttacaaaagcgagccacatctgtaatctggctgtcagtcagctgaagaattgtgttccgttcttcatcctccatctccatgatgtcgaaaacactcttcactcccttgtctgtgcaacgtttgatatgctcagagatgaagtgtggcagctgcttcaggtatgagtccttggaccacatggcttgggtgaccatctgggccaattccatagctgccagagcagagctgagccacccattgctggagaggacatccacgcaggcctggacgagccggactgccttactaaggatttcctccgtatctgactgcaactcagcactcagctgcatgcgggacaggtgagcctgcaggagcaggttggtcttgatgtgcggatcattgaacttagggttattcagcttgtcagggaccttctgagccaactgcctcaggaagttttcttcatggtgctggatggggatattctcgtaccctgctgcattggagatgatctcaataagccctcgcaccttggtcttggcgttgtgagattttaaaagtcaccagattagtttcaaatgaacagccttgagaatcttagaatatcttgagggtaagttaacgggtgtcattgtaggaggtgatagagaagtaggccaaacccaccaccatgctctgggcctaatacagtcttttcctattgaaaagtgacggttggggaagaaaaaaaatctcggcctgtttctgttactgtagtagctagcacttatgaattggcaaagtttcagagaccctccctcccctatgtcagatactacaataccatacaggattaaaggtgtaatatgcagatcaagacctagagattaaatacagacttcaggtaggctgctgcttggaatacttattatttttatacttattttttaatatatttccaggaagaggaagatcaaaacgttgtaccagaaactacctctgaaggctacactttccaagttcaggatggggctcctgggacctttaacttttagatcatgtagctgagacataaatttgttgtgtactacgtttggtattttgtcttattgtttctctactaagaactctttcttagctataccaccacaccagtcagaatgggtattattaaaaagtcaaaaaaataacagatgctgatgaggttgtggagaaacaggaacgcttctacactgttggtgggaatgtaaattagttccagtattgcagaagacagtgcgcgattccactagcctagtgtatagctgatcccctcngtataag

SEQ ID NO: 310314 - DNA, 3196 bp, Homo sapiens
ggggaaatttaaatcgcgccggccggctgcacgagccacacggtctttgagctgagtcgaggtggaccctttgaacgcagtcgccctacagccgctgattccccccgcatcgcctcccgtggaagcccaggcccgcttcgcagctttctccctttgtctcataaccatgtccaccaacgagaatgctaatacaccagctgcccgtcttcacagattcaagaacaagggaaaagacagtacagaaatgaggcgtcgcagaatagaggtcaatgtggagctgaggaaagctaagaaggatgaccagatgctgaagaggagaaatgtaagctcatttcctgatgatgctacttctccgctgcaggaaaaccgcaacaaccagggcactgtaaattggtctgttgatgacattgtcaaaggcataaatagcagcaatgtggaaaatcagctccaagctactcaagctgccaggaaactactttccagagaaaaacagccccccatagacaacataatccgggctggtttgattccgaaatttgtgtccttcttgggcagaactgattgtagtcccattcagtttgaatctgcttgggcactcactaacattgcttctgggacatcagaacaaaccaaggctgtggtagatggaggtgccatcccagcattcatttctctgttggcatctccccatgctcacatcagtgaacaagctgtctgggctctaggaaacattgcaggtgatggctcagtgttccgagacttggttattaagtacggtgcagttgacccactgttggctctccttgcagttcctgatatgtcatctttagcatgtggctacttacgtaatcttacctggacactttctaatctttgccgcaacaagaatcctgcacccccgatagatgctgttgagcagattcttcctaccttagttcggctcctgcatcatgatgatccagaagtgttagcagatacctgctgggctatttcctaccttactgatggtccaaatgaacgaattggcatggtggtgaaaacaggagttgtgccccaacttgtgaagcttctaggagcttctgaattgccaattgtgactcctgccctaagagccatagggaatattgtcactggtacagatgaacagactcaggttgtgattgatgcaggagcactcgccgtctttcccagcctgctcaccaaccccaaaactaacattcagaaggaagctacgtggacaatgtcaaacatcacagccggccgccaggaccagatacagcaagttgtgaatcatggattagtcccattccttgtcagtgttctctctaaggcagattttaagacacaaaaggaagctgtgtgggccgtgaccaactataccagtggtggaacagttgaacagattgtgtaccttgttcactgtggcataatagaaccgttgatgaacctcttaactgcaaaagataccaagattattctggttatcctggatgccatttcaaatatctttcaggctgctgagaaactaggtgaaactgagaaacttagtataatgattgaagaatgtggaggcttagacaaaattgaagctctacaaaaccatgaaaatgagtctgtatataaggcttcattaagcttaactgagaagtatttctctgtagaggtgagtaatggatggtaatattaataacaacttggaaaaatgtaaagccaaggccatgagcccttttttccctcatacttttaaaaatgagcctcatatctttgttaaatatagtaaaatatcagtgtgcataggacgtaatgtacttattgcccctctgatgtttggcttgatggtaataaaatctatttatttatttatttagctttggtttctacaaattattttattagaatgtcagactcaaaaggaactaccagtaacatgcctgaacatgctatatatgatttatgcttgacccgtgacacctgctgtcactggatccagagtgtgaacaagggaaaaggacagtggatgtgggcagggacagcaccagccctggctggccagacctcaggcccacagacgtggtccccataaccaccaggatccctacaatatacacattcctaattcaggctcaactctcctttacccaagagtaaatgcctcaggactcaatctgaatcactgtccgtctcggcttctttcacatccatgctgaatttgtactcctggtcacatcccatgtaagcatcactcatgaagtatagagtgtagttgtgggcaccagtggctggagccacaaagtccaacttcaccttggccttctgctgcaggatcagcctcttgatggagatgaggctattggacttggtgtctccaatcaccacccaccagccctcttcacgtttctgcgggaagagaggcgcaatgacagggcctgtgacttcctcctctcgctccagctgcaccagcacatccgtactggcccgccactgcggatgctgtccttatccaccacctcctaagatagttcgatattagggtagcagttacaaaagcgagccacatctgtaatctggctgtcagtcagctgaagaattgtgttccgttcttcatcctccatctccatgatgtcgaaaacactcttcactcccttgtctgtgcaacgtttgatatgctcagagatgaagtgtggcagctgcttcaggtatgagtccttggaccacatggcttgggtgaccatctgggccaattccatagctgccagagcagagctgagccacccattgctggagaggacatccacgcaggcctggacgagccggactgccttactaaggatttcctccgtatctgactgcaactcagcactcagctgcatgcgggacaggtgagcctgcaggagcaggttggtcttgatgtgcggatcattgaacttagggttattcagcttgtcagggaccttctgagccaactgcctcaggaagttttcttcatggtgctggatggggatattctcgtaccctgctgcattggagatgatctcaataagccctcgcaccttggtcttggcgttgaggaagaggaagatcaaaacgttgtaccagaaactacctctgaaggctacactttccaagttcaggatggggctcctgggacctttaacttttagatcatgtagctgagacataaatttgttgtgtacta

SEQ ID NO: 310315 - DNA, 1891 bp, Homo sapiens
ggggaaatttaaatcgcgccggccggctgcacgagccacacggtctttgagctgagtcgaggtggaccctttgaacgcagtcgccctacagccgctgattccccccgcatcgcctcccgtggaagcccaggcccgcttcgcagctttctccctttgtctcataaccatgtccaccaacgagaatgctaatacaccagctgcccgtcttcacagattcaagaacaagggaaaagacagtacagaaatgaggcgtcgcagaatagaggtcaatgtggagctgaggaaagctaagaaggatgaccagatgctgaagaggagaaatgtaagctcatttcctgatgatgctacttctccgctgcaggaaaaccgcaacaaccagggcactgtaaattggtctgttgatgacattgtcaaaggcataaatagcagcaatgtggaaaatcagctccaagctactcaagctgccaggaaactactttccagagaaaaacagccccccatagacaacataatccgggctggtttgattccgaaatttgtgtccttcttgggcagaactgattgtagtcccattcagtttgaatctgcttgggcactcactaacattgcttctgggacatcagaacaaaccaaggctgtggtagatggaggtgccatcccagcattcatttctctgttggcatctccccatgctcacatcagtgaacaagctgtctgggctctaggaaacattgcaggtgatggctcagtgttccgagacttggttattaagtacggtgcagttgacccactgttggctctccttgcagttcctgatatgtcatctttagcatgtggctacttacgtaatcttacctggacactttctaatctttgccgcaacaagaatcctgcacccccgatagatgctgttgagcagattcttcctaccttagttcggctcctgcatcatgatgatccagaagtgttagcagatacctgctgggctatttcctaccttactgatggtccaaatgaacgaattggcatggtggtgaaaacaggagttgtgccccaacttgtgaagcttctaggagcttctgaattgccaattgtgactcctgccctaagagccatagggaatattgtcactggtacagatgaacagactcaggttgtgattgatgcaggagcactcgccgtctttcccagcctgctcaccaaccccaaaactaacattcagaaggaagctacgtggacaatgtcaaacatcacagccggccgccaggaccagatacagcaagttgtgaatcatggattagtcccattccttgtcagtgttctctctaaggcagattttaagacacaaaaggaagctgtgtgggccgtgaccaactataccagtggtggaacagttgaacagattgtgtaccttgttcactgtggcataatagaaccgttgatgaacctcttaactgcaaaagataccaagattattctggttatcctggatgccatttcaaatatctttcaggctgctgagaaactaggtgaaactgagaaacttagtataatgattgaagaatgtggaggcttagacaaaattgaagctctacaaaaccatgaaaatgagtctgtgtataaggcttcgttaagcttaattgagaagtatttctctgtagaggaagaggaagatcaaaacgttgtaccagaaactacctctgaaggctacactttccaagttcaggatggggctcctgggacctttaacttttagatcatgtagctgagacataaatttgttgtgtactacgtttggtattttgtcttattgtttctctactaagaactctttcttagggctgaaaataaaaatctgtctctcataaaaaaaatgctgactactttggga

SEQ ID NO: 310316 - DNA, 2062 bp, Homo sapiens
  misc_feature (1812)..(1812): n is a, c, g, or t
  misc_feature (1830)..(1830): n is a, c, g, or t
  misc_feature (1876)..(1876): n is a, c, g, or t
ggggaaatttaaatcgcgccggccggctgcacgagccacacggtctttgagctgagtcgaggtggaccctttgaacgcagtcgccctacagccgctgattccccccgcatcgcctcccgtggaagcccaggcccgcttcgcagctttctccctttgtctcataaccatgtccaccaacgagaatgctaatacaccagctgcccgtcttcacagattcaagaacaagggaaaagacagtacagaaatgaggcgtcgcagaatagaggtcaatgtggagctgaggaaagctaagaaggatgaccagatgctgaagaggagaaatgtaagctcatttcctgatgatgctacttctccgctgcaggaaaaccgcaacaaccagggcactgtaaattggtctgttgatgacattgtcaaaggcataaatagcagcaatgtggaaaatcagctccaagctactcaagctgccaggaaactactttccagagaaaaacagccccccatagacaacataatccgggctggtttgattccgaaatttgtgtccttcttgggcagaactgattgtagtcccattcagtttgaatctgcttgggcactcactaacattgcttctgggacatcagaacaaaccaaggctgtggtagatggaggtgccatcccagcattcatttctctgttggcatctccccatgctcacatcagtgaacaagctgtctgggctctaggaaacattgcaggtgatggctcagtgttccgagacttggttattaagtacggtgcagttgacccactgttggctctccttgcagttcctgatatgtcatctttagcatgtggctacttacgtaatcttacctggacactttctaatctttgccgcaacaagaatcctgcacccccgatagatgctgttgagcagattcttcctaccttagttcggctcctgcatcatgatgatccagaagtgttagcagatacctgctgggctatttcctaccttactgatggtccaaatgaacgaattggcatggtggtgaaaacaggagttgtgccccaacttgtgaagcttctaggagcttctgaattgccaattgtgactcctgccctaagagccatagggaatattgtcactggtacagatgaacagactcaggttgtgattgatgcaggagcactcgccgtctttcccagcctgctcaccaaccccaaaactaacattcagaaggaagctacgtggacaatgtcaaacatcacagccggccgccaggaccagatacagcaagttgtgaatcatggattagtcccattccttgtcagtgttctctctaaggcagattttaagacacaaaaggaagctgtgtgggccgtgaccaactataccagtggtggaacagttgaacagattgtgtaccttgttcactgtggcataatagaaccgttgatgaacctcttaactgcaaaagataccaagattattctggttatcctggatgccatttcaaatatctttcaggctgctgagaaactaggtgaaactgagaaacttagtataatgattgaagaatgtggaggcttagacaaaattgaagctctacaaaaccatgaaaatgagtctgtgtataaggcttcgttaagcttaattgagaagtatttctctgtagaggaagaggaagatcaaaacgttgtaccagaaactacctctgaaggctacactttccaagttcaggatggggctcctgggacctttaacttttagatcatgtagctgagacataaatttgttgtgtactaaaaaaaaaaaaaaaaaaaaanaaaaaaaaaaaaaaaaanaaaaaaaaaaaaaaaaaaaaaagagggggggggaaaaaaaaataanaaaaaaaaaaaaaacaaagaaaaacagaaaaaacaaaacaaaaaacacaaacgaagaacaaaaaaacaaatcatagaaagagagggcggggcgcatcacaaaatgccacgactcgcagcgcgcgacacaacaacaagacaccaacaccctatttagagactagaagacccaccacgagagcggcac

SEQ ID NO: 310317 - DNA, 1785 bp, Homo sapiens
ggggaaatttaaatcgcgccggccggctgcacgagccacacggtctttgagctgagtcgaggtggaccctttgaacgcagtcgccctacagccgctgattccccccgcatcgcctcccgtggaagcccaggcccgcttcgcagctttctccctttgtctcataaccatgtccaccaacgagaatgctaatacaccagctgcccgtcttcacagattcaagaacaagggaaaagacagtacagaaatgaggcgtcgcagaatagaggtcaatgtggagctgaggaaagctaagaaggatgaccagatgctgaagaggagaaatgtaagctcatttcctgatgatgctacttctccgctgcaggaaaaccgcaacaaccagggcactgtaaattggtctgttgatgacattgtcaaaggcataaatagcagcaatgtggaaaatcagctccaagctactcaagctgccaggaaactactttccagagaaaaacagccccccatagacaacataatccgggctggtttgattccgaaatttgtgtccttcttgggcagaactgattgtagtcccattcagtttgaatctgcttgggcactcactaacattgcttctgggacatcagaacaaaccaaggctgtggtagatggaggtgccatcccagcattcatttctctgttggcatctccccatgctcacatcagtgaacaagctgtctgggctctaggaaacattgcaggtgatggctcagtgttccgagacttggttattaagtacggtgcagttgacccactgttggctctccttgcagttcctgatatgtcatctttagcatgtggctacttacgtaatcttacctggacactttctaatctttgccgcaacaagaatcctgcacccccgatagatgctgttgagcagattcttcctaccttagttcggctcctgcatcatgatgatccagaagtgttagcagatacctgctgggctatttcctaccttactgatggtccaaatgaacgaattggcatggtggtgaaaacaggagttgtgccccaacttgtgaagcttctaggagcttctgaattgccaattgtgactcctgccctaagagccatagggaatattgtcactggtacagatgaacagactcaggttgtgattgatgcaggagcactcgccgtctttcccagcctgctcaccaaccccaaaactaacattcagaaggaagctacgtggacaatgtcaaacatcacagccggccgccaggaccagatacagcaagttgtgaatcatggattagtcccattccttgtcagtgttctctctaaggcagattttaagacacaaaaggaagctgtgtgggccgtgaccaactataccagtggtggaacagttgaacagattgtgtaccttgttcactgtggcataatagaaccgttgatgaacctcttaactgcaaaagataccaagattattctggttatcctggatgccatttcaaatatctttcaggctgctgagaaactaggtgaaactgagaaacttagtataatgattgaagaatgtggaggcttagacaaaattgaagctctacaaaaccatgaaaatgagtctgtgtataaggcttcgttaagcttaattgagaagtatttctctgtagaggaagaggaagatcaaaacgttgtaccagaaactacctctgaaggctacactttccaaaagttaaaggtccccaggagccccatcctgaacttggaaagtgtagccttcagaggtagtttctg

SEQ ID NO: 310318 - DNA, 1628 bp, Homo sapiens
ggggaaatttaaatcgcgccggccggctgcacgagccacacggtctttgagctgagtcgaggtggaccctttgaacgcagtcgccctacagccgctgattccccccgcatcgcctcccgtggaagcccaggcccgcttcgcagctttctccctttgtctcataaccatgtccaccaacgagaatgctaatacaccagctgcccgtcttcacagattcaagaacaagggaaaagacagtacagaaatgaggcgtcgcagaatagaggtcaatgtggagctgaggaaagctaagaaggatgaccagatgctgaagaggagaaatgtaagctcatttcctgatgatgctacttctccgctgcaggaaaaccgcaacaaccagggcactgtaaattggtctgttgatgacattgtcaaaggcataaatagcagcaatgtggaaaatcagctccaagctactcaagctgccaggaaactactttccagagaaaaacagccccccatagacaacataatccgggctggtttgattccgaaatttgtgtccttcttgggcagaactgattgtagtcccattcagtttgaatctgcttgggcactcactaacattgcttctgggacatcagaacaaaccaaggctgtggtagatggaggtgccatcccagcattcatttctctgttggcatctccccatgctcacatcagtgaacaagctgtctgggctctaggaaacattgcaggtgatggctcagtgttccgagacttggttattaagtacggtgcagttgacccactgttggctctccttgcagttcctgatatgtcatctttagcatgtggctacttacgtaatcttacctggacactttctaatctttgccgcaacaagaatcctgcacccccgatagatgctgttgagcagattcttcctaccttagttcggctcctgcatcatgatgatccagaagtgttagcagatacctgctgggctatttcctaccttactgatggtccaaatgaacgaattggcatggtggtgaaaacaggagttgtgccccaacttgtgaagcttctaggagcttctgaattgccaattgtgactcctgccctaagagccatagggaatattgtcactggtacagatgaacagactcaggttgtgattgatgcaggagcactcgccgtctttcccagcctgctcaccaaccccaaaactaacattcagaaggaagctacgtggacaatgtcaaacatcacagccggccgccaggaccagatacagcaagttgtgaatcatggattagtcccattccttgtcagcgatctctctaagattttgagacacaaaaggaagctgtatgggccgtggaacagttgaacagattgtgtaccttgttcactgtggcataatagaaccgttgatgaacctcttaactgcaaaagataccaagattattctggttatcctggatgccatttcaaatatctttcaggctgctgagaaactaggtgaaactgagaaacttagtataatgattgaagaatgtggaggcttagacaaaattgaagctctacaaaaccatgaaaatgagtctgtattaactgcttgggggtcctctagagtaagcccg

SEQ ID NO: 310319 - DNA, 2042 bp, Homo sapiens
  misc_feature (1856)..(1856): n is a, c, g, or t
ggggaaatttaaatcgcgccggccggctgcacgagccacacggtctttgagctgagtcgaggtggaccctttgaacgcagtcgccctacagccgctgattccccccgcatcgcctcccgtggaagcccaggcccgcttcgcagctttctccctttgtctcataaccatgtccaccaacgagaatgctaatacaccagctgcccgtcttcacagattcaagaacaagggaaaagacagtacagaaatgaggcgtcgcagaatagaggtcaatgtggagctgaggaaagctaagaaggatgaccagatgctgaagaggagaaatgtaagctcatttcctgatgatgctacttctccgctgcaggaaaaccgcaacaaccagggcactgtaaattggtctgttgatgacattgtcaaaggcataaatagcagcaatgtggaaaatcagctccaagctactcaagctgccaggaaactactttccagagaaaaacagccccccatagacaacataatccgggctggtttgattccgaaatttgtgtccttcttgggcagaactgattgtagtcccattcagtttgaatctgcttgggcactcactaacattgcttctgggacatcagaacaaaccaaggctgtggtagatggaggtgccatcccagcattcatttctctgttggcatctccccatgctcacatcagtgaacaagctgtctgggctctaggaaacattgcaggtgatggctcagtgttccgagacttggttattaagtacggtgcagttgacccactgttggctctccttgcagttcctgatatgtcatctttagcatgtggctacttacgtaatcttacctggacactttctaatctttgccgcaacaagaatcctgcacccccgatagatgctgttgagcagattcttcctaccttagttcggctcctgcatcatgatgatccagaagtgttagcagatacctgctgggctatttcctaccttactgatggtccaaatgaacgaattggcatggtggtgaaaacaggagttgtgccccaacttgtgaagcttctaggagcttctgaattgccaattgtgactcctgccctaagagccatagggaatattgtcactggtacagatgaacagactcaggttgtgattgatgcaggagcactcgccgtctttcccagcctgctcaccaaccccaaaactaacattcagaaggaagctacgtggacaatgtcaaacatcacagccggccgccaggaccagatacagcaagttgtgaatcatggattagtcccattccttgtcagcgatctctctaagattttgagacacaaaaggaagctgtatgggccgtggaacagttgaacagattgtgtaccttgttcactgtggcataatagaaccgttgatgaacctcttaactgcaaaagataccaagattattctggttatcctggatgccatttcaaatatctttcaggctgctgagaaactaggtgaaactgagaaacttagtataatgattgaagaatgtggaggcttagacaaaattgaagctctacaaaaccatgaaaatgagtctgtatataaggcttcattaagcttaactgagaagtatttctctgtagaggtgagtaatggatggtaatattaataacaacttggaaaaatgtaaagccaaggccatgagcccttttttccctcatacttttaaaaatgagcctcatatctttgttaaatatagtaaaatatcagtgtgcataggacgtaatgtacttattgcccctctgatgtttggcttgatggtaataaaatctatttatttatttatttaaaaaaaaataanaaaaaaaaaaaaaacaaagaaaaacagaaaaaacaaaacaaaaaacacaaacgaagaacaaaaaaacaaatcatagaaagagagggcggggcgcatcacaaaatgccacgactcgcagcgcgcgacacaacaacaagacaccaacaccctatttagagactagaagacccaccacgagagcggcac

SEQ ID NO: 310320 - DNA, 3022 bp, Homo sapiens
ggggaaatttaaatcgcgccggccggctgcacgagccacacggtctttgagctgagtcgaggtggaccctttgaacgcagtcgccctacagccgctgattccccccgcatcgcctcccgtggaagcccaggcccgcttcgcagctttctccctttgtctcataaccatgtccaccaacgagaatgctaatacaccagctgcccgtcttcacagattcaagaacaagggaaaagacagtacagaaatgaggcgtcgcagaatagaggtcaatgtggagctgaggaaagctaagaaggatgaccagatgctgaagaggagaaatgtaagctcatttcctgatgatgctacttctccgctgcaggaaaaccgcaacaaccagggcactgtaaattggtctgttgatgacattgtcaaaggcataaatagcagcaatgtggaaaatcagctccaagctactcaagctgccaggaaactactttccagagaaaaacagccccccatagacaacataatccgggctggtttgattccgaaatttgtgtccttcttgggcagaactgattgtagtcccattcagtttgaatctgcttgggcactcactaacattgcttctgggacatcagaacaaaccaaggctgtggtagatggaggtgccatcccagcattcatttctctgttggcatctccccatgctcacatcagtgaacaagctgtctgggctctaggaaacattgcaggtgatggctcagtgttccgagacttggttattaagtacggtgcagttgaaccactgttgggtctccttgcagtcctgatatgtcatctttagcatgtggctacttacgtaatcttacctggacactttctaatctttgccgcaacaagaatcctgcacccccgatagatgctgttgagcagattcttcctaccttagttcggctcctgcatcatgatgatccagaagtgttagcagatacctgctgggctatttcctaccttactgatggtccaaatgaacgaattggcatggtggtgaaaacaggagttgtgccccaacttgtgaagcttctaggagcttctgaattgccaattgtgactcctgccctaagagccatagggaatattgtcactggtacagatgaacagactcaggttgtgattgatgcaggagcactcgccgtctttcccagcctgctcaccaaccccaaaactaacattcagaaggaagctacgtggacaatgtcaaacatcacagccggccgccaggaccagatacagcaagttgtgaatcatggattagtcccattccttgtcagtgttctctctaaggcagattttaagacacaaaaggaagctgtgtgggccgtgaccaactataccagtggtggaacagttgaacagattgtgtaccttgttcactgtggcataatagaaccgttgatgaacctcttaactgcaaaagataccaagattattctggttatcctggatgccatttcaaatatctttcaggctgctgagaaactaggtgaaactgagaaacttagtataatgattgaagaatgtggaggcttagacaaaattgaagctctacaaaaccatgaaaatgagtctgtgtataaggcttcgttaagcttaattgagaagtatttctctgtagaggaagaggaagatcaaaacgttgtaccagaaactacctctgaaggctacactttccaagttcaggatggggctcctgggacctttaacttttagatcatgtagctgagacataaatttgttgtgtactacgtttggtattttgtcttattgtttctctactaagaactctttcttaaatgtggtttgttactgtagcactttttacactgaaactatacttgaacagttccaactgtacatacatactgtatgaagcttgtcctctgactaggtttctaatttctatgtggaatttcctatcttgcagcatcctgtaaataaacattcaagtccacccttttcttgacttcaccatgcctatgtgttgctttctaatttggggcctttaatgttgctagtgaaaggtaacctgtccaaactgatgggattaaccagaggtagtcctggctgcagtttttgcagaagaatgaataacattttctggaaaccctcagccagtgtctccttaagtctccttggccagggagatgggctaaataccgtaaatttaatcataaatctctgctggagctacaaatggaattctttcctcccaaacttcaaggctgaatggggttccaaggtaaatcacggctgcacatgggcctcacctgggaatgtacccagttctgtttcgttgatgaggggcatgagggtccaccttgtgtcttttttaaaaatgtaattcccaagggctcttgtacaatatagattgatcaccactattctttttgagatggagtctcgctctgtcacccaggcgaaacccgtgtctctagtaaaaatacaaacaattagctgggattacaggcatggtggtgggagcctgtaatcccagctactcaggaggctgagtgcaggagaatcgcttgaactccggaggttggaggttgcagtgaggctgagaatggcgccactgcagatcccagccttggtgacgagaagcgaaaacacttggtctaacaaaaaaaatccccctgtggcataagtatatcattaccctaataacttctgacgagtcaggataagggaacaaggaaggaaagcaaagggagcaggcaaaccgggtaattacgttcccgaaatagccaattgagagcaaagtcacattagatacgaaaactggctgacagccctaaacatgtagccatgcgtcgcaacagtaacatctgcacgaaacaagtcaccagtaaaacgaaattgatccaggggctgacagagaagacacacaacgaagacacaaagggacggagcggccggcaaacaaatcaccatcaaagggggccaccaggtcagtggcgaccacccagcaacatcagag

SEQ ID NO: 310321 - DNA, 3091 bp, Homo sapiens
ggggaaatttaaatcgcgccggccggctgcacgagccacacggtctttgagctgagtcgaggtggaccctttgaacgcagtcgccctacagccgctgattccccccgcatcgcctcccgtggaagcccaggcccgcttcgcagctttctccctttgtctcataaccatgtccaccaacgagaatgctaatacaccagctgcccgtcttcacagattcaagaacaagggaaaagacagtacagaaatgaggcgtcgcagaatagaggtcaatgtggagctgaggaaagctaagaaggatgaccagatgctgaagaggagaaatgtaagctcatttcctgatgatgctacttctccgctgcaggaaaaccgcaacaaccagggcactgtaaattggtctgttgatgacattgtcaaaggcataaatagcagcaatgtggaaaatcagctccaagctactcaagctgccaggaaactactttccagagaaaaacagccccccatagacaacataatccgggctggtttgattccgaaatttgtgtccttcttgggcagaactgattgtagtcccattcagtttgaatctgcttgggcactcactaacattgcttctgggacatcagaacaaaccaaggctgtggtagatggaggtgccatcccagcattcatttctctgttggcatctccccatgctcacatcagtgaacaagctgtctgggctctaggaaacattgcaggtgatggctcagtgttccgagacttggttattaagtacggtgcagttgaaccactgttgggtctccttgcagtgggtcaactgcaccgtacttaataaccaagtctcggaacactgacccactgttggctctccttgcagttcctgatatgtcatctttagcatgtggctacttacgtaatcttacctggacactttctaatctttgccgcaacaagaatcctgcacccccgatagatgctgttgagcagattcttcctaccttagttcggctcctgcatcatgatgatccagaagtgttagcagatacctgctgggctatttcctaccttactgatggtccaaatgaacgaattggcatggtggtgaaaacaggagttgtgccccaacttgtgaagcttctaggagcttctgaattgccaattgtgactcctgccctaagagccatagggaatattgtcactggtacagatgaacagactcaggttgtgattgatgcaggagcactcgccgtctttcccagcctgctcaccaaccccaaaactaacattcagaaggaagctacgtggacaatgtcaaacatcacagccggccgccaggaccagatacagcaagttgtgaatcatggattagtcccattccttgtcagtgttctctctaaggcagattttaagacacaaaaggaagctgtgtgggccgtgaccaactataccagtggtggaacagttgaacagattgtgtaccttgttcactgtggcataatagaaccgttgatgaacctcttaactgcaaaagataccaagattattctggttatcctggatgccatttcaaatatctttcaggctgctgagaaactaggtgaaactgagaaacttagtataatgattgaagaatgtggaggcttagacaaaattgaagctctacaaaaccatgaaaatgagtctgtgtataaggcttcgttaagcttaattgagaagtatttctctgtagaggaagaggaagatcaaaacgttgtaccagaaactacctctgaaggctacactttccaagttcaggatggggctcctgggacctttaacttttagatcatgtagctgagacataaatttgttgtgtactacgtttggtattttgtcttattgtttctctactaagaactctttcttaaatgtggtttgttactgtagcactttttacactgaaactatacttgaacagttccaactgtacatacatactgtatgaagcttgtcctctgactaggtttctaatttctatgtggaatttcctatcttgcagcatcctgtaaataaacattcaagtccacccttttcttgacttcaccatgcctatgtgttgctttctaatttggggcctttaatgttgctagtgaaaggtaacctgtccaaactgatgggattaaccagaggtagtcctggctgcagtttttgcagaagaatgaataacattttctggaaaccctcagccagtgtctccttaagtctccttggccagggagatgggctaaataccgtaaatttaatcataaatctctgctggagctacaaatggaattctttcctcccaaacttcaaggctgaatggggttccaaggtaaatcacggctgcacatgggcctcacctgggaatgtacccagttctgtttcgttgatgaggggcatgagggtccaccttgtgtcttttttaaaaatgtaattcccaagggctcttgtacaatatagattgatcaccactattctttttgagatggagtctcgctctgtcacccaggcgaaacccgtgtctctagtaaaaatacaaacaattagctgggattacaggcatggtggtgggagcctgtaatcccagctactcaggaggctgagtgcaggagaatcgcttgaactccggaggttggaggttgcagtgaggctgagaatggcgccactgcagatcccagccttggtgacgagaagcgaaaacacttggtctaacaaaaaaaatccccctgtggcataagtatatcattaccctaataacttctgacgagtcaggataagggaacaaggaaggaaagcaaagggagcaggcaaaccgggtaattacgttcccgaaatagccaattgagagcaaagtcacattagatacgaaaactggctgacagccctaaacatgtagccatgcgtcgcaacagtaacatctgcacgaaacaagtcaccagtaaaacgaaattgatccaggggctgacagagaagacacacaacgaagacacaaagggacggagcggccggcaaacaaatcaccatcaaagggggccaccaggtcagtggcgaccacccagcaacatcagag

SEQ ID NO: 310322 - DNA, 990 bp, Homo sapiens
  misc_feature (927)..(927): n is a, c, g, or t
  misc_feature (965)..(965): n is a, c, g, or t
  misc_feature (976)..(976): n is a, c, g, or t
ggggaaatttaaatcgcgccggccggctgcacgagccacacggtctttgagctgagtcgaggtggaccctttgaacgcagtcgccctacagccgctgattccccccgcatcgcctcccgtggaagcccaggcccgcttcgcagctttctccctttgtctcataaccatgtccaccaacgagaatgctaatacaccagctgcccgtcttcacagattcaagaacaagggaaaagacagtacagaaatgaggcgtcgcagaatagaggtcaatgtggagctgaggaaagctaagaaggatgaccagatgctgaagaggagaaatgtaagctcatttcctgatgatgctacttctccgctgcaggaaaaccgcaacaaccagggcactgtaaattggtctgttgatgacattgtcaaaggcataaatagcagcaatgtggaaaatcagctccaagctactcaagctgccaggaaactactttccagagaaaaacagccccccatagacaacataatccgggctggtttgattccgaaatttgtgtccttcttgggcagaactgattgtagtcccattcagtttgaatctgcttgggcactcactaacattgcttctgggacatcagaacaaaccaaggctgtggtagatggaggtgccatcccagcattcatttctctgttggcatctccccatgctcacatcagtgaacaagctgtctgggctctaggaaacattgcaggtgatggctcagtgttccgagacttggttattaagtacggtgcagttgacccactgttggctctccttgcagttcctgatatgtcatctttagcatgtggctacttacgtaatcttacctggacactttctaatctttgccgcaacaagaattctggacccccgaatagatgctgttgaagcaaatcttnctaccttaatttccggtcccggcatcctgaatgatccnaaaatttttanccaaattcctggct

SEQ ID NO: 310323 - DNA, 2944 bp, Homo sapiens
ggggaaatttaaatcgcgccggccggctgcacgagccacacggtctttgagctgagtcgaggtggaccctttgaacgcagtcgccctacagccgctgattccccccgcatcgcctcccgtggaagcccaggcccgcttcgcagctttctccctttgtctcataaccatgtccaccaacgagaatgctaatacaccagctgcccgtcttcacagattcaagaacaagggaaaagacagtacagaaatgaggcgtcgcagaatagaggtcaatgtggagctgaggaaagctaagaaggatgaccagatgctgaagaggagaaatgtaagctcatttcctgatgatgctacttctccgctgcaggaaaaccgcaacaaccagggcactgtaaattggtctgttgatgacattgtcaaaggcataaatagcagcaatgtggaaaatcagctccaagctactcaagctgccaggaaactactttccagagaaaaacagccccccatagacaacataatccgggctggtttgattccgaaatttgtgtccttcttgggcagaactgattgtagtcccattcagtttgaatctgcttgggcactcactaacattgcttctgggacatcagtgaacaagctgtctgggctctaggaaacattgcaggtgatggctcagtgttccgagacttggttattaagtacggtgcagttgacccactgttggctctccttgcagttcctgatatgtcatctttagcatgtggctacttacgtaatcttacctggacactttctaatctttgccgcaacaagaatcctgcacccccgatagatgctgttgagcagattcttcctaccttagttcggctcctgcatcatgatgatccagaagtgttagcagatacctgctgggctatttcctaccttactgatggtccaaatgaacgaattggcatggtggtgaaaacaggagttgtgccccaacttgtgaagcttctaggagcttctgaattgccaattgtgactcctgccctaagagccatagggaatattgtcactggtacagatgaacagactcaggttgtgattgatgcaggagcactcgccgtctttcccagcctgctcaccaaccccaaaactaacattcagaaggaagctacgtggacaatgtcaaacatcacagccggccgccaggaccagatacagcaagttgtgaatcatggattagtcccattccttgtcagtgttctctctaaggcagattttaagacacaaaaggaagctgtgtgggccgtgaccaactataccagtggtggaacagttgaacagattgtgtaccttgttcactgtggcataatagaaccgttgatgaacctcttaactgcaaaagataccaagattattctggttatcctggatgccatttcaaatatctttcaggctgctgagaaactaggtgaaactgagaaacttagtataatgattgaagaatgtggaggcttagacaaaattgaagctctacaaaaccatgaaaatgagtctgtgtataaggcttcgttaagcttaattgagaagtatttctctgtagaggaagaggaagatcaaaacgttgtaccagaaactacctctgaaggctacactttccaagttcaggatggggctcctgggacctttaacttttagatcatgtagctgagacataaatttgttgtgtactacgtttggtattttgtcttattgtttctctactaagaactctttcttaaatgtggtttgttactgtagcactttttacactgaaactatacttgaacagttccaactgtacatacatactgtatgaagcttgtcctctgactaggtttctaatttctatgtggaatttcctatcttgcagcatcctgtaaataaacattcaagtccacccttttcttgacttcaccatgcctatgtgttgctttctaatttggggcctttaatgttgctagtgaaaggtaacctgtccaaactgatgggattaaccagaggtagtcctggctgcagtttttgcagaagaatgaataacattttctggaaaccctcagccagtgtctccttaagtctccttggccagggagatgggctaaataccgtaaatttaatcataaatctctgctggagctacaaatggaattctttcctcccaaacttcaaggctgaatggggttccaaggtaaatcacggctgcacatgggcctcacctgggaatgtacccagttctgtttcgttgatgaggggcatgagggtccaccttgtgtcttttttaaaaatgtaattcccaagggctcttgtacaatatagattgatcaccactattctttttgagatggagtctcgctctgtcacccaggcgaaacccgtgtctctagtaaaaatacaaacaattagctgggattacaggcatggtggtgggagcctgtaatcccagctactcaggaggctgagtgcaggagaatcgcttgaactccggaggttggaggttgcagtgaggctgagaatggcgccactgcagatcccagccttggtgacgagaagcgaaaacacttggtctaacaaaaaaaatccccctgtggcataagtatatcattaccctaataacttctgacgagtcaggataagggaacaaggaaggaaagcaaagggagcaggcaaaccgggtaattacgttcccgaaatagccaattgagagcaaagtcacattagatacgaaaactggctgacagccctaaacatgtagccatgcgtcgcaacagtaacatctgcacgaaacaagtcaccagtaaaacgaaattgatccaggggctgacagagaagacacacaacgaagacacaaagggacggagcggccggcaaacaaatcaccatcaaagggggccaccaggtcagtggcgaccacccagcaacatcagag

SEQ ID NO: 310324 - DNA, 1125 bp, Homo sapiens
  misc_feature (910)..(910): n is a, c, g, or t
  misc_feature (915)..(915): n is a, c, g, or t
  misc_feature (925)..(925): n is a, c, g, or t
  misc_feature (927)..(927): n is a, c, g, or t
ggggaaatttaaatcgcgccggccggctgcacgagccacacggtctttgagctgagtcgaggtggaccctttgaacgcagtcgccctacagccgctgattccccccgcatcgcctcccgtggaagcccaggcccgcttcgcagctttctccctttgtctcataaccatgtccaccaacgagaatgctaatacaccagctgcccgtcttcacagattcaagaacaagggaaaagacagtacagaaatgaggcgtcgcagaatagaggtcaatgtggagctgaggaaagctaagaaggatgaccagatgctgaagaggagaaatgtaagctcatttcctgatgatgctacttctccgctgcaggaaaaccgcaacaaccagggcactgtaaattggtctgttgatgacattgtcaaaggcataaatagcagcaatgtggaaaatcagctccaagctactcaagctgccaggaaactactttccagagaaaaacagccccccatagacaacataatccgggctggtttgattccgaaatttgtgtccttcttgggcagaactgattgtagtcccattcagtttgaatctgcttgggcactcactaacattgcttctgggacatcagaacaaaccaaggctgtggtagatggaggtgccatcccagcattcatttctctgttggcatctccccatgctcacatcagtgaacaagctgtctgggctctaggaaacattgcaggtgatggctcagtgttccgagacttggttattaagtacggtgcagttgacccactgttggctctccttgcagttcctgatatgtcatctttagcatgtggctacttacgtaatcttacctggacactttctaatctttgccgcaacaagaatcctggaccccgataatgcggntgggnagattcttcnancttagtcgggccggatcatgaggatccgaagggttagcaaagaccggggggatatcctacctatgggtgcgccatgaacggttgctgggggggaaacagggttggtccccctggagctgagagctagatgcaggagacccagacacgaagaagatggcaaacaacggtgagagagaagcgtcaggtacaaataagagg

SEQ ID NO: 310325 - DNA, 956 bp, Homo sapiens
  misc_feature (796)..(796): n is a, c, g, or t
  misc_feature (831)..(832): n is a, c, g, or t
  misc_feature (860)..(860): n is a, c, g, or t
  misc_feature (874)..(874): n is a, c, g, or t
  misc_feature (924)..(924): n is a, c, g, or t
ggggaaatttaaatcgcgccggccggctgcacgagccacacggtctttgagctgagtcgaggtggaccctttgaacgcagtcgccctacagccgctgattccccccgcatcgcctcccgtggaagcccaggcccgcttcgcagctttctccctttgtctcataaccatgtccaccaacgagaatgctaatacaccagctgcccgtcttcacagattcaagaacaagggaaaagacagtacagaaatgaggcgtcgcagaatagaggtcaatgtggagctgaggaaagctaagaaggatgaccagatgctgaagaggagaaatgtaagctcatttcctgatgatgctacttctccgctgcaggaaaaccgcaacaaccagggcactgtaaattggtctgttgatgacattgtcaaaggcataaatagcagcaatgtggaaaatcagctccaagctactcaagctgccaggaaactactttccagagaaaaacagccccccatagacaacataatccgggctggtttgattccgaaatttgtgtccttcttgggcagaactgattgtagtcccattcagtttgaatctgcttgggcactcactaacattgcttctgggacatcagaacaaaccaaggctgtggtagatggaggtgccatcccagcattcatttctctgttggcatctccccatgctcacatcagtgaacaagctgtctgggctctaggaaacattgcaggtgatggctcagtgttccgagacttggttattaagtacggtgcagttgaaccacatgtntggttctccttgccagtcctgatatgtcatctttnngcatgtggttacttacgtaatcttaccnggacctttctaatnttggcgcgaaagaatctggccccgatagatggtgggcgatcttcctactnagggccgggcacagagatccaaaggtgcaacc

SEQ ID NO: 310326 - DNA, 997 bp, Homo sapiens
  misc_feature (897)..(897): n is a, c, g, or t
ggggaaatttaaatcgcgccggccggctgcacgagccacacggtctttgagctgagtcgaggtggaccctttgaacgcagtcgccctacagccgctgattccccccgcatcgcctcccgtggaagcccaggcccgcttcgcagctttctccctttgtctcataaccatgtccaccaacgagaatgctaatacaccagctgcccgtcttcacagattcaagaacaagggaaaagacagtacagaaatgaggcgtcgcagaatagaggtcaatgtggagctgaggaaagctaagaaggatgaccagatgctgaagaggagaaatgtaagctcatttcctgatgatgctacttctccgctgcaggaaaaccgcaacaaccagggcactgtaaattggtctgttgatgacattgtcaaaggcataaatagcagcaatgtggaaaatcagctccaagctactcaagctgccaggaaactactttccagagaaaaacagccccccatagacaacataatccgggctggtttgattccgaaatttgtgtccttcttgggcagaactgattgtagtcccattcagtttgaatctgcttgggcactcactaacattgcttctgggacatcagaacaaaccaaggctgtggtagatggaggtgccatcccagcattcatttctctgttggcatctccccatgctcacatcagtgaacaagctgtctgggctctaggaaacattgcaggtgatggctcagtgttccgagacttggttattaagtacggtgcagttgaaccactgttgggtctccttgcagtcctgatatgtcatctttagcatgtggctacttacgtaatcttacctggacactttctaatctttgccgcaacaagatctgccccganaatgctgtgggcagatcttcctaccttgcggccgctcaagatccagtttcaaacgcgggtttccctttgggccccgacctggcggcggccggttgccccg

SEQ ID NO: 310327 - DNA, 404 bp, Homo sapiens
ttttagatatcatttctcagagtaaatcaagtttgagtgagacctgcagggttttcttgtgagcgcctatattgagttttagtgcataagctttgttttaagttttcactgggtagatgaactgtcagataagtggcattatgtctaacatataaagtatttccccccatttttaaacagagaagaagatacagaaaatgaaaatgaaaagaaaatttggtattacagcacaaaggtccaacttgcagaattaattgactgtctagacaaagattattgggaagcagaactctgcaaaattctagaagaaatgcgtgaagaaatccaccgacacatggacataactgaagacctgaccaataaggctcggggcagtaacaaatcctttctggcggcagctaatg

SEQ ID NO: 310328 - DNA, 1542 bp, Homo sapiens
gtggcctaccatggtttcaacgggtaacggggaataagggttcgagctgcgggagccgggctggcaggagcaggatggcggcggcggcggctgcaggcgaggcgcgccgggtgctggtgtacggcggcaggggcgctctgggttctcgatgcgtgcaggcttttcgggcccgcaactggtgggttgccagcgttgatgtggtggagaatgaagaggccagcgctagcatcattgttaaaatgacagactcgttcactgagcaggctgaccaggtgactgctgaggttggaaagctcttgggtgaagagaaggtggatgcaattctttgcgttgctggaggatgggccgggggcaatgccaaatccaagtctctctttaagaactgtgacctgatgtggaagcagagcatatggacatcgaccatctccagccatctggctaccaagcatctcaaggaaggaggcctcctgaccttggctggcgcaaaggctgccctggatgggactcctggtatgatcgggtacggcatggccaagggtgctgttcaccagctctgccagagcctggctgggaagaacagcggcatgccgcccggggcagccgccatcgctgtgctcccggttaccctggataccccgatgaacaggaaatcaatgcctgaggctgacttcagctcctggacacccttagaattcctagttgaaactttccatgactggatcacagggaaaaaccgaccgagctcaggaagcctaatccaggtggtaaccacagaaggaaggacggaactcaccccagcatatttttaggcctcatctcagtgcctatgaggggcctgccagaaaagtcactaacctgtctcagtgtggccttgtccagccttgtgttttctgtaacccctgtttgtggtacgagataatgagtcctatttttctctcacataatatgcatttgctctcctaggacagtgtaatacatttatgtgaagtaaagacatgcgagactggtggcctgcaaatagcatccgtcaatctgtgttaactgcatagggagggctctgcatagcacctgctatagcggtgtcatgttggatcgcttttgtgactgttcatctgtccttgacagtggctgtcatcttgactactttgttgatttgttggtattggggacattttaaaggctgagttatttttgaatgtcatgtttatgtcatagacgtagttttcgcatccttgaattaaactgccttaactccttttgtggtataagcaaaactccatggactctgtcctggtatccttttcctgtgtggttgccctgtgtcctctggcctagggttaagtgtgcaagataactactcgtgagtattcagaatgttgttcctaataaatgcacttgttgtctgtcttctttaatcaaatcacatcttatatacagcagtcagagatgagtatactagaatcatggattgctggaggtcttttaatctggtgttctcagaagggggtggatttaaatcctgaaataaatatttcaacacaa

SEQ ID NO: 310329 - DNA, 753 bp, Homo sapiens
aattctaagaatcaggaaaatgctttagaaaaattacattgtaaaagggaatgttactaagaacctttcttatggggtaaaaggatatgccacgacaaaggcccatatctagctgtgattgaatctggaagcctcatctcagtgcctatgaggggcctgccagaaaagtcactaacctgtctcagtgtggccttgtccagccttgtgttttctgtaacccctgtttgtggtacgagataatgagtcctatttttctctcacataatatgcatttgctctcctaggacagtgtaatacatttatgtgaagtaaagacatgcgagactggtggcctgcaaatagcatccgtcaatctgtgttaactgcatagggagggctctgcatagcacctgctatagcggtgtcatgttggatcgcttttgtgactgttcatctgtccttgacagtggctgtcatcttgactactttgttgatttgttggtattggggacattttaaaggctgagttatttttgaatgtcatgtttatgtcatagacgtagttttcgcatccttgaattaaactgccttaactccttttgtggtataagcaaaactccatggactctgtcctggtatccttttcctgtgtggttgccctgtgtcctctggcctagggttaagtgtgcaagataactactcgtgagtattcagaatgttgttcctaataaatgcacttgttgtctgtcttctttaatcaaatcacatcttata

SEQ ID NO: 310330 - DNA, 1542 bp, Homo sapiens
agttacagtccctccgggtggcggggcgccgcgagcgtggcagcgcgctaggcggcagcagcgggcgcggagcggggcgcggccgccgcgcgttccctcttggcggggttggccggccggggcggggcgcggcgctccggctcgaggcattcggagctgcgggagccgggctggcaggagcaggatggcggcggcggcggctgcaggcgaggcgcgccgggtgctggtgtacggcggcaggggcgctctgggttctcgatgcgtgcaggcttttcgggcccgcaactggtgggttgccagcgttgatgtggtggagaatgaagaggccagcgctagcatcattgttaaaatgacagactcgttcactgagcaggctgaccaggtgactgctgaggttggaaagctcttgggtgaagagaaggtggatgcaattctttgcgttgctggaggatgggccgggggcaatgccaaatccaagtctctctttaagaactgtgacctgatgtggaagcagagcatatggacatcgaccatctccagccatctggctaccaagcatctcaaggaaggaggcctcctgaccttggctggcgcaaaggctgccctggatgggactcctggtatgatcgggtacggcatggccaagggtgctgttcaccagctctgccagagcctggctgggaagaacagcggcatgccgcccggggcagccgccatcgctgtgctcccggttaccctggataccccgatgaacaggaaatcaatgcctgaggctgacttcagctcctggacacccttagaattcctagttgaaactttccatgactggatcacagggaaaaaccgaccgagctcaggaagcctaatccaggtggtaaccacagaaggaaggacggaactcaccccagcatatttttaggcctcatctcagtgcctatgaggggcctgccagaaaagtcactaacctgtctcagtgtggccttgtccagccttgtgttttctgtaacccctgtttgtggtacgagataatgagtcctatttttctctcacataatatgcatttgctctcctaggacagtgtaatacatttatgtgaagtaaagacatgcgagactggtggcctgcaaatagcatccgtcaatctgtgttaactgcatagggagggctctgcatagcacctgctatagcggtgtcatgttggatcgcttttgtgactgttcatctgtccttgacagtggctgtcatcttgactactttgttgatttgttggtattggggacattttaaaggctgagttatttttgaatgtcatgtttatgtcatagacgtagttttcgcatccttgaattaaactgccttaactccttttgtggtataagcaaaactccatggactctgtcctggtatccttttcctgtgtggttgccctgtgtcctctggcctagggttaagtgtgcaagataactactcgtgagtattcagaatgttgttcctaataaatgcacttgttgtctgtcttctttaatcaaatcacatcttata

SEQ ID NO: 310331 - DNA, 1652 bp, Homo sapiens
agttacagtccctccgggtggcggggcgccgcgagcgtggcagcgcgctaggcggcagcagcgggcgcggagcggggcgcggccgccgcgcgttccctcttggcggggttggccggccggggcggggcgcggcgctccggctcgaggcattcggagctgcgggagccgggctggcaggagcaggatggcggcggcggcggctgcaggcgaggcgcgccgggtgctggtgtacggcggcaggggcgctctgggttctcgatgcgtgcaggcttttcgggcccgcaactggtgggttgccagcgttgatgtggtggagaatgaagaggccagcgctagcatcattgttaaaatgacagactcgttcactgagcaggctgaccaggtgactgctgaggttggaaagctcttgggtgaagagaaggtggatgcaattctttgcgttgctggaggatgggccgggggcaatgccaaatccaagtctctctttaagaactgtgacctgatgtggaagcagagcatatggacatcgaccatctccagccatctggctaccaagcatctcaaggaaggaggcctcctgaccttggctggcgcaaaggctgccctggatgggactcctggtatgatcgggtacggcatggccaagggtgctgttcaccagctctgccagagcctggctgggaagaacagcggcatgccgcccggggcagccgccatcgctgtgctcccggttaccctggataccccgatgaacaggaaatcaatgcctgaggctgacttcagctcctggacacccttagaattcctagttgaaactttccatgactggatcacagggaaaaaccgaccgagctcaggaagcctaatccaggtggtaaccacagaaggaaggacggaactcaccccagcatatttttaggcctcatctcagtgcctatgaggggcctgccagaaaagtcactaacctgtctcagtgtggccttgtccagccttgtgttttctgtaacccctgtttgtggtacgagataatgagtcctatttttctctcacataatatgcatttgctctcctaggacagtgtaatacatttatgtgaagtaaagacatgcgagactggtggcctgcaaatagcatccgtcaatctgtgttaactgcatagggagggctctgcatagcacctgctatagcggtgtcatgttggatcgcttttgtgactgttcatctgtccttgacagtggctgtcatcttgactactttgttgatttgttggtattggggacattttaaaggctgagttatttttgaatgtcatgtttatgtcatagacgtagttttcgcatccttgaattaaactgccttaactccttttgtggtataagcaaaactccatggactctgtcctggtatccttttcctgtgtggttgccctgtgtcctctggcctagggttaagtgtgcaagataactactcgtgagtattcagaatgttgttcctaataaatgcacttgttgtctgtcttctttaatcaaatcacatcttatatacagcagtcagagatgagtatactagaatcatggattgctggaggtcttttaatctggtgttctcagaagggggtggatttaaatcctgaaataaatatttcaacacaa

SEQ ID NO: 310332 - DNA, 1807 bp, Homo sapiens
agttacagtccctccgggtggcggggcgccgcgagcgtggcagcgcgctaggcggcagcagcgggcgcggagcggggcgcggccgccgcgcgttccctcttggcggggttggccggccggggcggggcgcggcgctccggctcgaggcattcggagctgcgggagccgggctggcaggagcaggatggcggcggcggcggctgcaggcgaggcgcgccgggtgctggtgtacggcggcaggggcgctctgggttctcgatgcgtgcaggcttttcgggcccgcaactggtgggttgccagcgttgatgtggtggagaatgaagaggccagcgctagcatcattgttaaaatgacagactcgttcactgagcaggctgaccaggtgactgctgaggttggaaagctcttgggtgaagagaaggtggatgcaattctttgcgttgctggaggatgggccgggggcaatgccaaatccaagtctctctttaagaactgtgacctgatgtggaagcagagcatatggacatcgaccatctccagccatctggctaccaagcatctcaaggaaggaggcctcctgaccttggctggcgcaaaggctgccctggatgggactcctggtatgatcgggtacggcatggccaagggtgctgttcaccagctctgccagagcctggctgggaagaacagcggcatgccgcccggggcagccgccatcgctgtgctcccggttaccctggataccccgatgaacaggaaatcaatgcctgaggctgacttcagctcctggacacccttagaattcctagttgaaactttccatgactggatcacagggaaaaaccgaccgagctcaggaagcctaatccaggtggtaaccacagaaggaaggacggaactcaccccagcatatttttaggcctcatctcagtgcctatgaggggcctgccagaaaagtcactaacctgtctcagtgtggccttgtccagccttgtgttttctgtaacccctgtttgtggtacgagataatgagtcctatttttctctcacataatatgcatttgctctcctaggacagtgtaatacatttatgtgaagtaaagacatgcgagactggtggcctgcaaatagcatccgtcaatctgtgttaactgcatagggagggctctgcatagcacctgctatagcggtgtcatgttggatcgcttttgtgactgttcatctgtccttgacagtggctgtcatcttgactactttgttgatttgttggtattggggacattttaaaggctgagttatttttgaatgtcatgtttatgtcatagacgtagttttcgcatccttgaattaaactgccttaactccttttgtggtataagcaaaactccatggactctgtcctggtatccttttcctgtgtggttgccctgtgtcctctggcctagggttaagtgtgcaagataactactcgtgagtattcagaatgttgttcctaataaatgcacttgttgtctgtcttctttaatcaaatcacatcttatatacagcagtcagagatgagtatactagaatcatggattgctggaggtcttttaatctggtgttctcagaagggggtggatttaaatcctgaaataaatatttcaacacaaaaaaaaaaaaaaaaaaaaaaaaaatttgggggcgggcgaaaatttcaaccattttggggcggccaagaaggaaaggcagtggcaagaaacggcaaaggtggtttcacaaaaagcggggcgggtggaaaacagggtgggcttggtacaggcaggag

SEQ ID NO: 310333 - DNA, 1378 bp, Homo sapiens
agttacagtccctccgggtggcggggcgccgcgagcgtggcagcgcgctaggcggcagcagcgggcgcggagcggggcgcggccgccgcgcgttccctcttggcggggttggccggccggggcggggcgcggcgctccggctcgaggcattcggagctgcgggagccgggctggcaggagcaggatggcggcggcggcggctgcaggcgaggcgcgccgggtgctggtgtacggcggcaggggcgctctgggttctcgatgcgtgcaggcttttcgggcccgcaactggtgggttgccagcgttgatgtggtggagaatgaagaggccagcgctagcatcattgttaaaatgacagactcgttcactgagcaggctgaccaggtgactgctgaggttggaaagctcttgggtgaagagaaggtggatgcaattctttgcgttgctggaggatgggccgggggcaatgccaaatccaagtctctctttaagaactgtgacctgatgtggaagcagagcatatggacatcgaccatctccagccatctggctaccaagcatctcaaggaaggaggcctcctgaccttggctggcgcaaaggctgccctggatgggactcctggtatgatcgggtacggcatggccaagggtgctgttcaccagctctgccagagcctggctgggaagaacagcggcatgccgcccggggcagccgccatcgctgtgctcccggttaccctggataccccgatgaacaggaaatcaatgcctgaggctgacttcagctcctggacacccttagaattcctagttgaaactttccatgactggatcacagggaaaaaccgaccgagctcaggaagcctaatccaggtggtaaccacagaaggaaggacggaactcaccccagcatatttttaggcctcatctcagtgcctatgaggggcctgccagaaaagtcactaacctgtctcagtgtggccttgtccagccttgtgttttctgtaacccctgtttgtggtacgagataatgagtcctatttttctctcacataatatgcatttgctctcctaggacagtgtaatacatttatgtgaagtaaagacatgcgagactggtggcctgcaaatagcatccgtcaatctgtgttaactgcatagggagggctctgcatagcacctgctatagcggtgtcatgttggatcgcttttgtgactgttcatctgtccttgacagtggctgtcatcttgactactttgttgatttgttggtattggggacattttaaaggctgagttatttttgaatgtcatgtttatgtcatagacgtagttttcgcatccttgaattaaactgccttaactccttttgtggtataa

SEQ ID NO: 310334 - DNA, 1598 bp, Homo sapiens
agttacagtccctccgggtggcggggcgccgcgagcgtggcagcgcgctaggcggcagcagcgggcgcggagcggggcgcggccgccgcgcgttccctcttggcggggttggccggccggggcggggcgcggcgctccggctcgaggcattcggagctgcgggagccgggctggcaggagcaggatggcggcggcggcggctgcaggcgaggcgcgccgggtgctggtgtacggcggcaggggcgctctgggttctcgatgcgtgcaggcttttcgggcccgcaactggtgggttgccagcgttgatgtggtggagaatgaagaggccagcgctagcatcattgttaaaatgacagactcgttcactgagcaggctgaccaggtgactgctgaggttggaaagctcttgggtgaagagaaggtggatgcaattctttgcgttgctggaggatgggccgggggcaatgccaaatccaagtctctctttaagaactgtgacctgatgtggaagcagagcatatggacatcgaccatctccagccatctggctaccaagcatctcaaggaaggaggcctcctgaccttggctggcgcaaaggctgccctggatgggactcctggtatgatcgggtacggcatggccaagggtgctgttcaccagctctgccagagcctggctgggaagaacagcggcatgccgcccggggcagccgccatcgctgtgctcccggttaccctggataccccgatgaacaggaaatcaatgcctgaggctgacttcagctcctggacacccttagaattcctagttgaaactttccatgactggatcacagggaaaaaccgaccgagctcaggaagcctaatccaggtggtaaccacagaaggaaggacggaactcaccccagcatatttttaggcctcatctcagtgcctatgaggggcctgccagaaaagtcactaacctgtctcagtgtggccttgtccagccttgtgttttctgtaacccctgtttgtggtacgagataatgagtcctatttttctctcacataatatgcatttgctctcctaggacagtgtaatacatttatgtgaagtaaagacatgcgagactggtggcctgcaaatagcatccgtcaatctgtgttaactgcatagggagggctctgcatagcacctgctatagcggtgtcatgttggatcgcttttgtgactgttcatctgtccttgacagtggctgtcatcttgactactttgttgatttgttggtattggggacattttaaaggctgagttatttttgaatgtcatgtttatgtcatagacgtagttttcgcatccttgaattaaactgccttaactccttttgtggtataagcaaaactccatggactctgtcctggtatccttttcctgtgtggttgccctgtgtcctctggcctagggttaagtgtgcaagataactactcgtgagtattcagaatgttgttcctaataaatgcacttgttgtctgtcttctttaatcaaatcacatcttataaaaattacatggccgtcgtattaccgttctgattgtgcccttggggtacctccttt

SEQ ID NO: 310335 - DNA, 1471 bp, Homo sapiens
agttacagtccctccgggtggcggggcgccgcgagcgtggcagcgcgctaggcggcagcagcgggcgcggagcggggcgcggccgccgcgcgttccctcttggcggggttggccggccggggcggggcgcggcgctccggctcgaggcattcggagctgcgggagccgggctggcaggagcaggatggcggcggcggcggctgcaggcgaggcgcgccgggtgctggtgtacggcggcaggggcgctctgggttctcgatgcgtgcaggcttttcgggcccgcaactggtgggttgccagcgttgatgtggtggagaatgaagaggccagcgctagcatcattgttaaaatgacagactcgttcactgagcaggctgaccaggtgactgctgaggttggaaagctcttgggtgaagagaaggtggatgcaattctttgcgttgctggaggatgggccgggggcaatgccaaatccaagtctctctttaagaactgtgacctgatgtggaagcagagcatatggacatcgaccatctccagccatctggctaccaagcatctcaaggaaggaggcctcctgaccttggctggcgcaaaggctgccctggatgggactcctggtatgatcgggtacggcatggccaagggtgctgttcaccagctctgccagagcctggctgggaagaacagcggcatgccgcccggggcagccgccatcgctgtgctcccggttaccctggataccccgatgaacaggaaatcaatgcctgaggctgacttcagctcctggacacccttagaattcctagttgaaactttccatgactggatcacagggaaaaaccgaccgagctcaggaagcctaatccaggtggtaaccacagaaggaaggacggaactcaccccagcatatttttaggcctcatctcagtgcctatgaggggcctgccagaaaagtcactaacctgtctcagtgtggccttgtccagccttgtgttttctgtaacccctgtttgtggtacgagataatgagtcctatttttctctcacataatatgcatttgctctcctaggacagtgtaatacatttatgtgaagtaaagacatgcgagactggtggcctgcaaatagcatccgtcaatctgtgttaactgcatagggagggctctgcatagcacctgctatagcggtgtcatgttggatcgcttttgtgactgttcatctgtccttgacagtggctgtcatcttgactactttgttgatttgttggtattggggacattttaaaggctgagttatttttgaatgtcatgtttatgtcatagacgtagttttcgcatccttgaattaaactgccttaactccttttgtggtataagcaaaactccatggactctgtcctgccaccgtcatcgcaccgttgtgaaataccacggcccctccccgcaggcatgcctgcgcatcgactact

SEQ ID NO: 310336 - DNA, 1804 bp, Homo sapiens
agttacagtccctccgggtggcggggcgccgcgagcgtggcagcgcgctaggcggcagcagcgggcgcggagcggggcgcggccgccgcgcgttccctcttggcggggttggccggccggggcggggcgcggcgctccggctcgaggcattcggagctgcgggagccgggctggcaggagcaggatggcggcggcggcggctgcaggcgaggcgcgccgggtgctggtgtacggcggcaggggcgctctgggttctcgatgcgtgcaggcttttcgggcccgcaactggtgggttgccagcgttgatgtggtggagaatgaagaggccagcgctagcatcattgttaaaatgacagactcgttcactgagcaggctgaccaggtgactgctgaggttggaaagctcttgggtgaagagaaggtggatgcaattctttgcgttgctggaggatgggccgggggcaatgccaaatccaagtctctctttaagaactgtgacctgatgtggaagcagagcatatggacatcgaccatctccagccatctggctaccaagcatctcaaggaaggaggcctcctgaccttggctggcgcaaaggctgccctggatgggactcctggtatgatcgggtacggcatggccaagggtgctgttcaccagctctgccagagcctggctgggaagaacagcggcatgccgcccggggcagccgccatcgctgtgctcccggttaccctggataccccgatgaacaggaaatcaatgcctgaggctgacttcagctcctggacacccttagaattcctagttgaaactttccatgactggatcacagggaaaaaccgaccgagctcaggaagcctaatccaggtggtaaccacagaaggaaggacggaactcaccccagcatatttttaggcctcatctcagtgcctatgaggggcctgccagaaaagtcactaacctgtctcagtgtggccttgtccagccttgtgttttctgtaacccctgtttgtggtacgagataatgagtcctatttttctctcacataatatgcatttgctctcctaggacagtgtaatacatttatgtgaagtaaagacatgcgagactggtggcctgcaaatagcatccgtcaatctgtgttaactgcatagggagggctctgcatagcacctgctatagcggtgtcatgttggatcgcttttgtgactgttcatctgtccttgacagtggctgtcatcttgactactttgttgatttgttggtattggggacattttaaaggctgagttatttttgaatgtcatgtttatgtcatagacgtagttttcgcatccttgaattaaactgccttaactccttttgtggtataaaaaaaaaaaaaaaaaaaaaaaaaaaaaaaaaaaaaagaaaaaaaacccggggacacatagacgggagcgacaaagacggtcaaaaagagacacgggcacacaaggtacccagacaccatttgtgtacacaaggtgcgacacacgcggaggcccaaaagagaggcaaaatcgcaaaccacgggaccccatagtcaccgcgacacagaagcaaacaaaagaaaagaaacagacgcgacgcggggggggggatcgcacaaatggcgacaacaacacgggcggccagccgaaacacgacaacgacaccgtgaaacaacaggcgcgacgaggaacaaaaacacaagataatgcagaaagagcaggacaagaaaaacagccgacaccgggcagacagaccgagagctgcacacgacagaaccacatacgaca

SEQ ID NO: 310337 - DNA, 1598 bp, Homo sapiens
agttacagtccctccgggtggcggggcgccgcgagcgtggcagcgcgctaggcggcagcagcgggcgcggagcggggcgcggccgccgcgcgttccctcttggcggggttggccggccggggcggggcgcggcgctccggctcgaggcattcggagctgcgggagccgggctggcaggagcaggatggcggcggcggcggctgcaggcgaggcgcgccgggtgctggtgtacggcggcaggggcgctctgggttctcgatgcgtgcaggcttttcgggcccgcaactggtgggttgccagcgttgatgtggtggagaatgaagaggccagcgctagcatcattgttaaaatgacagactcgttcactgagcaggctgaccaggtgactgctgaggttggaaagctcttgggtgaagagaaggtggatgcaattctttgcgttgctggaggatgggccgggggcaatgccaaatccaagtctctctttaagaactgtgacctgatgtggaagcagagcatatggacatcgaccatctccagccatctggctaccaagcatctcaaggaaggaggcctcctgaccttggctggcgcaaaggctgccctggatgggactcctggtatgatcgggtacggcatggccaagggtgctgttcaccagctctgccagagcctggctgggaagaacagcggcatgccgcccggggcagccgccatcgctgtgctcccggttaccctggataccccgatgaacaggaaatcaatgcctgaggctgacttcagctcctggacacccttagaattcctagttgaaactttccatgactggatcacagggaaaaaccgaccgagctcaggaagcctaatccaggtggtaaccacagaaggaaggacggaactcaccccagcatatttttaggcctcatctcagtgcctatgaggggcctgccagaccctgtttgtggtacgagataatgagtcctatttttctctcacataatatgcatttgctctcctaggacagtgtaatacatttatgtgaagtaaagacatgcgagactggtggcctgcaaatagcatccgtcaatctgtgttaactgcatagggagggctctgcatagcacctgctatagcggtgtcatgttggatcgcttttgtgactgttcatctgtccttgacagtggctgtcatcttgactactttgttgatttgttggtattggggacattttaaaggctgagttatttttgaatgtcatgtttatgtcatagacgtagttttcgcatccttgaattaaactgccttaactccttttgtggtataagcaaaactccatggactctgtcctggtatccttttcctgtgtggttgccctgtgtcctctggcctagggttaagtgtgcaagataactactcgtgagtattcagaatgttgttcctaataaatgcacttgttgtctgtcttctttaatcaaatcacatcttatatacagcagtcagagatgagtatactagaatcatggattgctggaggtcttttaatctggtgttctcagaagggggtggatttaaatcctgaaataaatatttcaacacaa

SEQ ID NO: 310338 - DNA, 1559 bp, Homo sapiens
agttacagtccctccgggtggcggggcgccgcgagcgtggcagcgcgctaggcggcagcagcgggcgcggagcggggcgcggccgccgcgcgttccctcttggcggggttggccggccggggcggggcgcggcgctccggctcgaggcattcggagctgcgggagccgggctggcaggagcaggatggcggcggcggcggctgcaggcgaggcgcgccgggtgctggtgtacggcggcaggggcgctctgggttctcgatgcgtgcaggcttttcgggcccgcaactgggtgactgctgaggttggaaagctcttgggtgaagagaaggtggatgcaattctttgcgttgctggaggatgggccgggggcaatgccaaatccaagtctctctttaagaactgtgacctgatgtggaagcagagcatatggacatcgaccatctccagccatctggctaccaagcatctcaaggaaggaggcctcctgaccttggctggcgcaaaggctgccctggatgggactcctggtatgatcgggtacggcatggccaagggtgctgttcaccagctctgccagagcctggctgggaagaacagcggcatgccgcccggggcagccgccatcgctgtgctcccggttaccctggataccccgatgaacaggaaatcaatgcctgaggctgacttcagctcctggacacccttagaattcctagttgaaactttccatgactggatcacagggaaaaaccgaccgagctcaggaagcctaatccaggtggtaaccacagaaggaaggacggaactcaccccagcatatttttaggcctcatctcagtgcctatgaggggcctgccagaaaagtcactaacctgtctcagtgtggccttgtccagccttgtgttttctgtaacccctgtttgtggtacgagataatgagtcctatttttctctcacataatatgcatttgctctcctaggacagtgtaatacatttatgtgaagtaaagacatgcgagactggtggcctgcaaatagcatccgtcaatctgtgttaactgcatagggagggctctgcatagcacctgctatagcggtgtcatgttggatcgcttttgtgactgttcatctgtccttgacagtggctgtcatcttgactactttgttgatttgttggtattggggacattttaaaggctgagttatttttgaatgtcatgtttatgtcatagacgtagttttcgcatccttgaattaaactgccttaactccttttgtggtataagcaaaactccatggactctgtcctggtatccttttcctgtgtggttgccctgtgtcctctggcctagggttaagtgtgcaagataactactcgtgagtattcagaatgttgttcctaataaatgcacttgttgtctgtcttctttaatcaaatcacatcttatatacagcagtcagagatgagtatactagaatcatggattgctggaggtcttttaatctggtgttctcagaagggggtggatttaaatcctgaaataaatatttcaacacaa

SEQ ID NO: 310339 - DNA, 1694 bp, Homo sapiens
agttacagtccctccgggtggcggggcgccgcgagcgtggcagcgcgctaggcggcagcagcgggcgcggagcggggcgcggccgccgcgcgttccctcttggcggggttggccggccggggcggggcgcggcgctccggctcgaggcattcggagctgcgggagccgggctggcaggagcaggatggcggcggcggcggctgcaggcgaggcgcgccgggtgctggtgtacggcggcaggggcgctctgggttctcgatgcgtgcaggcttttcgggcccgcaactggatttgagtaacaacagataccatatggccagcaaagcctaagtgggttgccagcgttgatgtggtggagaatgaagaggccagcgctagcatcattgttaaaatgacagactcgttcactgagcaggctgaccaggtgactgctgaggttggaaagctcttgggtgaagagaaggtggatgcaattctttgcgttgctggaggatgggccgggggcaatgccaaatccaagtctctctttaagaactgtgacctgatgtggaagcagagcatatggacatcgaccatctccagccatctggctaccaagcatctcaaggaaggaggcctcctgaccttggctggcgcaaaggctgccctggatgggactcctggtatgatcgggtacggcatggccaagggtgctgttcaccagctctgccagagcctggctgggaagaacagcggcatgccgcccggggcagccgccatcgctgtgctcccggttaccctggataccccgatgaacaggaaatcaatgcctgaggctgacttcagctcctggacacccttagaattcctagttgaaactttccatgactggatcacagggaaaaaccgaccgagctcaggaagcctaatccaggtggtaaccacagaaggaaggacggaactcaccccagcatatttttaggcctcatctcagtgcctatgaggggcctgccagaaaagtcactaacctgtctcagtgtggccttgtccagccttgtgttttctgtaacccctgtttgtggtacgagataatgagtcctatttttctctcacataatatgcatttgctctcctaggacagtgtaatacatttatgtgaagtaaagacatgcgagactggtggcctgcaaatagcatccgtcaatctgtgttaactgcatagggagggctctgcatagcacctgctatagcggtgtcatgttggatcgcttttgtgactgttcatctgtccttgacagtggctgtcatcttgactactttgttgatttgttggtattggggacattttaaaggctgagttatttttgaatgtcatgtttatgtcatagacgtagttttcgcatccttgaattaaactgccttaactccttttgtggtataagcaaaactccatggactctgtcctggtatccttttcctgtgtggttgccctgtgtcctctggcctagggttaagtgtgcaagataactactcgtgagtattcagaatgttgttcctaataaatgcacttgttgtctgtcttctttaatcaaatcacatcttatatacagcagtcagagatgagtatactagaatcatggattgctggaggtcttttaatctggtgttctcagaagggggtggatttaaatcctgaaataaatatttcaacacaa

SEQ ID NO: 310340 - DNA, 1613 bp, Homo sapiens
agttacagtccctccgggtggcggggcgccgcgagcgtggcagcgcgctaggcggcagcagcgggcgcggagcggggcgcggccgccgcgcgttccctcttggcggggttggccggccggggcggggcgcggcgctccggctcgaggcattcggagctgcgggagccgggctggcaggagcaggatggcggcggcggcggctgcaggcgaggcgcgccgggtgctggtgtacggcggcaggggcgctctgggttctcgatgcgtgcaggcttttcgggcccgcaactggtgggttgccagcgttgatgtggtggagaatgaagaggccagcgctagcatcattgttaaaatgacagactcgttcactgagcaggctgaccaggtgactgctgaggttggaaagctcttgggtgaagagaaggtggatgcaattctttgcgttgctggaggatgggccgggggcaatgccaaatccaagtctctctttaagaactgtgacctgatgtggaagcagagcatatggacatcgaccatctccagccatctggctaccaagcatctcaaggaaggaggcctcctgaccttggctggcgcaaaggctgccctggatgggactcctggtatgatcgggtacggcatggccaagggtgctgttcaccagctctgccagagcctggctgggaagaacagcggcatgccgcccggggcagccgccatcgctgtgctcccggttaccctggataccccgatgaacaggaaatcaatgcctgaggctgacttcagctcctggacacccttagaattcctagttgaaactttccatgactggatcacagggaaaaaccgaccgaggacggaactcaccccagcatatttttaggcctcatctcagtgcctatgaggggcctgccagaaaagtcactaacctgtctcagtgtggccttgtccagccttgtgttttctgtaacccctgtttgtggtacgagataatgagtcctatttttctctcacataatatgcatttgctctcctaggacagtgtaatacatttatgtgaagtaaagacatgcgagactggtggcctgcaaatagcatccgtcaatctgtgttaactgcatagggagggctctgcatagcacctgctatagcggtgtcatgttggatcgcttttgtgactgttcatctgtccttgacagtggctgtcatcttgactactttgttgatttgttggtattggggacattttaaaggctgagttatttttgaatgtcatgtttatgtcatagacgtagttttcgcatccttgaattaaactgccttaactccttttgtggtataagcaaaactccatggactctgtcctggtatccttttcctgtgtggttgccctgtgtcctctggcctagggttaagtgtgcaagataactactcgtgagtattcagaatgttgttcctaataaatgcacttgttgtctgtcttctttaatcaaatcacatcttatatacagcagtcagagatgagtatactagaatcatggattgctggaggtcttttaatctggtgttctcagaagggggtggatttaaatcctgaaataaatatttcaacacaa

SEQ ID NO: 310341 - DNA, 1284 bp, Homo sapiens
  misc_feature (25)..(25): n is a, c, g, or t
  misc_feature (28)..(28): n is a, c, g, or t
  misc_feature (43)..(43): n is a, c, g, or t
aggcgagtcgggtaatgaagatcgngtnaggagcaggacgatncccaaggaaggtggatgcaattctttgcgttgctggaggatgggccgggggcaatgccaaatccaagtctctctttaagaactgtgacctgatgtggaagcagagcatatggacatcgaccatctccagccatctggctaccaagcatctcaaggaaggaggcctcctgaccttggctggcgcaaaggctgccctggatgggactcctggtatgatcgggtacggcatggccaagggtgctgttcaccagctctgccagagcctggctgggaagaacagcggcatgccgcccggggcagccgccatcgctgtgctcccggttaccctggataccccgatgaacaggaaatcaatgcctgaggctgacttcagctcctggacacccttagaattcctagttgaaactttccatgactggatcacagggaaaaaccgaccgagctcaggaagcctaatccaggtggtaaccacagaaggaaggacggaactcaccccagcatatttttaggcctcatctcagtgcctatgaggggcctgccagaaaagtcactaacctgtctcagtgtggccttgtccagccttgtgttttctgtaacccctgtttgtggtacgagataatgagtcctatttttctctcacataatatgcatttgctctcctaggacagtgtaatacatttatgtgaagtaaagacatgcgagactggtggcctgcaaatagcatccgtcaatctgtgttaactgcatagggagggctctgcatagcacctgctatagcggtgtcatgttggatcgcttttgtgactgttcatctgtccttgacagtggctgtcatcttgactactttgttgatttgttggtattggggacattttaaaggctgagttatttttgaatgtcatgtttatgtcatagacgtagttttcgcatccttgaattaaactgccttaactccttttgtggtataagcaaaactccatggactctgtcctggtatccttttcctgtgtggttgccctgtgtcctctggcctagggttaagtgtgcaagataactactcgtgagtattcagaatgttgttcctaataaatgcacttgttgtctgtcttctttaatcaaatcacatcttatatacagcagtcagagatgagtatactagaatcatggattgctggaggtcttttaatctggtgttctcagaagggggtggatttaaatcctgaaataaatatttcaacacaa

SEQ ID NO: 310342 - DNA, 1469 bp, Homo sapiens
agttacagtccctccgggtggcggggcgccgcgagcgtggcagcgcgctaggcggcagcagcgggcgcggagcggggcgcggccgccgcgcgttccctcttggcggggttggccggccggggcggggcgcggcgctccggctcgaggcattcggagctgcgggagccgggctggcaggagcaggatggcggcggcggcggctgcaggcgaggcgcgccgggtgctggtgtacggcggcaggggcgctctgggttctcgatgcgtgcaggcttttcgggcccgcaactggtgggttgccagcgttgatgtggtggagaatgaagaggccagcgctagcatcattgttaaaatgacagactcgttcactgagcaggctgaccaggaaggaggcctcctgaccttggctggcgcaaaggctgccctggatgggactcctggtatgatcgggtacggcatggccaagggtgctgttcaccagctctgccagagcctggctgggaagaacagcggcatgccgcccggggcagccgccatcgctgtgctcccggttaccctggataccccgatgaacaggaaatcaatgcctgaggctgacttcagctcctggacacccttagaattcctagttgaaactttccatgactggatcacagggaaaaaccgaccgagctcaggaagcctaatccaggtggtaaccacagaaggaaggacggaactcaccccagcatatttttaggcctcatctcagtgcctatgaggggcctgccagaaaagtcactaacctgtctcagtgtggccttgtccagccttgtgttttctgtaacccctgtttgtggtacgagataatgagtcctatttttctctcacataatatgcatttgctctcctaggacagtgtaatacatttatgtgaagtaaagacatgcgagactggtggcctgcaaatagcatccgtcaatctgtgttaactgcatagggagggctctgcatagcacctgctatagcggtgtcatgttggatcgcttttgtgactgttcatctgtccttgacagtggctgtcatcttgactactttgttgatttgttggtattggggacattttaaaggctgagttatttttgaatgtcatgtttatgtcatagacgtagttttcgcatccttgaattaaactgccttaactccttttgtggtataagcaaaactccatggactctgtcctggtatccttttcctgtgtggttgccctgtgtcctctggcctagggttaagtgtgcaagataactactcgtgagtattcagaatgttgttcctaataaatgcacttgttgtctgtcttctttaatcaaatcacatcttatatacagcagtcagagatgagtatactagaatcatggattgctggaggtcttttaatctggtgttctcagaagggggtggatttaaatcctgaaataaatatttcaacacaa

SEQ ID NO: 310343 - DNA, 1311 bp, Homo sapiens
agttacagtccctccgggtggcggggcgccgcgagcgtggcagcgcgctaggcggcagcagcgggcgcggagcggggcgcggccgccgcgcgttccctcttggcggggttggccggccggggcggggcgcggcgctccggctcgaggcattcggagctgcgggagccgggctggcaggagcaggatggcggcggcggcggctgcaggcgaggcgcgccgggtgctggtgtacggcggcaggggcgctctgggttctcgatgcgtgcaggcttttcgggcccgcaactggtgggttgccagcgttgatgtggtggagaatgaagaggccagcgctagcatcattgttaaaatgacagactcgttcactgagcaggctgaccaggtgactgctgaggttggaaagctcttgggtgaagagaaggtggatgcaattctttgcgttgctggaggatgggccgggggcaatgccaaatccaagtctctctttaagaactgtgacctgatgtggaagcagagcatatggacatcgaccatctccagccatctggctaccaagcatctcaaggaaggaggcctcctgaccttggctggcgcaaaggctgccctggatgggactcctggtatgatcgggtacggcatggccaagggtgctgttcaccagctctgccagagcctggctgggaagaacagcggcatgccgcccggggcagccgccatcgctgtgctcccggttaccctggataccccgatgaacaggaaatcaatgcctgaggctgacttcagctcctggacacccttagaattcctagttgaaactttccatgactggatcacagggaaaaaccgaccgaggcctcatctcagtgcctatgaggggcctgccagaaaagtcactaacctgtctcagtgtggccttgtccagccttgtgttttctgtaacccctgtttgtggtacgagataatgagtcctatttttctctcacataatatgcatttgctctcctaggacagtgtaatacatttatgtgaagtaaagacatgcgagactggtggcctgcaaatagcatccgtcaatctgtgttaactgcatagggagggctctgcatagcacctgctatagcggtgtcatgttggatcgcttttgtgactgttcatctgtccttgacagtggctgtcatcttgactactttgttgatttgttggtattggggacattttaaaggctgagttatttttgaatgtcatgtttatgtcatagacgtagttttcgcatccttgaattaaactgccttaactccttttgtggtataa

SEQ ID NO: 310344 - DNA, 1205 bp, Homo sapiens
gctctctgccattttttgatgggggttggtgagggcgtctgacctgaaggaggaggccagatgcagctatttataaagtttttagggaatagagatctcaagagaagattgcatgtccttgctgtccccctggccgccagtggtcactgagccatcttctccccatttcccaggtatgatcgggtacggcatggccaagggtgctgttcaccagctctgccagagcctggctgggaagaacagcggcatgccgcccggggcagccgccatcgctgtgctcccggttaccctggataccccgatgaacaggaaatcaatgcctgaggctgacttcagctcctggacacccttagaattcctagttgaaactttccatgactggatcacagggaaaaaccgaccgagctcaggaagcctaatccaggtggtaaccacagaaggaaggacggaactcaccccagcatatttttaggcctcatctcagtgcctatgaggggcctgccagaaaagtcactaacctgtctcagtgtggccttgtccagccttgtgttttctgtaacccctgtttgtggtacgagataatgagtcctatttttctctcacataatatgcatttgctctcctaggacagtgtaatacatttatgtgaagtaaagacatgcgagactggtggcctgcaaatagcatccgtcaatctgtgttaactgcatagggagggctctgcatagcacctgctatagcggtgtcatgttggatcgcttttgtgactgttcatctgtccttgacagtggctgtcatcttgactactttgttgatttgttggtattggggacattttaaaggctgagttatttttgaatgtcatgtttatgtcatagacgtagttttcgcatccttgaattaaactgccttaactccttttgtggtataagcaaaactccatggactctgtcctggtatccttttcctgtgtggttgccctgtgtcctctggcctagggttaagtgtgcaagataactactcgtgagtattcagaatgttgttcctaataaatgcacttgttgtctgtcttctttaatcaaatcacatcttatatacagcagtcagagatgagtatactagaatcatggattgctggaggtcttttaatctggtgttctcagaagggggtggatttaaatcctgaaataaatatttcaacacaa

SEQ ID NO: 310345 - DNA, 1543 bp, Homo sapiens
agttacagtccctccgggtggcggggcgccgcgagcgtggcagcgcgctaggcggcagcagcgggcgcggagcggggcgcggccgccgcgcgttccctcttggcggggttggccggccggggcggggcgcggcgctccggctcgaggcattcggagctgcgggagccgggctggcaggagcaggatggcggcggcggcggctgcaggcgaggcgcgccgggtgctggtgtacggcggcaggggcgctctgggttctcgatgcgtgcaggcttttcgggcccgcaactggtgggttgccagcgttgatgtggtggagaatgaagaggccagcgctagcatcattgttaaaatgacagactcgttcactgagcaggctgaccaggtgactgctgaggttggaaagctcttgggtgaagagaaggtggatgcaattctttgcgttgctggaggatgggccgggggcaatgccaaatccaagtctctctttaagaactgtgacctgatgtggaagcagagcatatggacatcgaccatctccagccatctggctaccaagcatctcaaggaaggaggcctcctgaccttggctggcgcaaaggctgccctggatgggactcctgggttaccctggataccccgatgaacaggaaatcaatgcctgaggctgacttcagctcctggacacccttagaattcctagttgaaactttccatgactggatcacagggaaaaaccgaccgagctcaggaagcctaatccaggtggtaaccacagaaggaaggacggaactcaccccagcatatttttaggcctcatctcagtgcctatgaggggcctgccagaaaagtcactaacctgtctcagtgtggccttgtccagccttgtgttttctgtaacccctgtttgtggtacgagataatgagtcctatttttctctcacataatatgcatttgctctcctaggacagtgtaatacatttatgtgaagtaaagacatgcgagactggtggcctgcaaatagcatccgtcaatctgtgttaactgcatagggagggctctgcatagcacctgctatagcggtgtcatgttggatcgcttttgtgactgttcatctgtccttgacagtggctgtcatcttgactactttgttgatttgttggtattggggacattttaaaggctgagttatttttgaatgtcatgtttatgtcatagacgtagttttcgcatccttgaattaaactgccttaactccttttgtggtataagcaaaactccatggactctgtcctggtatccttttcctgtgtggttgccctgtgtcctctggcctagggttaagtgtgcaagataactactcgtgagtattcagaatgttgttcctaataaatgcacttgttgtctgtcttctttaatcaaatcacatcttatatacagcagtcagagatgagtatactagaatcatggattgctggaggtcttttaatctggtgttctcagaagggggtggatttaaatcctgaaataaatatttcaacacaa

SEQ ID NO: 310346 - DNA, 1470 bp, Homo sapiens
cgggcgtgcacgccgctagcgcacacgccgacgggcgcgcgcggcgtccctctggcgggtggcgcgggcgggcgcggctcggtcgaaggcatcggactgccgagcggctgcggacggatgcggggggggtgcggcgaggcgcgccgggtgctggtgtacggcggcaggggcgctctgggttctcgatgcgtgcaggcttttcgggcccgcaactggtgggttgccagcgttgatgtggtggagaatgaagaggccagcgctagcatcattgttaaaatgacagactcgttcactgagcaggctgaccaggtgactgctgaggttggaaagctcttgggtgaagagaaggtggatgcaattctttgcgttgctggaggatgggccgggggcaatgccaaatccaagtctctctttaagaactgtgacctgatgtggaagcagagcatatggacatcgaccatctccagccatctggctaccaagcatctcaaggaaggaggcctcctgaccttggctggcgcaaaggctgccctggatgggactcctgggttaccctggataccccgatgaacaggaaatcaatgcctgaggctgacttcagctcctggacacccttagaattcctagttgaaactttccatgactggatcacagggaaaaaccgaccgagctcaggaagcctaatccaggtggtaaccacagaaggaaggacggaactcaccccagcatatttttaggcctcatctcagtgcctatgaggggcctgccagaaaagtcactaacctgtctcagtgtggccttgtccagccttgtgttttctgtaacccctgtttgtggtacgagataatgagtcctatttttctctcacataatatgcatttgctctcctaggacagtgtaatacatttatgtgaagtaaagacatgcgagactggtggcctgcaaatagcatccgtcaatctgtgttaactgcatagggagggctctgcatagcacctgctatagcggtgtcatgttggatcgcttttgtgactgttcatctgtccttgacagtggctgtcatcttgactactttgttgatttgttggtattggggacattttaaaggctgagttatttttgaatgtcatgtttatgtcatagacgtagttttcgcatccttgaattaaactgccttaactccttttgtggtataagcaaaactccatggactctgtcctggtatccttttcctgtgtggttgccctgtgtcctctggcctagggttaagtgtgcaagataactactcgtgagtattcagaatgttgttcctaataaatgcacttgttgtctgtcttctttaatcaaatcacatcttatatacagcagtcagagatgagtatactagaatcatggattgctggaggtcttttaatctggtgttctcagaagggggtggatttaaatcctgaaataaatatttcaacacaa

SEQ ID NO: 310347 - DNA, 1585 bp, Homo sapiens
agttacagtccctccgggtggcggggcgccgcgagcgtggcagcgcgctaggcggcagcagcgggcgcggagcggggcgcggccgccgcgcgttccctcttggcggggttggccggccggggcggggcgcggcgctccggctcgaggcattcggagctgcgggagccgggctggcaggagcaggatggcggcggcggcggctgcaggcgaggcgcgccgggtgctggtgtacggcggcaggggcgctctgggttctcgatgcgtgcaggcttttcgggcccgcaactggatttgagtaacaacagataccatatggccagcaaagcctaagtgggttgccagcgttgatgtggtggagaatgaagaggccagcgctagcatcattgttaaaatgacagactcgttcactgagcaggctgaccaggtgactgctgaggttggaaagctcttgggtgaagagaaggtggatgcaattctttgcgttgctggaggatgggccgggggcaatgccaaatccaagtctctctttaagaactgtgacctgatgtggaagcagagcatatggacatcgaccatctccagccatctggctaccaagcatctcaaggaaggaggcctcctgaccttggctggcgcaaaggctgccctggatgggactcctgggttaccctggataccccgatgaacaggaaatcaatgcctgaggctgacttcagctcctggacacccttagaattcctagttgaaactttccatgactggatcacagggaaaaaccgaccgagctcaggaagcctaatccaggtggtaaccacagaaggaaggacggaactcaccccagcatatttttaggcctcatctcagtgcctatgaggggcctgccagaaaagtcactaacctgtctcagtgtggccttgtccagccttgtgttttctgtaacccctgtttgtggtacgagataatgagtcctatttttctctcacataatatgcatttgctctcctaggacagtgtaatacatttatgtgaagtaaagacatgcgagactggtggcctgcaaatagcatccgtcaatctgtgttaactgcatagggagggctctgcatagcacctgctatagcggtgtcatgttggatcgcttttgtgactgttcatctgtccttgacagtggctgtcatcttgactactttgttgatttgttggtattggggacattttaaaggctgagttatttttgaatgtcatgtttatgtcatagacgtagttttcgcatccttgaattaaactgccttaactccttttgtggtataagcaaaactccatggactctgtcctggtatccttttcctgtgtggttgccctgtgtcctctggcctagggttaagtgtgcaagataactactcgtgagtattcagaatgttgttcctaataaatgcacttgttgtctgtcttctttaatcaaatcacatcttatatacagcagtcagagatgagtatactagaatcatggattgctggaggtcttttaatctggtgttctcagaagggggtggatttaaatcctgaaataaatatttcaacacaa

SEQ ID NO: 310348 - DNA, 1450 bp, Homo sapiens
agttacagtccctccgggtggcggggcgccgcgagcgtggcagcgcgctaggcggcagcagcgggcgcggagcggggcgcggccgccgcgcgttccctcttggcggggttggccggccggggcggggcgcggcgctccggctcgaggcattcggagctgcgggagccgggctggcaggagcaggatggcggcggcggcggctgcaggcgaggcgcgccgggtgctggtgtacggcggcaggggcgctctgggttctcgatgcgtgcaggcttttcgggcccgcaactgggtgactgctgaggttggaaagctcttgggtgaagagaaggtggatgcaattctttgcgttgctggaggatgggccgggggcaatgccaaatccaagtctctctttaagaactgtgacctgatgtggaagcagagcatatggacatcgaccatctccagccatctggctaccaagcatctcaaggaaggaggcctcctgaccttggctggcgcaaaggctgccctggatgggactcctgggttaccctggataccccgatgaacaggaaatcaatgcctgaggctgacttcagctcctggacacccttagaattcctagttgaaactttccatgactggatcacagggaaaaaccgaccgagctcaggaagcctaatccaggtggtaaccacagaaggaaggacggaactcaccccagcatatttttaggcctcatctcagtgcctatgaggggcctgccagaaaagtcactaacctgtctcagtgtggccttgtccagccttgtgttttctgtaacccctgtttgtggtacgagataatgagtcctatttttctctcacataatatgcatttgctctcctaggacagtgtaatacatttatgtgaagtaaagacatgcgagactggtggcctgcaaatagcatccgtcaatctgtgttaactgcatagggagggctctgcatagcacctgctatagcggtgtcatgttggatcgcttttgtgactgttcatctgtccttgacagtggctgtcatcttgactactttgttgatttgttggtattggggacattttaaaggctgagttatttttgaatgtcatgtttatgtcatagacgtagttttcgcatccttgaattaaactgccttaactccttttgtggtataagcaaaactccatggactctgtcctggtatccttttcctgtgtggttgccctgtgtcctctggcctagggttaagtgtgcaagataactactcgtgagtattcagaatgttgttcctaataaatgcacttgttgtctgtcttctttaatcaaatcacatcttatatacagcagtcagagatgagtatactagaatcatggattgctggaggtcttttaatctggtgttctcagaagggggtggatttaaatcctgaaataaatatttcaacacaa

SEQ ID NO: 310349 - DNA, 1309 bp, Homo sapiens
agcatatggacatcgaccatctccagccatctggctaccaagcatctcaaggaaggaggcctcctgaccttggctggcgcaaaggctgccctggatgggactcctggtatgatcgggtacggcggcaggggcgctctgggttctcgatgcgtgcaggcttttcgggcccgcaactggtgggttgccagcgttgatgtggtggagaatgaagaggccagcgctagcatcattgttaaaatgacagactcgttcactgagcaggctgaccaggtgactgctgaggttggaaagctcttgggtgaagagaaggtggatgcaattctttgcgttgctggaggatgggccgggggcaatgccaaatccaagtttatctgtgtccattgcagggttaccctggataccccgatgaacaggaaatcaatgcctgaggctgacttcagctcctggacacccttagaattcctagttgaaactttccatgactggatcacagggaaaaaccgaccgagctcaggaagcctaatccaggtggtaaccacagaaggaaggacggaactcaccccagcatatttttaggcctcatctcagtgcctatgaggggcctgccagaaaagtcactaacctgtctcagtgtggccttgtccagccttgtgttttctgtaacccctgtttgtggtacgagataatgagtcctatttttctctcacataatatgcatttgctctcctaggacagtgtaatacatttatgtgaagtaaagacatgcgagactggtggcctgcaaatagcatccgtcaatctgtgttaactgcatagggagggctctgcatagcacctgctatagcggtgtcatgttggatcgcttttgtgactgttcatctgtccttgacagtggctgtcatcttgactactttgttgatttgttggtattggggacattttaaaggctgagttatttttgaatgtcatgtttatgtcatagacgtagttttcgcatccttgaattaaactgccttaactccttttgtggtataagcaaaactccatggactctgtcctggtatccttttcctgtgtggttgccctgtgtcctctggcctagggttaagtgtgcaagataactactcgtgagtattcagaatgttgttcctaataaatgcacttgttgtctgtcttctttaatcaaatcacatcttatatacagcagtcagagatgagtatactagaatcatggattgctggaggtcttttaatctggtgttctcagaagggggtggatttaaatcctgaaataaatatttcaacacaa

SEQ ID NO: 310350 - DNA, 1272 bp, Homo sapiens
agttacagtccctccgggtggcggggcgccgcgagcgtggcagcgcgctaggcggcagcagcgggcgcggagcggggcgcggccgccgcgcgttccctcttggcggggttggccggccggggcggggcgcggcgctccggctcgaggcattcggagctgcgggagccgggctggcaggagcaggatggcggcggcggcggctgcaggcgaggcgcgccgggtgctggtgtacggcggcaggggcgctctgggttctcgatgcgtgcaggcttttcgggcccgcaactggtgggttgccagcgttgatgtggtggagaatgaagaggccagcgctagcatcattgttaaaatgacagactcgttcactgagcaggctgaccagaatgcctgaggctgacttcagctcctggacacccttagaattcctagttgaaactttccatgactggatcacagggaaaaaccgaccgagctcaggaagcctaatccaggtggtaaccacagaaggaaggacggaactcaccccagcatatttttaggcctcatctcagtgcctatgaggggcctgccagaaaagtcactaacctgtctcagtgtggccttgtccagccttgtgttttctgtaacccctgtttgtggtacgagataatgagtcctatttttctctcacataatatgcatttgctctcctaggacagtgtaatacatttatgtgaagtaaagacatgcgagactggtggcctgcaaatagcatccgtcaatctgtgttaactgcatagggagggctctgcatagcacctgctatagcggtgtcatgttggatcgcttttgtgactgttcatctgtccttgacagtggctgtcatcttgactactttgttgatttgttggtattggggacattttaaaggctgagttatttttgaatgtcatgtttatgtcatagacgtagttttcgcatccttgaattaaactgccttaactccttttgtggtataagcaaaactccatggactctgtcctggtatccttttcctgtgtggttgccctgtgtcctctggcctagggttaagtgtgcaagataactactcgtgagtattcagaatgttgttcctaataaatgcacttgttgtctgtcttctttaatcaaatcacatcttatatacagcagtcagagatgagtatactagaatcatggattgctggaggtcttttaatctggtgttctcagaagggggtggatttaaatcctgaaataaatatttcaacacaa

SEQ ID NO: 310351 - DNA, 1459 bp, Homo sapiens
agttacagtccctccgggtggcggggcgccgcgagcgtggcagcgcgctaggcggcagcagcgggcgcggagcggggcgcggccgccgcgcgttccctcttggcggggttggccggccggggcggggcgcggcgctccggctcgaggcattcggagctgcgggagccgggctggcaggagcaggatggcggcggcggcggctgcaggcgaggcgcgccgggtgctggtgtacggcggcaggggcgctctgggttctcgatgcgtgcaggcttttcgggcccgcaactggtgggttgccagcgttgatgtggtggagaatgaagaggccagcgctagcatcattgttaaaatgacagactcgttcactgagcaggctgaccaggtgactgctgaggttggaaagctcttgggtgaagagaaggtggatgcaattctttgcgttgctggaggatgggccgggggcaatgccaaatccaagtctctctttaagaactgtgacctgatgtggaagcagagcatatggacatcgaccatctccagccatctggctaccaagcatctcaaggaaggaggcctcctgaccttggctggcgcaaaggctgccctggatgggactcctgaactttccatgactggatcacagggaaaaaccgaccgagctcaggaagcctaatccaggtggtaaccacagaaggaaggacggaactcaccccagcatatttttaggcctcatctcagtgcctatgaggggcctgccagaaaagtcactaacctgtctcagtgtggccttgtccagccttgtgttttctgtaacccctgtttgtggtacgagataatgagtcctatttttctctcacataatatgcatttgctctcctaggacagtgtaatacatttatgtgaagtaaagacatgcgagactggtggcctgcaaatagcatccgtcaatctgtgttaactgcatagggagggctctgcatagcacctgctatagcggtgtcatgttggatcgcttttgtgactgttcatctgtccttgacagtggctgtcatcttgactactttgttgatttgttggtattggggacattttaaaggctgagttatttttgaatgtcatgtttatgtcatagacgtagttttcgcatccttgaattaaactgccttaactccttttgtggtataagcaaaactccatggactctgtcctggtatccttttcctgtgtggttgccctgtgtcctctggcctagggttaagtgtgcaagataactactcgtgagtattcagaatgttgttcctaataaatgcacttgttgtctgtcttctttaatcaaatcacatcttatatacagcagtcagagatgagtatactagaatcatggattgctggaggtcttttaatctggtgttctcagaagggggtggatttaaatcctgaaataaatatttcaacacaa

SEQ ID NO: 310352 - DNA, 1634 bp, Homo sapiens
agttacagtccctccgggtggcggggcgccgcgagcgtggcagcgcgctaggcggcagcagcgggcgcggagcggggcgcggccgccgcgcgttccctcttggcggggttggccggccggggcggggcgcggcgctccggctcgaggcattcggagctgcgggagccgggctggcaggagcaggatggcggcggcggcggctgcaggcgaggcgcgccgggtgctggtgtacggcggcaggggcgctctgggttctcgatgcgtgcaggcttttcgggcccgcaactggtgggttgccagcgttgatgtggtggagaatgaagaggccagcgctagcatcattgttaaaatgacagactcgttcactgagcaggctgaccaggtgactgctgaggttggaaagctcttgggtgaagagaaggtggatgcaattctttgcgttgctggaggatgggccgggggcaatgccaaatccaagtctctctttaagaactgtgacctgatgtggaagcagagcatatggacatcgaccatctccagccatctggctaccaagcatctcaaggaaggaggcctcctgaccttggctggcgcaaaggctgccctggatgggactcctggtatgatcgggtacggcatggccaagggtgctgttcaccagctctgccagagcctggctgggaagaacagcggcatgccgcccggggcagccgccatcgctgtgctcccggttaccctggataccccgatgaacaggaaatcaatgcctgaggctgacttcagctcctggacacccttagaattcctagttgagccgacactcccaccacacttgagatactgatctaagacctactctagatggaacatctgggatcttgtgtctgaactcgtgctgagccacagacccacagaggacgggctgtcacaggcccccttttgttctagagatcacatccacccatttgtggtatttgaaaactctcagaaaagctggcataaagtttgctttgagatgtctgtgagcacatccttcctctaccatccctggttagaatggcgttctcactcacctatccacgctgcagatgagggtgaagaagtaaaaccatttaaaacatgcatcgcagcaaaccaacatggcacatgcatacctgtgtagcaaacctgcacgctgtgcacatgtagcctagatcttaaagtataaaaaaacaaaacaacaaaaaaacatgtgtaaccaacacacaaaaccctacacaaccaaacggcactggtctctttcagagccttccctcaccaagccctaccctgtccccagagatgaggccatgacatgacagtactttagagagttttagcaacgctttgttttttgagcccatgtgctcatatgagcttgttcaaaccccagagtaggggcctgaatgactggacctttacacatcagcgctggcccagaaggttacagattggcactgggagtctcccaggaaggaaatgctgagcactttttagttaatgaaggtccgaagtctcagctggtgaattgtcaaaatggatgatgtactcaaatgtaaatgttttgtgttaaagaattattcatctacttcttgtttcttgtgaatttcttttgc

SEQ ID NO: 310353 - DNA, 1365 bp, Homo sapiens
agttacagtccctccgggtggcggggcgccgcgagcgtggcagcgcgctaggcggcagcagcgggcgcggagcggggcgcggccgccgcgcgttccctcttggcggggttggccggccggggcggggcgcggcgctccggctcgaggcattcggagctgcgggagccgggctggcaggagcaggatggcggcggcggcggctgcaggcgaggcgcgccgggtgctggtgtacggcggcaggggcgctctgggttctcgatgcgtgcaggcttttcgggcccgcaactggtgggttgccagcgttgatgtggtggagaatgaagaggccagcgctagcatcattgttaaaatgacagactcgttcactgagcaggctgaccaggtgactgctgaggttggaaagctcttgggtgaagagaaggtggatgcaattctttgcgttgctggaggatgggccgggggcaatgccaaatccaagtctctctttaagaactgtgacctgatgtggaagcagagcatatggacatcgaccatctccagccatctggctaccaagcatctcaagctcaggaagcctaatccaggtggtaaccacagaaggaaggacggaactcaccccagcatatttttaggcctcatctcagtgcctatgaggggcctgccagaaaagtcactaacctgtctcagtgtggccttgtccagccttgtgttttctgtaacccctgtttgtggtacgagataatgagtcctatttttctctcacataatatgcatttgctctcctaggacagtgtaatacatttatgtgaagtaaagacatgcgagactggtggcctgcaaatagcatccgtcaatctgtgttaactgcatagggagggctctgcatagcacctgctatagcggtgtcatgttggatcgcttttgtgactgttcatctgtccttgacagtggctgtcatcttgactactttgttgatttgttggtattggggacattttaaaggctgagttatttttgaatgtcatgtttatgtcatagacgtagttttcgcatccttgaattaaactgccttaactccttttgtggtataagcaaaactccatggactctgtcctggtatccttttcctgtgtggttgccctgtgtcctctggcctagggttaagtgtgcaagataactactcgtgagtattcagaatgttgttcctaataaatgcacttgttgtctgtcttctttaatcaaatcacatcttatatacagcagtcagagatgagtatactagaatcatggattgctggaggtcttttaatctggtgttctcagaagggggtggatttaaatcctgaaataaatatttcaacacaa

SEQ ID NO: 310354 - DNA, 1204 bp, Homo sapiens
ggctcaggaagcctaatccaggtggtaaccacagaagaaggtggatgcaattctttgcgttgctggaggatgggccgggggcaatgccaaatccaagtctctctttaagaactgtgacctgatgtggaagcagagcatatggacatcgaccatctccagccatctggctaccaagcatctcaaggaaggaggcctcctgaccttggctggcgcaaaggctgccctggatgggactcctggtatgatcgggtacggcatggccaagggtgctgttcaccagctctgccagagcctggctgggaagaacagcggcatgccgcccggggcagccgccatcgctgtgctcccggttaccctggataccccgatgaacaggaaatcaatgcctgaggctgacttcagctcctggacacccttagaattcctagttgaaactttccatgactggatcacagggaaaaaccgaccgaggcctcatctcagtgcctatgaggggcctgccagaaaagtcactaacctgtctcagtgtggccttgtccagccttgtgttttctgtaacccctgtttgtggtacgagataatgagtcctatttttctctcacataatatgcatttgctctcctaggacagtgtaatacatttatgtgaagtaaagacatgcgagactggtggcctgcaaatagcatccgtcaatctgtgttaactgcatagggagggctctgcatagcacctgctatagcggtgtcatgttggatcgcttttgtgactgttcatctgtccttgacagtggctgtcatcttgactactttgttgatttgttggtattggggacattttaaaggctgagttatttttgaatgtcatgtttatgtcatagacgtagttttcgcatccttgaattaaactgccttaactccttttgtggtataagcaaaactccatggactctgtcctggtatccttttcctgtgtggttgccctgtgtcctctggcctagggttaagtgtgcaagataactactcgtgagtattcagaatgttgttcctaataaatgcacttgttgtctgtcttctttaatcaaatcacatcttatatacagcagtcagagatgagtatactagaatcatggattgctggaggtcttttaatctggtgttctcagaagggggtggatttaaatcctgaaataaatatttcaacacaa

SEQ ID NO: 310355 - DNA, 1117 bp, Homo sapiens
agttacagtccctccgggtggcggggcgccgcgagcgtggcagcgcgctaggcggcagcagcgggcgcggagcggggcgcggccgccgcgcgttccctcttggcggggttggccggccggggcggggcgcggcgctccggctcgaggcattcggagctgcgggagccgggctggcaggagcaggatggcggcggcggcggctgcaggcgaggcgcgccgggtgctggtgtacggcggcaggggcgctctgggttctcgatgcgtgcaggcttttcgggcccgcaactggtgggttgccagcgttgatgtggtggagaatgaagaggccagcgctagcatcattgttaaaatgacagactcgttcactgagcaggctgaccaggtgactgctgaggttggaaagctcttgggtgaagagaaggtggatgcaattctttgcgttgctggaggatgggccgggggcaatgccaaatccaagtctctctttaagaactgtgacctgatgtggaagcagagcatatggacatcgaccatctccagccatctggctaccaagcatctcaaggcctaccaagaccaagagctaggcgcaaaaagcaacccagagaaaggacaccaagaaaaaacagatagcagacaaagccaaaaagagcaatcaccagcgacgatccagagcctaggctaaggaaggaacaagcggcaaagccagcccgagaattcatgccatgcagacagcgagaagcggcccaggtggagcgcgagagagagctgccagagatatgcatggaaaatctatagcgcagatatcgagatcaacagggcgtaccgagagacacctcgaaaggaagagcctaagagaaagacaacgaggagctccataaaacggaaataggacaacgagcaagaaaaggaaagccggatccgaagatcccacaagaaaaaggcccggagaaaccaagataaaatgaaaacccgcggatgagtatttaacagagagccgaaaactgaacaagccgccgaagtcgtgaagaaagtgggattatcccacctagaacagctagaggcgcaagaaaagaataattgtcccgaagcgccggaaaggtagtacacgagagac

SEQ ID NO: 310356 - DNA, 1186 bp, Homo sapiens
atgcacagttgcagttagttattccaggtattatttttgttttcagaaaaagaaaactcagtagaagataatggcaagtccagactggggatatgatgacaaaaatggtcctgaacaatggagcaagctgtatcccattgccaatggaaataaccagtcccctgttgatattaaaaccagtgaaaccaaacatgacacctctctgaaacctattagtgtctcctacaacccagccacagccaaagaaattatcaatgtggggcattccttccatgtaaattttgaggacaacgataaccgatcagtgctgaaaggtggtcctttctctgacagctacaggctctttcagttccattttcactggggcagtacaaatgagcatggttcagaacatacagtggatggagtcaaatattctgccgagcttcacgtagctcactggaattctgcaaagtactccagccttgctgaagctgcctcaaaggctgatggtttggcagttattggtgttttgatgaaggttggtgaggccaacccaaagctgcagaaagtacttgatgccctccaagcaattaaaaccaagggcaaacgagccccattcacaaattttgacccctctactctccttccttcatccctggatttctggacctaccctggctctctgactcatcctcctctttatgagagtgtaacttggatcatctgtaaggagagcatcagtgtcagctcagagcagctggcacaattccgcagccttctatcaaatgttgaaggtgataacgctgtccccatgcagcacaacaaccgcccaacccaacctctgaagggcagaacagtgagagcttcattttgatgattctgagaagaaacttgtccttcctcaagaacacagccctgcttctgacataatccagtaaaataataatttttaagaaataaatttatttcaatattagcaagacagcatgccttcaaatcaatctgtaaaactaagaaacttaaattttagttcttactgcttaattcaaataataattagtaagctagcaaatagtaatctgtaagcataagcttatgcttaaattcaagtttagtttgaggaattctttaaaattacaactaagtgatttgtatgtctatttttttcagtttatttgaaccaataaaataattttatctcttt

SEQ ID NO: 310357 - DNA, 2785 bp, Homo sapiens
ctttagcccaacagtcaaaaataattgatgctaccctacaaatgtccaaaactctagtatatcatatttctaagttacagcaaatattagtcctgctaaaccagggagctttggcaaaaatgttttttgacagtaaatttgtccttgattatatattaactagtcaaagaggtgtttgtaacattattagagcttcttgttgtaggtgggttaacaccaccaatcaagaggtcattctaacagaaagcctggatcagaaaaccatcaccctaaaaaaacatgccttacatatttaacacactctgaaatccagtcaaaatatgactaaaggcccttgccatgactgatgtattctcctggccaacgccaaacaaatgggagcctggttacgagtcagccttcagggacttgtcacatttctacttggtttcttccttgttattgtcataataaaatgttttctatgctgtttagtgcaacttaggccctattctgtagaagtctcctctactattcaggccactcaaacaccccaaataattgagttcaaaatcgacatcaagatataaaggaatcagtgactaaatatatttcatatatggtatttttattgattattgtgctgtcttgacctagtatggaggccttggctagaggctggtcagtttcctctcttgagcagctgattaaatccacaccccaaccacttcccttatcaggttctcacactctggggccactatgtacccactctaatcaccacagggccagacatcagacaattaaggacagcgcccatgccccaaagcccgccaaaattatgcaaattattcaaaattattcaacctagctaaccccaccctttttgctgtacataagctgcccattccccctccagcctgtggtacccagtcctcaggtgcaaccccctgcgtggtcctctgtggcagccttctctcattcagagctgttttccacagaggtagtgaaaagaactggattttcaagttcactttgcaagagaaaaagaaaactcagtagaagataatggcaagtccagactggggatatgatgacaaaaatggtcctgaacaatggagcaagctgtatcccattgccaatggaaataaccagtcccctgttgatattaaaaccagtgaaaccaaacatgacacctctctgaaacctattagtgtctcctacaacccagccacagccaaagaaattatcaatgtggggcattccttccatgtaaattttgaggacaacgataaccgatcagtgctgaaaggtggtcctttctctgacagctacaggctctttcagttccattttcactggggcagtacaaatgagcatggttcagaacatacagtggatggagtcaaatattctgccgagcttcacgtagctcactggaattctgcaaagtactccagccttgctgaagctgcctcaaaggctgatggtttggcagttattggtgttttgatgaaggttggtgaggccaacccaaagctgcagaaagtacttgatgccctccaagcaattaaaaccaagggcaaacgagccccattcacaaattttgacccctctactctccttccttcatccctggatttctggacctaccctggctctctgactcatcctcctctttatgagagtgtaacttggatcatctgtaaggagagcatcagtgtcagctcagagcagctggcacaattccgcagccttctatcaaatgttgaaggtgataacgctgtccccatgcagcacaacaaccgcccaacccaacctctgaagggcagaacagtgagagcttcattttgatgattctgagaagaaacttgtccttcctcaagaacacagccctgcttctgacataatccagtaaaataataatttttaagaaataaatttatttcaatattagcaagacagcatgccttcaaatcaatctgtaaaactaagaaacttaaattttagttcttactgcttaattcaaataataattagtaagctagcaaatagtaatctgtaagcataagcttatgcttaaattcaagtttagtttgaggaattctttaaaattacaactaagtgatttgtatgtctatttttttcagtttatttgaaccaataaaataattttatctctttctttctgttgtgcattcagtttctaaaaccattaagtttctactccatttacattcaaaaatcttaaatactttacttgcaagagtattttgcttcaaatacaacaacctaagagcagctggagatgaaatattgggaaattcatttgcttactcctgaagacaaaaatatagctgagatgaccactggatttaatatcgttatgctggcccaacattgctaccatttgtgttgtctgtgatcaaaatgattatcttttatataggaagatgacgcttctggatattgctttcacttcttctccccacgttagcaaggacaatgcttctctgccattattacaactagttagtttgcatggagaatctttactttaaaattggaagaaaagtcacaagtgaatggtttataaaaatgctaaagaagtcattcttgcttagaatcatatagaaacatcatgcaatcttttagtcagatgtgcgcttcaccttatgctatttttatctttaattgacacacaataattgtacatgtttatggagtatagtgtggtgttttctgtttgtttgtttgttttttgagacaaggtctcactctgccagtcagggtggagtgcgatggt

SEQ ID NO: 310358 - DNA, 1520 bp, Homo sapiens
ctttagcccaacagtcaaaaataattgatgctaccctacaaatgtccaaaactctagtatatcatatttctaagttacagcaaatattagtcctgctaaaccagggagctttggcaaaaatgttttttgacagtaaatttgtccttgattatatattaactagtcaaagaggtgtttgtaacattattagagcttcttgttgtaggtgggttaacaccaccaatcaagaggtcattctaacagaaagcctggatcagaaaaccatcaccctaaaaaaacatgccttacatatttaacacactctgaaatccagtcaaaatatgactaaaggcccttgccatgactgatgtattctcctggccaacgccaaacaaatgggagcctggttacgagtcagccttcagggacttgtcacatttctacttggtttcttccttgttattgtcataataaaatgttttctatgctgtttagtgcaacttaggccctattctgtagaagtctcctctactattcaggccactcaaacaccccaaataattgagttcaaaatcgacatcaagatataaaggaatcagtgactaaatatatttcatatatggtatttttattgattattgtgctgtcttgacctagtatggaggccttggctagaggctggtcagtttcctctcttgagcagctgattaaatccacaccccaaccacttcccttatcaggttctcacactctggggccactatgtacccactctaatcaccacagggccagacatcagacaattaaggacagcgcccatgccccaaagcccgccaaaattatgcaaattattcaaaattattcaacctagctaaccccaccctttttgctgtacataagctgcccattccccctccagcctgtggtacccagtcctcaggtgcaaccccctgcgtggtcctctgtggcagccttctctcattcagagctaaaaagaaaactcagtagaagataatggcaagtccagactggggatatgatgacaaaaatggtcctgaacaatggagcaagctgtatcccattgccaatggaaataaccagtcccctgttgatattaaaaccagtgaaaccaaacatgacacctctctgaaacctattagtgtctcctacaacccagccacagccaaagaaattatcaatgtggggcattccttccatgtaaattttgaggacaacgataaccgatcaggtgagctgaaagacccttctgatatttttttcttacagtctactgggaaaatttaaaaaatagtgctcgagaaatatgacacccattctaagtcttttgtgcttgtgtgcagcattgctgtaatctagtgaggcatcttggacttctggaaaacgcccaggtggtaaagacaatttttggaactcccagctctctattttcagtcttgcttctcaaagtcaccatcacgtctcttctcgtcattccagtatctgtatgctcacttcactgtctctgaataaacagcatttat

SEQ ID NO: 310359 - DNA, 2109 bp, Homo sapiens
ctttagcccaacagtcaaaaataattgatgctaccctacaaatgtccaaaactctagtatatcatatttctaagttacagcaaatattagtcctgctaaaccagggagctttggcaaaaatgttttttgacagtaaatttgtccttgattatatattaactagtcaaagaggtgtttgtaacattattagagcttcttgttgtaggtgggttaacaccaccaatcaagaggtcattctaacagaaagcctggatcagaaaaccatcaccctaaaaaaacatgccttacatatttaacacactctgaaatccagtcaaaatatgactaaaggcccttgccatgactgatgtattctcctggccaacgccaaacaaatgggagcctggttacgagtcagccttcagggacttgtcacatttctacttggtttcttccttgttattgtcataataaaatgttttctatgctgtttagtgcaacttaggccctattctgtagaagtctcctctactattcaggccactcaaacaccccaaataattgagttcaaaatcgacatcaagatataaaggaatcagtgactaaatatatttcatatatggtatttttattgattattgtgctgtcttgacctagtatggaggccttggctagaggctggtcagtttcctctcttgagcagctgattaaatccacaccccaaccacttcccttatcaggttctcacactctggggccactatgtacccactctaatcaccacagggccagacatcagacaattaaggacagcgcccatgccccaaagcccgccaaaattatgcaaattattcaaaattattcaacctagctaaccccaccctttttgctgtacataagctgcccattccccctccagcctgtggtacccagtcctcaggtgcaaccccctgcgtggtcctctgtggcagccttctctcattcagagctaaaaagaaaactcagtagaagataatggcaagtccagactggggatatgatgacaaaaatggtcctgaacaatggagcaagctgtatcccattgccaatggaaataaccagtcccctgttgatattaaaaccagtgaaaccaaacatgacacctctctgaaacctattagtgtctcctacaacccagccacagccaaagaaattatcaatgtggggcattccttccatgtaaattttgaggacaacgataaccgatcagtgctgaaaggtggtcctttctctgacagctacaggctctttcagttccattttcactggggcagtacaaatgagcatggttcagaacatacagtggatggagtcaaatattctgccgagcttcacgtagctcactggaattctgcaaagtactccagccttgctgaagctgcctcaaaggctgatggtttggcagttattggtgttttgatgaaggttggtgaggccaacccaaagctgcagaaagtacttgatgccctccaagcaattaaaaccaagggcaaacgagccccattcacaaattttgacccctctactctccttccttcatccctggatttctggacctaccctggctctctgactcatcctcctctttatgagagtgtaacttggatcatctgtaaggagagcatcagtgtcagctcagagcagctggcacaattccgcagccttctatcaaatgttgaaggtgataacgctgtccccatgcagcacaacaaccgcccaacccaacctctgaagggcagaacagtgagagcttcattttgatgattctgagaagaaacttgtccttcctcaagaacacagccctgcttctgacataatccagtaaaataataatttttaagaaataaatttatttcaatattagcaagacagcatgccttcaaatcaatctgtaaaactaagaaacttaaattttagttcttactgcttaattcaaataataattagtaagctagcaaatagtaatctgtaagcataagcttatgcttaaattcaagtttagtttgaggaattctttaaaattacaactaagtgatttgtatgtctatttttttcagtttatttgaaccaataaaataattttatctcttt

SEQ ID NO: 310360 - DNA, 1395 bp, Homo sapiens
atgcacagttgcagttagttattccaggtattatttttgttttcagaaaaagaaaactcagtagaagataatggcaagtccagactggggatatgatgacaaaaatggtcctgaacaatggagcaagctgtatcccattgccaatggaaataaccagtcccctgttgatattaaaaccagtgaaaccaaacatgacacctctctgaaacctattagtgtctcctacaacccagccacagccaaagaaattatcaatgtggggcattccttccatgtaaattttgaggacaacgataaccgatcagtgctgaaaggtggtcctttctctgacagctacaggctctttcagttccattttcactggggcagtacaaatgagcatggttcagaacatacagtggatggagtcaaatattctgccgagcttcacgtagctcactggaattctgcaaagtactccagccttgctgaagctgcctcaaaggctgatggtttggcagttattggtgttttgatgaaggttggtgaggccaacccaaagctgcagaaagtacttgatgccctccaagcaattaaaaccaagggcaaacgagccccattcacaaattttgacccctctactctccttccttcatccctggatttctggacctaccctggctctctgactcatcctcctctttatgagagtgtaacttggatcatctgtaaggagagcatcagtgtcagctcagagcagctggcacaattccgcagccttctatcaaatgttgaaggtgataacgctgtccccatgcagcacaacaaccgcccaacccaacctctgaagggcagaacagtgagagcttcattttgatgattctgagaagaaacttgtccttcctcaagaacacagccctgcttctgacataatccagtaaaataataatttttaagaaataaatttatttcaatattagcaagacagcatgccttcaaatcaatctgtaaaactaagaaacttaaattttagttcttactgcttaattcaaataataattagtaagctagcaaatagtaatctgtaagcataagcttatgcttaaattcaagtttagtttgaggaattctttaaaattacaactaagtgatttgtatgtctatttttttcagtttatttgaaccaataaaataattttatctctttacaaaaaaaagaaaccgccctccttggccctcagacgttggacgctctggcggcgcctttcctttagtagagggtgagttcctgaatcctcgactgactgactcggtgcggctcggagaataagcttgcgggcaggcggggacagcttcattgagaggcggagaacccggtttatcaaacaatccgggggttacggcaggaaaaaaccg

SEQ ID NO: 310361 - DNA, 1215 bp, Homo sapiens
atgcacagttgcagttagttattccaggtattatttttgttttcagaaaaagaaaactcagtagaagataatggcaagtccagactggggatatgatgacaaaaatggtcctgaacaatggagcaagctgtatcccattgccaatggaaataaccagtcccctgttgatattaaaaccagtgaaaccaaacatgacacctctctgaaacctattagtgtctcctacaacccagccacagccaaagaaattatcaatgtggggcattccttccatgtaaattttgaggacaacgataaccgatcagtgctgaaaggtggtcctttctctgacagctacaggctctttcagttccattttcactggggcagtacaaatgagcatggttcagaacatacagtggatggagtcaaatattctgccgagcttcacgtagctcactggaattctgcaaagtactccagccttgctgaagctgcctcaaaggctgatggtttggcagttattggtgttttgatgaaggttggtgaggccaacccaaagctgcagaaagtacttgatgccctccaagcaattaaaaccaagggcaaacgagccccattcacaaattttgacccctctactctccttccttcatccctggatttctggacctaccctggctctctgactcatcctcctctttatgagagtgtaacttggatcatctgtaaggagagcatcagtgtcagctcagagcagctggcacaattccgcagccttctatcaaatgttgaaggtgataacgctgtccccatgcagcacaacaaccgcccaacccaacctctgaagggcagaacagtgagagcttcattttgatgattctgagaagaaacttgtccttcctcaagaacacagccctgcttctgacataatccagtaaaataataatttttaagaaataaatttatttcaatattagcaagacagcatgccttcaaatcaatctgtaaaactaagaaacttaaattttagttcttactgcttaattcaaataataattagtaagctagcaaatagtaatctgtaagcataagcttatgcttaaattcaagtttagtttgaggaattctttaaaattacaactaagtgatttgtatgtctatttttttcagtttatttgaaccaataaaataattttatctctttaaaaaaaaaaattcggcctcgtggcctca

SEQ ID NO: 310362 - DNA, 667 bp, Homo sapiens
gtcgctatctgtgtcggcctatctgcagaaagtacttgatgccctccaagcaattaaaaccaagggcaaacgagccccattcacaaattttgacccctctactctccttccttcatccctggatttctggacctaccctggctctctgactcatcctcctctttatgagagtgtaacttggatcatctgtaaggagagcatcagtgtcagctcagagcagctggcacaattccgcagccttctatcaaatgttgaaggtgataacgctgtccccatgcagcacaacaaccgcccaacccaacctctgaagggcagaacagtgagagcttcattttgatgattctgagaagaaacttgtccttcctcaagaacacagccctgcttctgacataatccagtaaaataataatttttaagaaataaatttatttcaatattagcaagacagcatgccttcaaatcaatctgtaaaactaagaaacttaaattttagttcttactgcttaattcaaataataattagtaagctagcaaatagtaatctgtaagcataagcttatgcttaaattcaagtttagtttgaggaattctttaaaattacaactaagtgatttgtatgtctatttttttcagtttatttgaaccaataaaataattttatctcttt

SEQ ID NO: 310363 - DNA, 1547 bp, Homo sapiens
ctttagcccaacagtcaaaaataattgatgctaccctacaaatgtccaaaactctagtatatcatatttctaagttacagcaaatattagtcctgctaaaccagggagctttggcaaaaatgttttttgacagtaaatttgtccttgattatatattaactagtcaaagaggtgtttgtaacattattagagcttcttgttgtaggtgggttaacaccaccaatcaagaggtcattctaacagaaagcctggatcagaaaaccatcaccctaaaaaaacatgccttacatatttaacacactctgaaatccagtcaaaatatgactaaaggcccttgccatgactgatgtattctcctggccaacgccaaacaaatgggagcctggttacgagtcagccttcagggacttgtcacatttctacttggtttcttccttgttattgtcataataaaatgttttctatgctgtttagtgcaacttaggccctattctgtagaagtctcctctactattcaggccactcaaacaccccaaataattgagttcaaaatcgacatcaagatataaaggaatcagtgactaaatatatttcatatatggtatttttattgattattgtgctgtcttgacctagtatggaggccttggctagaggctggtcagtttcctctcttgagcagctgattaaatccacaccccaaccacttcccttatcaggttctcacactctggggccactatgtacccactctaatcaccacagggccagacatcagacaattaaggacagcgcccatgccccaaagcccgccaaaattatgcaaattattcaaaattattcaacctagctaaccccaccctttttgctgtacataagctgcccattccccctccagcctgtggtacccagtcctcaggtgcaaccccctgcgtggtcctctgtggcagccttctctcattcagagctgttttccacagaggtagtgaaaagaactggattttcaagttcactttgcaagaggcaagtaggaaggagactgaaagctgctcgtaaatcagtaaatcagttgctttaggccggacacctgccctgtcagtctcagctacatccaaatggaaaaatgggtgatctaggattaccctcaggcgatgccaatggccaaggcactaaaaggtcacatctattattgctggcatttctttccccactgggctgtttttttgagtggatgtcatactcatctcatacagaaggcaggtccatcatgctagagcagtgctgtcaatattagatctaatgaaatacaccctatttttcttttctgcaaacttcattatacctagctgccgctaaaagatgattcctttttttccttactactccaacattacattttagggacatgaatccttaagcaaagtttcattcgccacctctgattttaaagttaaaatgagtcttttaaaaacattaaccaaaataaatggcacagtgagtgccatacccagaagtggctacataaagccactacataaacagtcaat

SEQ ID NO: 310364 - DNA, 876 bp, Homo sapiens
atcccagcccacgcacagacccccaacttgcagctgcccacctcaccctcagctctggcctcttactcaccctctaccacagacatggctcagtcactggctctgagcctccttatcctggttctggcctttggcatccccaggacccaaggcagtgatggaggggctcaggactgttgcctcaagtacagccaaaggaagattcccgccaaggttgtccgcagctaccggaagcaggaaccaagcttaggctgctccatcccagctatcctgttcttgccccgcaagcgctctcaggcagagctatgtgcagacccaaaggagctctgggtgcagcagctgatgcagcatctggacaagacaccatccccacagaaaccagcccagggctgcaggaaggacaggggggcctccaagactggcaagaaaggaaagggctccaaaggctgcaagaggactgagcggtcacagacccctaaagggccatagcccagtgagcagcctggagccctggagaccccaccagcctcaccagcgcttgaagcctgaacccaagatgcaagaaggaggctatgctcaggggccctggagcagccaccccatgctggccttgccacactctttctcctgctttaaccaccccatctgcattcccagctctaccctgcatggctgagctgcccacagcaggccaggtccagagagaccgaggagggagagtctcccagggagcatgagaggaggcagcaggactgtccccttgaaggagaatcatcaggaccctggacctgatacggctccccagtacaccccacctcttccttgtaaatatgatttatacctaactgaataaaaagctgttctgtcttcccaccc

SEQ ID NO: 310365 - DNA, 948 bp, Homo sapiens
atcccagcccacgcacagacccccaacttgcagctgcccacctcaccctcagctctggcctcttactcaccctctaccacagacatggctcagtcactggctctgagcctccttatcctggttctggcctttggcatccccaggacccaaggcagtgatggaggggctcaggactgttgcctcaagtacagccaaaggaagattcccgccaaggttgtccgcagctaccggaagcaggaaccaagcttaggctgctccatcccagctatcctgttcttgccccgcaagcgctctcaggcagagctatgtgcagacccaaaggagctctgggtgcagcagctgatgcagcatctggacaagacaccatccccacagaaaccagcccagggctgcaggaaggacaggggggcctccaagactggcaagaaaggaaagggctccaaaggctgcaagaggtgaggaatctgagggatgtgggtaaaggggagcctcagtcagcccctcacacccctcttctgccctcacaggactgagcggtcacagacccctaaagggccatagcccagtgagcagcctggagccctggagaccccaccagcctcaccagcgcttgaagcctgaacccaagatgcaagaaggaggctatgctcaggggccctggagcagccaccccatgctggccttgccacactctttctcctgctttaaccaccccatctgcattcccagctctaccctgcatggctgagctgcccacagcaggccaggtccagagagaccgaggagggagagtctcccagggagcatgagaggaggcagcaggactgtccccttgaaggagaatcatcaggaccctggacctgatacggctccccagtacaccccacctcttccttgtaaatatgatttatacctaactgaataaaaagctgttctgtcttcccaccc

SEQ ID NO: 310366 - DNA, 822 bp, Homo sapiens
tcactcgccacctcctcttccacccctgccaggcccagcagccaccacagcgcctgcttcctcggccctgaaatcatgcccctaggtctcctgtggctgggcctagccctgttgggggctctgcatgcccaggcccaggactccacctcagacctgatcccagccccacctctgagcaaggtccctctgcagcagaacttccaggacaaccaattccaggggaagtggtatgtggtaggcctggcagggaatgcaattctcagagaagacaaagacccgcaaaagatgtatgccaccatctatgagctgaaagaagacaagagctacaatgtcacctccgtcctgtttaggaaaaagaagtgtgactactggatcaggacttttgttccaggttgccagcccggcgagttcacgctgggcaacattaagagttaccctggattaacgagttacctcgtccgagtggtgagcaccaactacaaccagcatgctatggtgttcttcaagaaagtttctcaaaacagggagtacttcaagatcaccctctacgggagaaccaaggagctgacttcggaactaaaggagaacttcatccgcttctccaaatctctgggcctccctgaaaaccacatcgtcttccctgtcccaatcgaccagtgtatcgacggctgagtgcacaggtgccgccagctgccgcaccagcccgaacaccattgagggagctgggagaccctccccacagtgccacccatgcagctgctccccaggccaccccgctgatggagccccaccttgtctgctaaataaacatgtgccctcagg

SEQ ID NO: 310367 - DNA, 454 bp, Homo sapiens
cagtcagggatcacacacacacactcatacacgcacacacacacacagctgcctgttctgacggactttctccctaacagaccagtgtatcgacggctgagtgcacagtgagtgtggctgggcggctgcgagggggcttgtgggaggccagggtgcagtgggctgggggtcttgggcctgcctttgctcatccccctgccccccagcactgctgctgtctttattctgctgtccccatctcgggtgcctcccatttccccacccatcaccctcatatccacctctgtccagggtgccgccagctgccgcaccagcccgaacaccattgagggagctgggagaccctccccacagtgccacccatgcagctgctccccaggccaccccgctgatggagccccaccttgtctgctaaataaacatgtgccctcagggccctcaggaactgaatcta

SEQ ID NO: 310368 - DNA, 434 bp, Homo sapiens
cagtcagggatcacacacacacactcatacacgcacacacacacacagctgcctgttctgacggactttctccctaacagaccagtgtatcgacggctgagtgcacagtgagtgtggctgggcggctgcgagggggcttgtgggaggccagggtgcagtgggctgggggtcttgggcctgcctttgctcatccccctgccccccagcactgctgctgtctttattctgctgtccccatctcgggtgcctcccatttccccacccatcaccctcatatccacctctgtccagggtgccgccagctgccgcaccagcccgaacaccattgagggagctgggagaccctccccacagtgccacccatgcagctgctccccaggccaccccgctgatggagccccaccttgtctgctaaataaacatgtgccctcagg

SEQ ID NO: 310369 - DNA, 202 bp, Homo sapiens
attactagtgaattcactagtaatcccaatcgaccagtgtatcgacggctgagtgcacaggtgccgccagctgccgcaccagcccgaacaccattgagggagctgggagaccctccccacagtgccacccatgcagctgctccccaggccaccccgctgatggagccccaccttgtctgctaaataaacatgtgccctcagg

SEQ ID NO: 310370 - DNA, 986 bp, Homo sapiens
gaggcattcattctttcctttctgtgggtgtggggaggggaccacagggcacataccccaccctgggatccagctgagcaggggggtcagagatgacagctcttccggctcacaggccaccggcccacatacagggcaatcagaagaaagaaacagcacaaggaaggcacagagggagtcgttgtccctgccagaggcccagcagccaccacagcgcctgcttcctcggccctgaaatcatgcccctaggtctcctgtggctgggcctagccctgttgggggctctgcatgcccaggcccaggactccacctcagacctgatcccagccccacctctgagcaaggtccctctgcagcagaacttccaggacaaccaattccaggggaagtggtatgtggtaggcctggcagggaatgcaattctcagagaagacaaagacccgcaaaagatgtatgccaccatctatgagctgaaagaagacaagagctacaatgtcacctccgtcctgtttaggaaaaagaagtgtgactactggatcaggacttttgttccaggttgccagcccggcgagttcacgctgggcaacattaagagttaccctggattaacgagttacctcgtccgagtggtgagcaccaactacaaccagcatgctatggtgttcttcaagaaagtttctcaaaacagggagtacttcaagatcaccctctacgggagaaccaaggagctgacttcggaactaaaggagaacttcatccgcttctccaaatctctgggcctccctgaaaaccacatcgtcttccctgtcccaatcgaccagtgtatcgacggctgagtgcacaggtgccgccagctgccgcaccagcccgaacaccattgagggagctgggagaccctccccacagtgccacccatgcagctgctccccaggccaccccgctgatggagccccaccttgtctgctaaataaacatgtgccctcagg

SEQ ID NO: 310371 - DNA, 633 bp, Homo sapiens
tggatgactctaccgatcctgaggttccaggggaagtggtatgtggtaggcctggcagggaatgcaattctcagagaagacaaagacccgcaaaagatgtatgccaccatctatgagctgaaagaagacaagagctacaatgtcacctccgtcctgtttaggaaaaagaagtgtgactactggatcaggacttttgttccaggttgccagcccggcgagttcacgctgggcaacattaagagttaccctggattaacgagttacctcgtccgagtggtgagcaccaactacaaccagcatgctatggtgttcttcaagaaagtttctcaaaacagggagtacttcaagatcaccctctacgggagaaccaaggagctgacttcggaactaaaggagaacttcatccgcttctccaaatctctgggcctccctgaaaaccacatcgtcttccctgtcccaatcgaccagtgtatcgacggctgagtgcacaggtgccgccagctgccgcaccagcccgaacaccattgagggagctgggagaccctccccacagtgccacccatgcagctgctccccaggccaccccgctgatggagccccaccttgtctgctaaataaacatgtgccctcagg

SEQ ID NO: 310372 - DNA, 646 bp, Homo sapiens
gtcctctgctagtctataactataccaggacaaccaattccaggggaagtggtatgtggtaggcctggcagggaatgcaattctcagagaagacaaagacccgcaaaagatgtatgccaccatctatgagctgaaagaagacaagagctacaatgtcacctccgtcctgtttaggaaaaagaagtgtgactactggatcaggacttttgttccaggttgccagcccggcgagttcacgctgggcaacattaagagttaccctggattaacgagttacctcgtccgagtggtgagcaccaactacaaccagcatgctatggtgttcttcaagaaagtttctcaaaacagggagtacttcaagatcaccctctacgggagaaccaaggagctgacttcggaactaaaggagaacttcatccgcttctccaaatctctgggcctccctgaaaaccacatcgtcttccctgtcccaatcgaccagtgtatcgacggctgagtgcacaggtgccgccagctgccgcaccagcccgaacaccattgagggagctgggagaccctccccacagtgccacccatgcagctgctccccaggccaccccgctgatggagccccaccttgtctgctaaataaacatgtgccctcagg

SEQ ID NO: 310373 - DNA, 842 bp, Homo sapiens
tcactcgccacctcctcttccacccctgccaggcccagcagccaccacagcgcctgcttcctcggccctgaaatcatgcccctaggtctcctgtggctgggcctagccctgttgggggctctgcatgcccaggcccaggactccacctcagacctgatcccagccccacctctgagcaaggtccctctgcagcagaacttccaggacaaccaattccaggggaagtggtatgtggtaggcctggcagggaatgcaattctcagagaagacaaagacccgcaaaagatgtatgccaccatctatgagctgaaagaagacaagagctacaatgtcacctccgtcctgtttaggaaaaagaagtgtgactactggatcaggacttttgttccaggttgccagcccggcgagttcacgctgggcaacattaagagttaccctggattaacgagttacctcgtccgagtggtgagcaccaactacaaccagcatgctatggtgttcttcaagaaagtttctcaaaacagggagtacttcaagatcaccctctacgggagaaccaaggagctgacttcggaactaaaggagaacttcatccgcttctccaaatctctgggcctccctgaaaaccacatcgtcttccctgtcccaatcgaccagtgtatcgacggctgagtgcacaggtgccgccagctgccgcaccagcccgaacaccattgagggagctgggagaccctccccacagtgccacccatgcagctgctccccaggccaccccgctgatggagccccaccttgtctgctaaataaacatgtgccctcagggccctcaggaactgaatcta

SEQ ID NO: 310374 - DNA, 875 bp, Homo sapiens
tcactcgccacctcctcttccacccctgccaggcccagcagccaccacagcgcctgcttcctcggccctgaaatcatgcccctaggtctcctgtggctgggcctagccctgttgggggctctgcatgcccaggcccaggactccacctcagacctgatcccagccccacctctgagcaaggtccctctgcagcagaacttccaggacaaccaattccaggggaagtggtatgtggtaggcctggcagggaatgcaattctcagagaagacaaagacccgcaaaagatgtatgccaccatctatgagctgaaagaagacaagagctacaatgtcacctccgtcctgtttaggaaaaagaagtgtgactactggatcaggacttttgttccaggttgccagcccggcgagttcacgctgggcaacattaagagttaccctggattaacgagttacctcgtccgagtggtgagcaccaactacaaccagcatgctatggtgttcttcaagaaagtttctcaaaacagggagtacttcaagatcaccctctacgggagaaccaaggagctgacttcggaactaaaggagaacttcatccgcttctccaaatctctgggcctccctgaaaaccacatcgtcttccctgtcccaatcgaccagtgtatcgacggctgagtgcacaggtgccgccagctgccgcaccagcccgaacaccattgagggagctgggagaccctccccacagtgccacccatgcagctgctccccaggccaccccgctgatggagccccaccttgtctgctaaataaacatgtgccctcaggtactcatggaagcatgcgaccagaggatcgctctagagtcacccgcaggacag

SEQ ID NO: 310375 - DNA, 864 bp, Homo sapiens
tcactcgccacctcctcttccacccctgccaggcccagcagccaccacagcgcctgcttcctcggccctgaaatcatgcccctaggtctcctgtggctgggcctagccctgttgggggctctgcatgcccaggcccaggactccacctcagacctgatcccagccccacctctgagcaaggtccctctgcagcagaacttccaggacaaccaattccaggggaagtggtatgtggtaggcctggcagggaatgcaattctcagagaagacaaagacccgcaaaagatgtatgccaccatctatgagctgaaagaagacaagagctacaatgtcacctccgtcctgtttaggaaaaagaagtgtgactactggatcaggacttttgttccaggttgccagcccggcgagttcacgctgggcaacattaagagttaccctggattaacgagttacctcgtccgagtggtgagcaccaactacaaccagcatgctatggtgttcttcaagaaagtttctcaaaacagggagtacttcaagatcaccctctacgggagaaccaaggagctgacttcggaactaaaggagaacttcatccgcttctccaaatctctgggcctccctgaaaaccacatcgtcttccctgtcccaatcgaccagtgtatcgacggctgagtgcacaggtgccgccagctgccgcaccagcccgaacaccattgagggagctgggagaccctccccacagtgccacccatgcagctgctccccaggccaccccgctgatggagccccaccttgtctgctaaataaacatgtgccctcagggtcaacgatatgtcccgacgaatttaagtgatcagggatatc

SEQ ID NO: 310376 - DNA, 634 bp, Homo sapiens
actctaaggatcccgacgctctctgtgggggatgagctgtcacgggttgggccggactgagagcaacagaaccctgctgctgccctggccccaccttgtccagcacaggaggcccaagcctgggttgtctcccctctcacccacccatctctccctcccaaggaaaaagaagtgtgactactggatcaggacttttgttccaggttgccagcccggcgagttcacgctgggcaacattaagagttaccctggattaacgagttacctcgtccgagtggtgagcaccaactacaaccagcatgctatggtgttcttcaagaaagtttctcaaaacagggagtacttcaagatcaccctctacgggagaaccaaggagctgacttcggaactaaaggagaacttcatccgcttctccaaatctctgggcctccctgaaaaccacatcgtcttccctgtcccaatcgaccagtgtatcgacggctgagtgcacaggtgccgccagctgccgcaccagcccgaacaccattgagggagctgggagaccctccccacagtgccacccatgcagctgctccccaggccaccccgctgatggagccccaccttgtctgctaaataaacatgtgccctcagg

SEQ ID NO: 310377 - DNA, 1026 bp, Homo sapiens
tcactcgccacctcctcttccacccctgccaggcccagcagccaccacagcgcctgcttcctcggccctgaaatcatgcccctaggtctcctgtggctgggcctagccctgttgggggctctgcatgcccaggcccaggactccacctcagacctgatcccagccccacctctgagcaaggtccctctgcagcagaacttccaggacaaccaattccaggggaagtggtatgtggtaggcctggcagggaatgcaattctcagagaagacaaagacccgcaaaagatgtatgccaccatctatgagctgaaagaagacaagagctacaatgtcacctccgtcctgtttaggaaaaagaagtgtgactactggatcaggacttttgttccaggttgccagcccggcgagttcacgctgggcaacattaagagttaccctggattaacgagttacctcgtccgagtggtgagcaccaactacaaccagcatgctatggtgttcttcaagaaagtttctcaaaacagggagtacttcaagatcaccctctacgggagaaccaaggagctgacttcggaactaaaggagaacttcatccgcttctccaaatctctgggcctccctgaaaaccacatcgtcttccctgtcccaatcgaccagtgtatcgacggctgagtgcacagtgagtgtggctgggcggctgcgagggggcttgtgggaggccagggtgcagtgggctgggggtcttgggcctgcctttgctcatccccctgccccccagcactgctgctgtctttattctgctgtccccatctcgggtgcctcccatttccccacccatcaccctcatatccacctctgtccagggtgccgccagctgccgcaccagcccgaacaccattgagggagctgggagaccctccccacagtgccacccatgcagctgctccccaggccaccccgctgatggagccccaccttgtctgctaaataaacatgtgccctcagggccctcaggaactgaatcta

SEQ ID NO: 310378 - DNA, 461 bp, Homo sapiens
tgcgcggtcgatctaaggattcctgcaaacggtgggcagcccggcgagttcacgcgggcaacattaagagttaccctggattaacgagttacctcgtccgagtggtgagcaccaactacaaccagcatgctatggtgttcttcaagaaagtttctcaaaacagggagtacttcaagatcaccctctacgggagaaccaaggagctgacttcggaactaaaggagaacttcatccgcttctccaaatctctgggcctccctgaaaaccacatcgtcttccctgtcccaatcgaccagtgtatcgacggctgagtgcacaggtgccgccagctgccgcaccagcccgaacaccattgagggagctgggagaccctccccacagtgccacccatgcagctgctccccaggccaccccgctgatggagccccaccttgtctgctaaataaacatgtgccctcagg

SEQ ID NO: 310379 - DNA, 422 bp, Homo sapiens
ccgtcccctttctccgaaaggcacatttgagttaccctggattaacgagttacctcgtccgagtggtgagcaccaactacaaccagcatgctatggtgttcttcaagaaagtttctcaaaacagggagtacttcaagatcaccctctacgggagaaccaaggagctgacttcggaactaaaggagaacttcatccgcttctccaaatctctgggcctccctgaaaaccacatcgtcttccctgtcccaatcgaccagtgtatcgacggctgagtgcacaggtgccgccagctgccgcaccagcccgaacaccattgagggagctgggagaccctccccacagtgccacccatgcagctgctccccaggccaccccgctgatggagccccaccttgtctgctaaataaacatgtgccctcagg

SEQ ID NO: 310380 - DNA, 480 bp, Homo sapiens
atgaagtcatagctggaatctgagtacttccgttccaggttgctcggcgctaggctgagttcacgctgggcatacatttaagagttaccctgggagtatccgtacgtttacctcgtccgagtggtgagcaccaactacaaccagcatgctatggtgttcttcaagaaagtttctcaaaacagggagtacttcaagatcaccctctacgggagaaccaaggagctgacttcggaactaaaggagaacttcatccgcttctccaaatctctgggcctccctgaaaaccacatcgtcttccctgtcccaatcgaccagtgtatcgacggctgagtgcacaggtgccgccagctgccgcaccagcccgaacaccattgagggagctgggagaccctccccacagtgccacccatgcagctgctccccaggccaccccgctgatggagccccaccttgtctgctaaataaacatgtgccctcagg

SEQ ID NO: 310381 - DNA, 585 bp, Homo sapiens
tcactcgccacctcctcttccacccctgccaggcccagcagccaccacagcgcctgcttcctcggccctgaaatcatgcccctaggtctcctgtggctgggcctagccctgttgggggctctgcatgcccaggcccaggactccacctcagacctgatcccagccccacctctgagcaaggtccctctgcagcagaacttccaggacaaccaattccaggggaagtggtatgtggtaggcctggcagggaatgcaattctcagagaagacaaagacccgcaaaagatgtatgccaccatctatgagctgaaagaagacaagagctacaatgtcacctccgtcctgtttaggtgagggccgacatctcctgggggtgtgagagtcagactgacgtcacaggcaagggatggccaaagctgagggatcctgtcgttcacctcgctgttctgcccggaattcatctgtgttcatccttcctctgttccttagagcaacgtttatagcacatttccatgcagacacacagacagtggtggggatggacatgcacagtcgttagaaaacaagacggagagaggaggggtg

SEQ ID NO: 310382 - DNA, 448 bp, Homo sapiens
tcactcgccacctcctcttccacccctgccaggcccagcagccaccacagcgcctgcttcctcggccctgaaatcatgcccctaggtctcctgtggctgggcctagccctgttgggggctctgcatgcccaggcccaggactccacctcagacctgatcccagccccacctctgagcaaggtccctctgcagcagaacttccaggacaaccaagtgagggccgacatctcctgggggtgtgagagtcagactgacgtcacaggcaagggatggccaaagctgagggatcctgtcgttcacctcgctgttctgcccggaattcatctgtgttcatccttcctctgttccttagagcaacgtttatagcacatttccatgcagacacacagacagtggtggggatggacatgcacagtcgttagaaaacaagacggagagaggaggggtg

SEQ ID NO: 310383 - DNA, 1369 bp, Homo sapiens
  misc_feature (1003)..(1004): n is a, c, g, or t
gaaccagtcagcgattagaggccgagtcttcggccacccaaaggcggagtaagaaaccagaagcggatctgattggttgctggaagacgccgcgcccacctcacagaaggacgaaccagtgagctaagctgcggggcgcgggctcggccggggcaccggtgagtcgccggcgctgcagagggaggcggcactggtctcgacgtggggcggccagcgatgaagccgcccagttcaatacaaacaagtgagtttgactcatcagatgaagagcctattgaagatgaacagactccaattcatatatcatggctatctttgtcacgagtgaattgttctcagtttctcggtttatgtgctcttccaggttgtaaatttaaagatgttagaagaaatgtccaaaaagatacagaagaactaaagagctgtggtatacaagacatatttgttttctgcaccagaggggaactgtcaaaatatagagtcccaaaccttctggatctctaccagcaatgtggaattatcacccatcatcatccaatcgcagatggagggactcctgacatagccagctgctgtgaaataatggaagagcttacaacctgccttaaaaattaccgaaaaaccttaatacactgctatggaggacttgggagatcttgtcttgtagctgcttgtctcctactatacctgtctgacacaatatcaccagagcaagccatagacagcctgcgagacctaagaggatccggggcaatacagaccatcaagcaatacaattatcttcatgagtttcgggacaaattagctgcacatctatcatcaagagattcacaatcaagatctgtatcaagataaaggaattcaaatagcatatatatgaccatgtctgaaatgtcagttctctagcataatttgtattgaaatgaaaccaccagtgttatcaacttgaatgtaaatgtacatgtgcagatattcctaaagttttattgacaaaaaaaaaaannaaaaaaaaaaaacaaaaaaaaaaaaaaaggggggggggcaaaaaaatttcccggggggggcccaaacccccctttttcttgaaaacagggggcgactcctaaagagaggaggaatattatataaggacaaggggagcggacgcgcgttttaaaaaaacgtgttctgtgagtaggacaaaaatggcttgagtgggcatttctttgaggaaagcacaccatcagttggggagcagggaaaattagtagggacaccactcaccgagaagagtaaatgaaacgcacgcgagggggataaataaacaatggggagtagataatgttgatacaccgagcatcaaatgtgtggagaagaagattaccaagaa

SEQ ID NO: 310384 - DNA, 1033 bp, Homo sapiens
  misc_feature (667)..(668): n is a, c, g, or t
atgaagccgcccagttcaatacaaacaagttgtaaatttaaagatgttagaagaaatgtccaaaaagatacagaagaactaaagagctgtggtatacaagacatatttgttttctgcaccagaggggaactgtcaaaatatagagtcccaaaccttctggatctctaccagcaatgtggaattatcacccatcatcatccaatcgcagatggagggactcctgacatagccagctgctgtgaaataatggaagagcttacaacctgccttaaaaattaccgaaaaaccttaatacactgctatggaggacttgggagatcttgtcttgtagctgcttgtctcctactatacctgtctgacacaatatcaccagagcaagccatagacagcctgcgagacctaagaggatccggggcaatacagaccatcaagcaatacaattatcttcatgagtttcgggacaaattagctgcacatctatcatcaagagattcacaatcaagatctgtatcaagataaaggaattcaaatagcatatatatgaccatgtctgaaatgtcagttctctagcataatttgtattgaaatgaaaccaccagtgttatcaacttgaatgtaaatgtacatgtgcagatattcctaaagttttattgacaaaaaaaaaaannaaaaaaaaaaaacaaaaaaaaaaaaaaaggggggggggcaaaaaaatttcccggggggggcccaaacccccctttttcttgaaaacagggggcgactcctaaagagaggaggaatattatataaggacaaggggagcggacgcgcgttttaaaaaaacgtgttctgtgagtaggacaaaaatggcttgagtgggcatttctttgaggaaagcacaccatcagttggggagcagggaaaattagtagggacaccactcaccgagaagagtaaatgaaacgcacgcgagggggataaataaacaatggggagtagataatgttgatacaccgagcatcaaatgtgtggagaagaagattaccaagaa

SEQ ID NO: 310385 - DNA, 1350 bp, Homo sapiens
  misc_feature (984)..(985): n is a, c, g, or t
gaaccagtcagcgattagaggccgagtcttcggccacccaaaggcggagtaagaaaccagaagcggatctgattggttgctggaagacgccgcgcccacctcacagaaggacgaaccagtgagctaagctgcggggcgcgggctcggccggggcaccggtgagtcgccggcgctgcagagggaggcggcactggtctcgacgtggggcggccagcgatgaagccgcccagttcaatacaaacaagtgagtttgactcatcagatgaagagcctattgaagatgaacagagctatctttgtcacgagtgaattgttctcagtttctcggtttatgtgctcttccaggttgtaaatttaaagatgttagaagaaatgtccaaaaagatacagaagaactaaagagctgtggtatacaagacatatttgttttctgcaccagaggggaactgtcaaaatatagagtcccaaaccttctggatctctaccagcaatgtggaattatcacccatcatcatccaatcgcagatggagggactcctgacatagccagctgctgtgaaataatggaagagcttacaacctgccttaaaaattaccgaaaaaccttaatacactgctatggaggacttgggagatcttgtcttgtagctgcttgtctcctactatacctgtctgacacaatatcaccagagcaagccatagacagcctgcgagacctaagaggatccggggcaatacagaccatcaagcaatacaattatcttcatgagtttcgggacaaattagctgcacatctatcatcaagagattcacaatcaagatctgtatcaagataaaggaattcaaatagcatatatatgaccatgtctgaaatgtcagttctctagcataatttgtattgaaatgaaaccaccagtgttatcaacttgaatgtaaatgtacatgtgcagatattcctaaagttttattgacaaaaaaaaaaannaaaaaaaaaaaacaaaaaaaaaaaaaaaggggggggggcaaaaaaatttcccggggggggcccaaacccccctttttcttgaaaacagggggcgactcctaaagagaggaggaatattatataaggacaaggggagcggacgcgcgttttaaaaaaacgtgttctgtgagtaggacaaaaatggcttgagtgggcatttctttgaggaaagcacaccatcagttggggagcagggaaaattagtagggacaccactcaccgagaagagtaaatgaaacgcacgcgagggggataaataaacaatggggagtagataatgttgatacaccgagcatcaaatgtgtggagaagaagattaccaagaa

SEQ ID NO: 310386 - DNA, 1286 bp, Homo sapiens
  misc_feature (920)..(921): n is a, c, g, or t
gaaccagtcagcgattagaggccgagtcttcggccacccaaaggcggagtaagaaaccagaagcggatctgattggttgctggaagacgccgcgcccacctcacagaaggacgaaccagtgagctaagctgcggggcgcgggctcggccggggcaccggtgagtcgccggcgctgcagagggaggcggcactggtctcgacgtggggcggccagcgatgaagccggctatctttgtcacgagtgaattgttctcagtttctcggtttatgtgctcttccaggttgtaaatttaaagatgttagaagaaatgtccaaaaagatacagaagaactaaagagctgtggtatacaagacatatttgttttctgcaccagaggggaactgtcaaaatatagagtcccaaaccttctggatctctaccagcaatgtggaattatcacccatcatcatccaatcgcagatggagggactcctgacatagccagctgctgtgaaataatggaagagcttacaacctgccttaaaaattaccgaaaaaccttaatacactgctatggaggacttgggagatcttgtcttgtagctgcttgtctcctactatacctgtctgacacaatatcaccagagcaagccatagacagcctgcgagacctaagaggatccggggcaatacagaccatcaagcaatacaattatcttcatgagtttcgggacaaattagctgcacatctatcatcaagagattcacaatcaagatctgtatcaagataaaggaattcaaatagcatatatatgaccatgtctgaaatgtcagttctctagcataatttgtattgaaatgaaaccaccagtgttatcaacttgaatgtaaatgtacatgtgcagatattcctaaagttttattgacaaaaaaaaaaannaaaaaaaaaaaacaaaaaaaaaaaaaaaggggggggggcaaaaaaatttcccggggggggcccaaacccccctttttcttgaaaacagggggcgactcctaaagagaggaggaatattatataaggacaaggggagcggacgcgcgttttaaaaaaacgtgttctgtgagtaggacaaaaatggcttgagtgggcatttctttgaggaaagcacaccatcagttggggagcagggaaaattagtagggacaccactcaccgagaagagtaaatgaaacgcacgcgagggggataaataaacaatggggagtagataatgttgatacaccgagcatcaaatgtgtggagaagaagattaccaagaa

SEQ ID NO: 310387 - DNA, 1127 bp, Homo sapiens
  misc_feature (48)..(48): n is a, c, g, or t
  misc_feature (54)..(55): n is a, c, g, or t
  misc_feature (761)..(762): n is a, c, g, or t
gtgcttagcaggacccttgcaggagagagaactggtctcgacgtgggngcggcnncgatgaagccggctatctttgtcacgagtgaattgttctcagtttctcggtttatgtgctcttccaggttgtaaatttaaagatgttagaagaaatgtccaaaaagatacagaagaactaaagagctgtggtatacaagacatatttgttttctgcaccagaggggaactgtcaaaatatagagtcccaaaccttctggatctctaccagcaatgtggaattatcacccatcatcatccaatcgcagatggagggactcctgacatagccagctgctgtgaaataatggaagagcttacaacctgccttaaaaattaccgaaaaaccttaatacactgctatggaggacttgggagatcttgtcttgtagctgcttgtctcctactatacctgtctgacacaatatcaccagagcaagccatagacagcctgcgagacctaagaggatccggggcaatacagaccatcaagcaatacaattatcttcatgagtttcgggacaaattagctgcacatctatcatcaagagattcacaatcaagatctgtatcaagataaaggaattcaaatagcatatatatgaccatgtctgaaatgtcagttctctagcataatttgtattgaaatgaaaccaccagtgttatcaacttgaatgtaaatgtacatgtgcagatattcctaaagttttattgacaaaaaaaaaaannaaaaaaaaaaaacaaaaaaaaaaaaaaaggggggggggcaaaaaaatttcccggggggggcccaaacccccctttttcttgaaaacagggggcgactcctaaagagaggaggaatattatataaggacaaggggagcggacgcgcgttttaaaaaaacgtgttctgtgagtaggacaaaaatggcttgagtgggcatttctttgaggaaagcacaccatcagttggggagcagggaaaattagtagggacaccactcaccgagaagagtaaatgaaacgcacgcgagggggataaataaacaatggggagtagataatgttgatacaccgagcatcaaatgtgtggagaagaagattaccaagaa

SEQ ID NO: 310388 - DNA, 1313 bp, Homo sapiens
  misc_feature (947)..(948): n is a, c, g, or t
gaaccagtcagcgattagaggccgagtcttcggccacccaaaggcggagtaagaaaccagaagcggatctgattggttgctggaagacgccgcgcccacctcacagaaggacgaaccagtgagctaagctgcggggcgcgggctcggccggggcaccggtgagtcgccggcgctgcagagggaggcggcactggtctcgacgtggggcggccagcgatgaagccgcccagttcaatacaaacaagtgagtttgactcatcagatgaagagcctattgaagatgaacagactccaattcatatatcatggttgtaaatttaaagatgttagaagaaatgtccaaaaagatacagaagaactaaagagctgtggtatacaagacatatttgttttctgcaccagaggggaactgtcaaaatatagagtcccaaaccttctggatctctaccagcaatgtggaattatcacccatcatcatccaatcgcagatggagggactcctgacatagccagctgctgtgaaataatggaagagcttacaacctgccttaaaaattaccgaaaaaccttaatacactgctatggaggacttgggagatcttgtcttgtagctgcttgtctcctactatacctgtctgacacaatatcaccagagcaagccatagacagcctgcgagacctaagaggatccggggcaatacagaccatcaagcaatacaattatcttcatgagtttcgggacaaattagctgcacatctatcatcaagagattcacaatcaagatctgtatcaagataaaggaattcaaatagcatatatatgaccatgtctgaaatgtcagttctctagcataatttgtattgaaatgaaaccaccagtgttatcaacttgaatgtaaatgtacatgtgcagatattcctaaagttttattgacaaaaaaaaaaannaaaaaaaaaaaacaaaaaaaaaaaaaaaggggggggggcaaaaaaatttcccggggggggcccaaacccccctttttcttgaaaacagggggcgactcctaaagagaggaggaatattatataaggacaaggggagcggacgcgcgttttaaaaaaacgtgttctgtgagtaggacaaaaatggcttgagtgggcatttctttgaggaaagcacaccatcagttggggagcagggaaaattagtagggacaccactcaccgagaagagtaaatgaaacgcacgcgagggggataaataaacaatggggagtagataatgttgatacaccgagcatcaaatgtgtggagaagaagattaccaagaa

SEQ ID NO: 310389 - DNA, 963 bp, Homo sapiens
gaaccagtcagcgattagaggccgagtcttcggccacccaaaggcggagtaagaaaccagaagcggatctgattggttgctggaagacgccgcgcccacctcacagaaggacgaaccagtgagctaagctgcggggcgcgggctcggccggggcaccggtgagtcgccggcgctgcagagggaggcggcactggtctcgacgtggggcggccagcgatgaagccgcccagttcaatacaaacaagtgagtttgactcatcagatgaagagcctattgaagatgaacagactccaattcatatatcatggctatctttgtcacgagtgaattgttctcagtttctcggtttatgtgctcttccaggttgtaaatttaaagatgttagaagaaatgtccaaaaagatacagaagaactaaagagctgtggtatacaagacatatttgttttctgcaccagaggggaactgtcaaaatatagagtcccaaaccttctggatctctaccagcaatgtggaattatcacccatcatcatccaatcgcagatggagggactcctgacatagccagctgctgtgaaataatggaagagcttacaacctgccttaaaaattaccgaaaaaccttaatacactgctatggaggacttgggagatcttgtcttgtagctgcttgtctcctactatacctgtctgacacaatatcaccagagcaagccatagacagcctgcgagacctaagaggatccggggcaatacagaccatcaagcaatacaattatcttcatgagtttcgggacaaattagctgcacatctatcatcaagagattcacaatcaagatctgtatcaagataaaggaattcaaatagcattattttttggaccatgttttggaaagtgtaagttcttttaaacattaattttggattttgggaaaaggaaaacacccacccggtggtttat

SEQ ID NO: 310390 - DNA, 1462 bp, Homo sapiens
  misc_feature (1096)..(1097): n is a, c, g, or t
gaaccagtcagcgattagaggccgagtcttcggccacccaaaggcggagtaagaaaccagaagcggatctgattggttgctggaagacgccgcgcccacctcacagaaggacgaaccagtgagctaagctgcggggcgcgggctcggccggggcaccggtgagtcgccggcgctgcagagggaggcggcactggtctcgacgtggggcggccagcgatgaagccgcccagttcaatacaaacaagtgagtttgactcatcagatgaagagcctattgaagatgaacagactccaattcatatatcatggctatctttgtcacgagtgaattgttctcagtttctcggtttatgtgctcttccaggttgtaaatttaaagatgttagaagaaatgtccaaaaagatacagaagaactaaagagctgtggtatacaagacatatttgttttctgcaccagaggggaactgtcaaaatatagagtcccaaaccttctggatctctaccagcaatgtggaattatcacccatcatcatccaatcgcagatggagggactcctgacatagccagctgctgtgaaataatggaagagcttacaacctgccttaaaaattaccgaaaaaccttaatacactgctatggaggacttgggagatcttgtcttgtagctgcttgtctcctactatacctgtctgacacaatatcaccagagcaagccatagacagcctgcgagacctaagaggatccggggcaatacagaccatcaaggatctacctacttctcagtttttgccccagtccgttttgggaatggatcctctcacctaggacaatgagatggttattgttaatacaaacttgcaatacaattatcttcatgagtttcgggacaaattagctgcacatctatcatcaagagattcacaatcaagatctgtatcaagataaaggaattcaaatagcatatatatgaccatgtctgaaatgtcagttctctagcataatttgtattgaaatgaaaccaccagtgttatcaacttgaatgtaaatgtacatgtgcagatattcctaaagttttattgacaaaaaaaaaaannaaaaaaaaaaaacaaaaaaaaaaaaaaaggggggggggcaaaaaaatttcccggggggggcccaaacccccctttttcttgaaaacagggggcgactcctaaagagaggaggaatattatataaggacaaggggagcggacgcgcgttttaaaaaaacgtgttctgtgagtaggacaaaaatggcttgagtgggcatttctttgaggaaagcacaccatcagttggggagcagggaaaattagtagggacaccactcaccgagaagagtaaatgaaacgcacgcgagggggataaataaacaatggggagtagataatgttgatacaccgagcatcaaatgtgtggagaagaagattaccaagaa

SEQ ID NO: 310391 - DNA, 1337 bp, Homo sapiens
  misc_feature (971)..(972): n is a, c, g, or t
gaaccagtcagcgattagaggccgagtcttcggccacccaaaggcggagtaagaaaccagaagcggatctgattggttgctggaagacgccgcgcccacctcacagaaggacgaaccagtgagctaagctgcggggcgcgggctcggccggggcaccggtgagtcgccggcgctgcagagggaggcggcactggtctcgacgtggggcggccagcgatgaagccgcccagttcaatacaaacaagtgagtttgactcatcagatgaagagcctattgaagatgaacagactccaattcatatatcatggctatctttgtcacgagtgaattgttctcagtttctcggtttatgtgctcttccaggttgtaaatttaaagatgttagaagaaatgtccaaaaagatacagaagaactaaagagctgtggtatacaagacatatttgttttctgcaccagaggggaactgtcaaaatatagagtcccaaaccttctggatctctaccagcaatgtggaattatcacccatcatcatccaatcgcagatggagggactcctgacatagccagctgctgtgaaataatggaagagcttacaacctgccttaaaaattaccgaaaaaccttaatacatagctgcttgtctcctactatacctgtctgacacaatatcaccagagcaagccatagacagcctgcgagacctaagaggatccggggcaatacagaccatcaagcaatacaattatcttcatgagtttcgggacaaattagctgcacatctatcatcaagagattcacaatcaagatctgtatcaagataaaggaattcaaatagcatatatatgaccatgtctgaaatgtcagttctctagcataatttgtattgaaatgaaaccaccagtgttatcaacttgaatgtaaatgtacatgtgcagatattcctaaagttttattgacaaaaaaaaaaannaaaaaaaaaaaacaaaaaaaaaaaaaaaggggggggggcaaaaaaatttcccggggggggcccaaacccccctttttcttgaaaacagggggcgactcctaaagagaggaggaatattatataaggacaaggggagcggacgcgcgttttaaaaaaacgtgttctgtgagtaggacaaaaatggcttgagtgggcatttctttgaggaaagcacaccatcagttggggagcagggaaaattagtagggacaccactcaccgagaagagtaaatgaaacgcacgcgagggggataaataaacaatggggagtagataatgttgatacaccgagcatcaaatgtgtggagaagaagattaccaagaa

SEQ ID NO: 310392 - DNA, 811 bp, Homo sapiens
  misc_feature (445)..(446): n is a, c, g, or t
caattacaccagtcttctgtatcaacagaagtcttattaaatataaaatgctgtaccctgtcactagttatttaataacatattatttttctgtcatgttccattatagctgcttgtctcctactatacctgtctgacacaatatcaccagagcaagccatagacagcctgcgagacctaagaggatccggggcaatacagaccatcaagcaatacaattatcttcatgagtttcgggacaaattagctgcacatctatcatcaagagattcacaatcaagatctgtatcaagataaaggaattcaaatagcatatatatgaccatgtctgaaatgtcagttctctagcataatttgtattgaaatgaaaccaccagtgttatcaacttgaatgtaaatgtacatgtgcagatattcctaaagttttattgacaaaaaaaaaaannaaaaaaaaaaaacaaaaaaaaaaaaaaaggggggggggcaaaaaaatttcccggggggggcccaaacccccctttttcttgaaaacagggggcgactcctaaagagaggaggaatattatataaggacaaggggagcggacgcgcgttttaaaaaaacgtgttctgtgagtaggacaaaaatggcttgagtgggcatttctttgaggaaagcacaccatcagttggggagcagggaaaattagtagggacaccactcaccgagaagagtaaatgaaacgcacgcgagggggataaataaacaatggggagtagataatgttgatacaccgagcatcaaatgtgtggagaagaagattaccaagaa

SEQ ID NO: 310393 - DNA, 383 bp, Homo sapiens
gatggagggactcctgacatagccagctgctgtgaaataatggaagagcttacaacctgccttaaaaattaccgaaaaaccttaatacaacagtacgttcttttctccatacactatgtgagaaatgtctcagtcaaaatgatttctggaattatggtagccctattcagttatcacctacttcatagtttgttgtaaggattaaaaggtaataatgcactaggaaagcactggcacaatgtctggtacagggtaagtagtcaaatacgtgctgttattacttttcaagagtagggacaataaatgagtagatttggaaattgttagaacaaggttacaagcttttcttttttatttctttcctttagtcttagacctttagt

SEQ ID NO: 310394 - DNA, 1347 bp, Homo sapiens
atctgagcgagtcgcgtagctgagcccggcaggggctggggtggtgctgctgctatgagctgcaccatcgagaagatcctgacagacgccaagacgctgctggagaggctacgggagcacgatgcggccgccgagtcgctggtggatcagtcggcggcgctgcaccggcgggtagcagctatgcgggaggcggggacagcgcttccggaccagagctatggatttccttggaggaacaccaggatgctttggaacttatcatgagcaaatatcggaaacagatgttacagttaatggttgctaaaaaagcggtggatgctgaaccagtcctgaaagctcaccagtctcactctgcagaaattgagagtcagattgacagaatctgtgaaatgggagaagtgatgaggaaagcagttcaggtggatgatgaccagttttgtaagattcaggaaaaattagcccaattagagcttgaaaataaggaacttcgagaattattgtccatcagcagtgagtctcttcaagccagaaaggaaaactcaatggacactgcttcccaagccatcaaataactgaactctgaatgatggctggagattgtctatcaaggaaggaagttactgtcttcccattcaagtactgtccattaagtgtcttgcctcagatttgatttaatcttaattaaaggtatcaggtggcaatttagaattccagtcaatattggctgtccacagttctcagatgtgttaatgtgaatactacatgctgaatttcaccattcctttctcaaagagactacttttaattttcatttctgggaccttgatttatataaactatgttttcagttctttgttatttttcacatctctgaaactttgagcattttttataagccagcaatttattttacatagcattgtaaaatacacttctaggaaattttaggaaagatttaactgtttaaatctatttggcataaaccttgattttttttttccatttgacaaaaataatacaattccacagaactagatcagcagattctctgatttgtaatgtcattcacctgtgacattttaagtctctctggtgctaagaattggcactttatagcctggtgcctttacttttaatttgagagaacctactgctagtcccaggaaacacacttggaaataagtcagctattttttttgcccagtgatgctatagttgtcatattgtccaaagttcatattgttcaaagctgaggagcttgtcctgtgtatgtgaatgcacacatgtgcacttagttcaaatactaaaagtagcttttattaaatataatcagccaaaaacacacac

SEQ ID NO: 310395 - DNA, 1453 bp, Homo sapiens
atctgagcgagtcgcgtagctgagcccggcaggggctggggtggtgctgctgctatgagctgcaccatcgagaagatcctgacagacgccaagacgctgctggagaggctacgggagcacgatgcggccgccgagtcgctggtggatcagtcggcggcgctgcaccggcgggtagcagctatgcgggaggcggggacagcgcttccggaccagtatcaagaggatgcatccgatatgaaggacatgtccaaatacaaacctcacattctgctgtcccaagagaacacacagattagagacttgcaacaggaaaacagagagctatggatttccttggaggaacaccaggatgctttggaacttatcatgagcaaatatcggaaacagatgttacagttaatggttgctaaaaaagcggtggatgctgaaccagtcctgaaagctcaccagtctcactctgcagaaattgagagtcagattgacagaatctgtgaaatgggagaagtgatgaggaaagcagttcaggtggatgatgaccagttttgtaagattcaggaaaaattagcccaattagagcttgaaaataaggaacttcgagaattattgtccatcagcagtgagtctcttcaagccagaaaggaaaactcaatggacactgcttcccaagccatcaaataactgaactctgaatgatggctggagattgtctatcaaggaaggaagttactgtcttcccattcaagtactgtccattaagtgtcttgcctcagatttgatttaatcttaattaaaggtatcaggtggcaatttagaattccagtcaatattggctgtccacagttctcagatgtgttaatgtgaatactacatgctgaatttcaccattcctttctcaaagagactacttttaattttcatttctgggaccttgatttatataaactatgttttcagttctttgttatttttcacatctctgaaactttgagcattttttataagccagcaatttattttacatagcattgtaaaatacacttctaggaaattttaggaaagatttaactgtttaaatctatttggcataaaccttgattttttttttccatttgacaaaaataatacaattccacagaactagatcagcagattctctgatttgtaatgtcattcacctgtgacattttaagtctctctggtgctaagaattggcactttatagcctggtgcctttacttttaatttgagagaacctactgctagtcccaggaaacacacttggaaataagtcagctattttttttgcccagtgatgctatagttgtcatattgtccaaagttcatattgttcaaagctgaggagcttgtcctgtgtatgtgaatgcacacatgtgcacttagttcaaatactaaaagtagcttttattaaatataatcagccaaaaacacacac

SEQ ID NO: 310396 - DNA, 514 bp, Homo sapiens
atctgagcgagtcgcgtagctgagcccggcaggggctggggtggtgctgctgctatgagctgcaccatcgagaagatcctgacagacgccaagacgctgctggagaggctacgggagcacgatgcggccgccgagtcgctggtggatcagtcggcggcgctgcaccggcgggtagcagctatgcgggaggcggggacagcgcttccggaccagtatcaagaggatgcatccgatatgaaggacatgtccaaatacaaacctcacattctgctgtcccaagagaacacacagattagagacttgcaacaggaaaacagagagctatggatttccttggaggaacaccaggatgctttggaacttatcatgagcaaatatcggaaacagatgttacagttaatggttgctaaaaaagcggtggatgctgaaccagtcctgaaagctcaccagtctcactctgcagtaagaaactttgaataaattcgaaatgaaccaaattgaaatcttgagattg

SEQ ID NO: 310397 - DNA, 466 bp, Homo sapiens
atctgagcgagtcgcgtagctgagcccggcaggggctggggtggtgctgctgctatgagctgcaccatcgagaagatcctgacagacgccaagacgctgctggagaggctacgggagcacgatgcggccgccgagtcgctggtggatcagtcggcggcgctgcaccggcgggtagcagctatgcgggaggcggggacagcgcttccggaccagggcagagggtaggagtccagtgctctcggattctgggcactgaagggtggagagcgagagctatggatttccttggaggaacaccaggatgctttggaacttatcatgagcaaatatcggaaacagatgttacagttaatggttgctaaaaaagcggtggatgctgaaccagtcctgaaagctcaccagtctcactctgcagtaagaaactttgaataaattcgaaatgaaccaaattgaaatcttgagattg

SEQ ID NO: 310398 - DNA, 5417 bp, Homo sapiens
atctgagcgagtcgcgtagctgagcccggcaggggctggggtggtgctgctgctatgagctgcaccatcgagaagatcctgacagacgccaagacgctgctggagaggctacgggagcacgatgcggccgccgagtcgctggtggatcagtcggcggcgctgcaccggcgggtagcagctatgcgggaggcggggacagcgcttccggaccagtatcaagaggatgcatccgatatgaaggacatgtccaaatacaaacctcacattctgctgtcccaagagaacacacagattagagacttgcaacaggaaaacagagagctatggatttccttggaggaacaccaggatgctttggaacttatcatgagcaaatatcggaaacagatgttacagttaatggttgctaaaaaagcggtggatgctgaaccagtcctgaaagctcaccagtctcactctgcagaaattgagagtcagattgacagaatctgtgaaatgggagaagtgatgaggaaagcagttcaggtggatgatgaccagttttgtaagattcaggaaaaattagcccaattagagcttgaaaataaggaacttcgagaattattgtccatcagcagtgagtctcttcaagccagaaaggaaaactcaatggacactgcttcccaagccatcaaataactgaactctgaatgatggctggagattgtctatcaaggaaggaagttactgtcttcccattcaagtactgtccattaagtgtcttgcctcagatttgatttaatcttaattaaaggtatcaggtggcaatttagaattccagtcaatattggctgtccacagttctcagatgtgttaatgtgaatactacatgctgaatttcaccattcctttctcaaagagactacttttaattttcatttctgggaccttgatttatataaactatgttttcagttctttgttatttttcacatctctgaaactttgagcattttttataagccagcaatttattttacatagcattgtaaaatacacttctaggaaattttaggaaagatttaactgtttaaatctatttggcataaaccttgattttttttttccatttgacaaaaataatacaattccacagaactagatcagcagattctctgatttgtaatgtcattcacctgtgacattttaagtctctctggtgctaagaattggcactttatagcctggtgcctttacttttaatttgagagaacctactgctagtcccaggaaacacacttggaaataagtcagctattttttttgcccagtgatgctatagttgtcatattgtccaaagttcatattgttcaaagctgaggagcttgtcctgtgtatgtgaatgcacacatgtgcacttagttcaaatactaaaagtagcttttattaaatataatcagccaaaaacacacacaaaataaaaaaaacaaatataagtagtcagtttttcaatgttatcctactagttctacattctattttaatttttatacaatttccattttatagttaagaaccatcacttacttggattggatgtctttcattcctagcactaatagttggctttctttttttttgtttacatagaagcagggtttttttttatcttttttctttttttttgtttaagctatataaaaaggtgaggaagcagttttgttacctaatgaaaattattacactcataatgctgtgtaggcaacattgagattcaaatgcccagtggtcaactgggttcactcatcaactcattcccgtcccagtttactcacatttcaaatttataaatttcttcatgttatactattctatttagatttgcccagaattagttgaaataatgctaaacctgtcaatattttccagtaacattaagcaccatactgcatgggagagacacagtactaaaaagagttgttagtgctttatgtgagtgatatttctttcgtaatgctataaagaactacagttaaaataacaaaatattttaaagatgtcctaaaagcatctgatcccagtaataactaatggatgtcatctagagcagtgggtgttaatgaataggtatatgtcatttaagaatttttcaaatttctgtttgatatcctgcatagaatttgacaaaaaaaacacttccaagtgtgagcattttttatttcatttcccaagagtaagtaagtaactattagcccagccatctgcctcgaagtataccttaagtgaccccataaatccattcaagaggcaggtactctataccatttggcagccacggccaaacctaccatggccagatttcagtgaaaatgatgaagtaatcaaatcaaggtataatatggtgtccctttatgtgctttatgttcctttagagctgtttataaagttctttatatctcaagtgttaggataaatcgacatactaacttttccccctgcaaaattaaaagcctgaggtacaagtctaagaagcttttagtgctctacataatataaattctggctggtgttaatgctatgaagataatatgtagttagaaaattgagtcggggaggaatgctcttcattttaagtggattttaaagtttctccttgagtggatgaagaacttgcctggtttgcaaaaatcttagttcaaaattatattttctaacaaaaactgcattttgagaagataagctaattttactcagtagtaagtcaaatgaggaagtgcagagggtttttttacatatatatagcaaccttgtcaagtggtcctcacaagagtcataaatactttgtaattagcacagtatattcagcagtgtataactctacaaatagtaccttatattagtgtagtattatatcaatatcttatgtataattcttatattaataccttatgcataattggattcaaacattgaaggtctattttagtgttcttcaaaatgtgcttccctgacctactgaaatagaaacttggtgatgaagttcaagaatttgtattctaatcatctcaaacaattcctaaagacactgattttaaaatatctagtctaggccccattgtgtaatagttagcactctaaaagatgaaaaagaaaatagtctatgtgccaaccacttcattagtacttatgaatttaaaaatgaaaaagtctggtacaggagacaagtatatatataaaattataatgcagtgtgataaatccattatagtatgtataagatacagaagagggactttaaacttgagaattcaatagagataataaatgggtaggagggaaatagaaactttggtgccactactacctgtcaggtactgtattatatactccattttaactgtacctcattttgcagatactcaggcacaaggaggtggttatttgtccaaactggaaccaagattcaaacccagacagagtcttaagcacatttttaatcactaactaacttgagatgcctaaatgccaaatactgttgggagttcaagtggttcttgattagcaaaatctatttttattagtgcaaaagaaacaccacagcttataaagtattatgaattcaataaatggagtcttaactaatgagatattattttctagaatggtgtagctgagagtatgtgtgattcaactgaaaggaataatgtttaatcagtgactcttactatatacaggaaaaggtgcagttctgtctttcaaatctgcctccttaccatattggcttacatccctcatgctgttttcttgtgtttgctagaaagttgttgccaagccaaatgtcatggccatgttgaaggcaaggaagaaaaaatggaaatggcctgtgccagctatatatatcgccttttatgagggaaagcaaagctttctcagaaatcccaaatggattttcccttgacttaattgcctgaccagttaaatggccactggtacctgcaaagaaagcagggtacatagctgtcccaaataaaatcagtattagcaagaagaaagaatattgagaaagcaattaacagtgtctgtgactgtgacatgtctgtgactttatattgtcaagtcctttccccttgaatatagttttggaagaattagctgaaggagtgtgttgacattgaatggccaagagaatgggctgtagcagacatctgtcatttctcttttggctgcccagtatcctaactcctgtgtttaaggaatccctcacctaatgaggcagagcatttcttcctcctaaagaatttgaaagtaccaggtaatgttttctcagcctccttttgcagctaaggaagaaacatctgccttcaattttaaaattagtgatacaaagaaggagggaaccatgcagattcctttgaagatggtgattaacaacactactgcattcatctccacagaggtacagcaaaagtgatttagttagcgataacctctaattctatttttttatttttattttttgagacagtcttgctctgtcaaccaggctggagtgcagtagcactgtcttaactcactgcaacctccacctcctgggttcaagcgattctcctgcctcagcctcccaagtcgctgggattacaagtgcccaccaccatgcacagctaatttttgtgtttttagtagatggggtttctccatgttggccaggctggtctcgaacttatgacttcaggtgatccgcccgccttggcctcccaaagtgctgggattataggcgtgagccactgtgcctggcctgtaacctctaattcttgtttgctggctgtcctagagatcctgagaattacttttaataaaatcatttttttgctgttattaaaactaacctgaattgcctaaaaccaagaactctgcttgataaaataagcatagttttaggaacagccatgcagatataaattttatcaacactttatacataatttgggacttatatttaaatgtaatatttgatgcttataaaagggtaaatggggaatgcaaataaattatcaagcataataactcatcacctaacttaagaataacattatgagtgcttgtattttatctatttgagctcttctcctatctttgccgacccccccgctctctttttaatagatttgttcgaatgtagaaagacctaaaatacatatgtatccctaaagtgacttattttatagttttctttctttttgaacttcaaaaaaattgtatcatactctatgtagtctaaggatttggtttttttcactcaacatgtctctagaattcacaagttttattgttttatagctgtcattttcattgatgtatatttcattgttgggttatacaacatattgttaaggaatacatacatatataataaattatacattttttaaaaaaaacct

SEQ ID NO: 310399 - DNA, 4609 bp, Homo sapiens
atctgagcgagtcgcgtagctgagcccggcaggggctggggtggtgctgctgctatgagctgcaccatcgagaagatcctgacagacgccaagacgctgctggagaggctacgggagcacgatgcggccgccgagtcgctggtggatcagtcggcggcgctgcaccggcgggtagcagctatgcgggaggcggggacagcgcttccggaccagtatcaagaggatgcatccgatatgaaggacatgtccaaatacaaacctcacattctgctgtcccaagagaacacacagattagagacttgcaacaggaaaacagagagctatggatttccttggaggaacaccaggatgctttggaacttatcatgagcaaatatcggaaacagatgttacagttaatggttgctaaaaaagcggtggatgctgaaccagtcctgaaagctcaccagtctcactctgcagaaattgagagtcagattgacagaatctgtgaaatgggagaagtgatgaggaaagcagttcaggtggatgatgaccagttttgtaagattcaggaaaaattagcccaattagagcttgaaaataaggaacttcgagaattattgtccatcagcagtgagtctcttcaagccagaaaggaaaactcaatggacactgcttcccaagccatcaaataactgaactctgaatgatggctggagattgtctatcaaggaaggaagttactgtcttcccattcaagtactgtccattaagtgtcttgcctcagatttgatttaatcttaattaaaggtatcaggtggcaatttagaattccagtcaatattggctgtccacagttctcagatgtgttaatgtgaatactacatgctgaatttcaccattcctttctcaaagagactacttttaattttcatttctgggaccttgatttatataaactatgttttcagttctttgttatttttcacatctctgaaactttgagcattttttataagccagcaatttattttacatagcattgtaaaatacacttctaggaaattttaggaaagatttaactgtttaaatctatttggcataaaccttgattttttttttccatttgacaaaaataatacaattccacagaactagatcagcagattctctgatttgtaatgtcattcacctgtgacattttaagtctctctggtgctaagaattggcactttatagcctggtgcctttacttttaatttgagagaacctactgctagtcccaggaaacacacttggaaataagtcagctattttttttgcccagtgatgctatagttgtcatattgtccaaagttcatattgttcaaagctgaggagcttgtcctgtgtatgtgaatgcacacatgtgcacttagttcaaatactaaaagtagcttttattaaatataatcagccaaaaacacacacaaaataaaaaaaacaaatataagtagtcagtttttcaatgttatcctactagttctacattctattttaatttttatacaatttccattttatagttaagaaccatcacttacttggattggatgtctttcattcctagcactaatagttggctttctttttttttgtttacatagaagcagggtttttttttatcttttttctttttttttgtttaagctatataaaaaggtgaggaagcagttttgttacctaatgaaaattattacactcataatgctgtgtaggcaacattgagattcaaatgcccagtggtcaactgggttcactcatcaactcattcccgtcccagtttactcacatttcaaatttataaatttcttcatgttatactattctatttagatttgcccagaattagttgaaataatgctaaacctgtcaatattttccagtaacattaagcaccatactgcatgggagagacacagtactaaaaagagttgttagtgctttatgtgagtgatatttctttcgtaatgctataaagaactacagttaaaataacaaaatattttaaagatgtcctaaaagcatctgatcccagtaataactaatggatgtcatctagagcagtgggtgttaatgaataggtatatgtcatttaagaatttttcaaatttctgtttgatatcctgcatagaatttgacaaaaaaaacacttccaagtgtgagcattttttatttcatttcccaagagtaagtaagtaactattagcccagccatctgcctcgaagtataccttaagtgaccccataaatccattcaagaggcaggtactctataccatttggcagccacggccaaacctaccatggccagatttcagtgaaaatgatgaagtaatcaaatcaaggtataatatggtgtccctttatgtgctttatgttcctttagagctgtttataaagttctttatatctcaagtgttaggataaatcgacatactaacttttccccctgcaaaattaaaagcctgaggtacaagtctaagaagcttttagtgctctacataatataaattctggctggtgttaatgctatgaagataatatgtagttagaaaattgagtcggggaggaatgctcttcattttaagtggattttaaagtttctccttgagtggatgaagaacttgcctggtttgcaaaaatcttagttcaaaattatattttctaacaaaaactgcattttgagaagataagctaattttactcagtagtaagtcaaatgaggaagtgcagagggtttttttacatatatatagcaaccttgtcaagtggtcctcacaagagtcataaatactttgtaattagcacagtatattcagcagtgtataactctacaaatagtaccttatattagtgtagtattatatcaatatcttatgtataattcttatattaataccttatgcataattggattcaaacattgaaggtctattttagtgttcttcaaaatgtgcttccctgacctactgaaatagaaacttggtgatgaagttcaagaatttgtattctaatcatctcaaacaattcctaaagacactgattttaaaatatctagtctaggccccattgtgtaatagttagcactctaaaagatgaaaaagaaaatagtctatgtgccaaccacttcattagtacttatgaatttaaaaatgaaaaagtctggtacaggagacaagtatatatataaaattataatgcagtgtgataaatccattatagtatgtataagatacagaagagggactttaaacttgagaattcaatagagataataaatgggtaggagggaaatagaaactttggtgccactactacctgtcaggtactgtattatatactccattttaactgtacctcattttgcagatactcaggcacaaggaggtggttatttgtccaaactggaaccaagattcaaacccagacagagtcttaagcacatttttaatcactaactaacttgagatgcctaaatgccaaatactgttgggagttcaagtggttcttgattagcaaaatctatttttattagtgcaaaagaaacaccacagcttataaagtattatgaattcaataaatggagtcttaactaatgagatattattttctagaatggtgtagctgagagtatgtgtgattcaactgaaaggaataatgtttaatcagtgactcttactatatacaggaaaaggtgcagttctgtctttcaaatctgcctccttaccatattggcttacatccctcatgctgttttcttgtgtttgctagaaagttgttgccaagccaaatgtcatggccatgttgaaggcaaggaagaaaaaatggaaatggcctgtgccagctatatatatcgccttttatgagggaaagcaaagctttctcagaaatcccaaatggattttcccttgacttaattgcctgaccagttaaatggccactggtacctgcaaagaaagcagggtacatagctgtcccaaataaaatcagtattagcaagaagaaagaatattgagaaagcaattaacagtgtctgtgactgtgacatgtctgtgactttatattgtcaagtcctttccccttgaatatagttttggaagaattagctgaaggagtgtgttgacattgaatggccaagagaatgggctgtagcagacatctgtcatttctcttttggctgcccagtatcctaactcctgtgtttaaggaatccctcacctaatgaggcagagcatttcttcctcctaaagaatttgaaagtaccaggtaatgttttctcagcctccttttgcagctaaggaagaaacatctgccttcaattttaaaattagtgatacaaagaaggagggaaccatgcagattcctttgaagatggtgattaacaacactactgcattcatctccacagaggtacagcaaaagtgatttagttagcgataacctctaattctatttttttatttttattttttgagacagtcttgctctgtcaaccaggctggagtgcagtagcactgcactccagcctgatgacagagcaagactcagtctcaaaaataaataaaaataataaaacctcaaaaa

SEQ ID NO: 310400 - DNA, 5311 bp, Homo sapiens
atctgagcgagtcgcgtagctgagcccggcaggggctggggtggtgctgctgctatgagctgcaccatcgagaagatcctgacagacgccaagacgctgctggagaggctacgggagcacgatgcggccgccgagtcgctggtggatcagtcggcggcgctgcaccggcgggtagcagctatgcgggaggcggggacagcgcttccggaccagagctatggatttccttggaggaacaccaggatgctttggaacttatcatgagcaaatatcggaaacagatgttacagttaatggttgctaaaaaagcggtggatgctgaaccagtcctgaaagctcaccagtctcactctgcagaaattgagagtcagattgacagaatctgtgaaatgggagaagtgatgaggaaagcagttcaggtggatgatgaccagttttgtaagattcaggaaaaattagcccaattagagcttgaaaataaggaacttcgagaattattgtccatcagcagtgagtctcttcaagccagaaaggaaaactcaatggacactgcttcccaagccatcaaataactgaactctgaatgatggctggagattgtctatcaaggaaggaagttactgtcttcccattcaagtactgtccattaagtgtcttgcctcagatttgatttaatcttaattaaaggtatcaggtggcaatttagaattccagtcaatattggctgtccacagttctcagatgtgttaatgtgaatactacatgctgaatttcaccattcctttctcaaagagactacttttaattttcatttctgggaccttgatttatataaactatgttttcagttctttgttatttttcacatctctgaaactttgagcattttttataagccagcaatttattttacatagcattgtaaaatacacttctaggaaattttaggaaagatttaactgtttaaatctatttggcataaaccttgattttttttttccatttgacaaaaataatacaattccacagaactagatcagcagattctctgatttgtaatgtcattcacctgtgacattttaagtctctctggtgctaagaattggcactttatagcctggtgcctttacttttaatttgagagaacctactgctagtcccaggaaacacacttggaaataagtcagctattttttttgcccagtgatgctatagttgtcatattgtccaaagttcatattgttcaaagctgaggagcttgtcctgtgtatgtgaatgcacacatgtgcacttagttcaaatactaaaagtagcttttattaaatataatcagccaaaaacacacacaaaataaaaaaaacaaatataagtagtcagtttttcaatgttatcctactagttctacattctattttaatttttatacaatttccattttatagttaagaaccatcacttacttggattggatgtctttcattcctagcactaatagttggctttctttttttttgtttacatagaagcagggtttttttttatcttttttctttttttttgtttaagctatataaaaaggtgaggaagcagttttgttacctaatgaaaattattacactcataatgctgtgtaggcaacattgagattcaaatgcccagtggtcaactgggttcactcatcaactcattcccgtcccagtttactcacatttcaaatttataaatttcttcatgttatactattctatttagatttgcccagaattagttgaaataatgctaaacctgtcaatattttccagtaacattaagcaccatactgcatgggagagacacagtactaaaaagagttgttagtgctttatgtgagtgatatttctttcgtaatgctataaagaactacagttaaaataacaaaatattttaaagatgtcctaaaagcatctgatcccagtaataactaatggatgtcatctagagcagtgggtgttaatgaataggtatatgtcatttaagaatttttcaaatttctgtttgatatcctgcatagaatttgacaaaaaaaacacttccaagtgtgagcattttttatttcatttcccaagagtaagtaagtaactattagcccagccatctgcctcgaagtataccttaagtgaccccataaatccattcaagaggcaggtactctataccatttggcagccacggccaaacctaccatggccagatttcagtgaaaatgatgaagtaatcaaatcaaggtataatatggtgtccctttatgtgctttatgttcctttagagctgtttataaagttctttatatctcaagtgttaggataaatcgacatactaacttttccccctgcaaaattaaaagcctgaggtacaagtctaagaagcttttagtgctctacataatataaattctggctggtgttaatgctatgaagataatatgtagttagaaaattgagtcggggaggaatgctcttcattttaagtggattttaaagtttctccttgagtggatgaagaacttgcctggtttgcaaaaatcttagttcaaaattatattttctaacaaaaactgcattttgagaagataagctaattttactcagtagtaagtcaaatgaggaagtgcagagggtttttttacatatatatagcaaccttgtcaagtggtcctcacaagagtcataaatactttgtaattagcacagtatattcagcagtgtataactctacaaatagtaccttatattagtgtagtattatatcaatatcttatgtataattcttatattaataccttatgcataattggattcaaacattgaaggtctattttagtgttcttcaaaatgtgcttccctgacctactgaaatagaaacttggtgatgaagttcaagaatttgtattctaatcatctcaaacaattcctaaagacactgattttaaaatatctagtctaggccccattgtgtaatagttagcactctaaaagatgaaaaagaaaatagtctatgtgccaaccacttcattagtacttatgaatttaaaaatgaaaaagtctggtacaggagacaagtatatatataaaattataatgcagtgtgataaatccattatagtatgtataagatacagaagagggactttaaacttgagaattcaatagagataataaatgggtaggagggaaatagaaactttggtgccactactacctgtcaggtactgtattatatactccattttaactgtacctcattttgcagatactcaggcacaaggaggtggttatttgtccaaactggaaccaagattcaaacccagacagagtcttaagcacatttttaatcactaactaacttgagatgcctaaatgccaaatactgttgggagttcaagtggttcttgattagcaaaatctatttttattagtgcaaaagaaacaccacagcttataaagtattatgaattcaataaatggagtcttaactaatgagatattattttctagaatggtgtagctgagagtatgtgtgattcaactgaaaggaataatgtttaatcagtgactcttactatatacaggaaaaggtgcagttctgtctttcaaatctgcctccttaccatattggcttacatccctcatgctgttttcttgtgtttgctagaaagttgttgccaagccaaatgtcatggccatgttgaaggcaaggaagaaaaaatggaaatggcctgtgccagctatatatatcgccttttatgagggaaagcaaagctttctcagaaatcccaaatggattttcccttgacttaattgcctgaccagttaaatggccactggtacctgcaaagaaagcagggtacatagctgtcccaaataaaatcagtattagcaagaagaaagaatattgagaaagcaattaacagtgtctgtgactgtgacatgtctgtgactttatattgtcaagtcctttccccttgaatatagttttggaagaattagctgaaggagtgtgttgacattgaatggccaagagaatgggctgtagcagacatctgtcatttctcttttggctgcccagtatcctaactcctgtgtttaaggaatccctcacctaatgaggcagagcatttcttcctcctaaagaatttgaaagtaccaggtaatgttttctcagcctccttttgcagctaaggaagaaacatctgccttcaattttaaaattagtgatacaaagaaggagggaaccatgcagattcctttgaagatggtgattaacaacactactgcattcatctccacagaggtacagcaaaagtgatttagttagcgataacctctaattctatttttttatttttattttttgagacagtcttgctctgtcaaccaggctggagtgcagtagcactgtcttaactcactgcaacctccacctcctgggttcaagcgattctcctgcctcagcctcccaagtcgctgggattacaagtgcccaccaccatgcacagctaatttttgtgtttttagtagatggggtttctccatgttggccaggctggtctcgaacttatgacttcaggtgatccgcccgccttggcctcccaaagtgctgggattataggcgtgagccactgtgcctggcctgtaacctctaattcttgtttgctggctgtcctagagatcctgagaattacttttaataaaatcatttttttgctgttattaaaactaacctgaattgcctaaaaccaagaactctgcttgataaaataagcatagttttaggaacagccatgcagatataaattttatcaacactttatacataatttgggacttatatttaaatgtaatatttgatgcttataaaagggtaaatggggaatgcaaataaattatcaagcataataactcatcacctaacttaagaataacattatgagtgcttgtattttatctatttgagctcttctcctatctttgccgacccccccgctctctttttaatagatttgttcgaatgtagaaagacctaaaatacatatgtatccctaaagtgacttattttatagttttctttctttttgaacttcaaaaaaattgtatcatactctatgtagtctaaggatttggtttttttcactcaacatgtctctagaattcacaagttttattgttttatagctgtcattttcattgatgtatatttcattgttgggttatacaacatattgttaaggaatacatacatatataataaattatacattttttaaaaaaaacct

SEQ ID NO: 310401 - DNA, 5646 bp, Homo sapiens
atctgagcgagtcgcgtagctgagcccggcaggggctggggtggtgctgctgctatgagctgcaccatcgagaagatcctgacagacgccaagacgctgctggagaggctacgggagcacgatgcggccgccgagtcgctggtggatcagtcggcggcgctgcaccggcgggtagcagctatgcgggaggcggggacagcgcttccggaccagggcagagggtaggagtccagtgctctcggattctgggcactgaagggtggagagcgaggtaaagtgggaactcggcctggaatttattcccggtctcagagggcggcggtgagaccattttcctgggtcggggctgagaatcctgccctggagccctaacttctgcctcttcagttgcatctgccgctgttctctttaaggcatgcttagtctgtctctatttgtccagtatcaagaggatgcatccgatatgaaggacatgtccaaatacaaacctcacattctgctgtcccaagagaacacacagattagagacttgcaacaggaaaacagagagctatggatttccttggaggaacaccaggatgctttggaacttatcatgagcaaatatcggaaacagatgttacagttaatggttgctaaaaaagcggtggatgctgaaccagtcctgaaagctcaccagtctcactctgcagaaattgagagtcagattgacagaatctgtgaaatgggagaagtgatgaggaaagcagttcaggtggatgatgaccagttttgtaagattcaggaaaaattagcccaattagagcttgaaaataaggaacttcgagaattattgtccatcagcagtgagtctcttcaagccagaaaggaaaactcaatggacactgcttcccaagccatcaaataactgaactctgaatgatggctggagattgtctatcaaggaaggaagttactgtcttcccattcaagtactgtccattaagtgtcttgcctcagatttgatttaatcttaattaaaggtatcaggtggcaatttagaattccagtcaatattggctgtccacagttctcagatgtgttaatgtgaatactacatgctgaatttcaccattcctttctcaaagagactacttttaattttcatttctgggaccttgatttatataaactatgttttcagttctttgttatttttcacatctctgaaactttgagcattttttataagccagcaatttattttacatagcattgtaaaatacacttctaggaaattttaggaaagatttaactgtttaaatctatttggcataaaccttgattttttttttccatttgacaaaaataatacaattccacagaactagatcagcagattctctgatttgtaatgtcattcacctgtgacattttaagtctctctggtgctaagaattggcactttatagcctggtgcctttacttttaatttgagagaacctactgctagtcccaggaaacacacttggaaataagtcagctattttttttgcccagtgatgctatagttgtcatattgtccaaagttcatattgttcaaagctgaggagcttgtcctgtgtatgtgaatgcacacatgtgcacttagttcaaatactaaaagtagcttttattaaatataatcagccaaaaacacacacaaaataaaaaaaacaaatataagtagtcagtttttcaatgttatcctactagttctacattctattttaatttttatacaatttccattttatagttaagaaccatcacttacttggattggatgtctttcattcctagcactaatagttggctttctttttttttgtttacatagaagcagggtttttttttatcttttttctttttttttgtttaagctatataaaaaggtgaggaagcagttttgttacctaatgaaaattattacactcataatgctgtgtaggcaacattgagattcaaatgcccagtggtcaactgggttcactcatcaactcattcccgtcccagtttactcacatttcaaatttataaatttcttcatgttatactattctatttagatttgcccagaattagttgaaataatgctaaacctgtcaatattttccagtaacattaagcaccatactgcatgggagagacacagtactaaaaagagttgttagtgctttatgtgagtgatatttctttcgtaatgctataaagaactacagttaaaataacaaaatattttaaagatgtcctaaaagcatctgatcccagtaataactaatggatgtcatctagagcagtgggtgttaatgaataggtatatgtcatttaagaatttttcaaatttctgtttgatatcctgcatagaatttgacaaaaaaaacacttccaagtgtgagcattttttatttcatttcccaagagtaagtaagtaactattagcccagccatctgcctcgaagtataccttaagtgaccccataaatccattcaagaggcaggtactctataccatttggcagccacggccaaacctaccatggccagatttcagtgaaaatgatgaagtaatcaaatcaaggtataatatggtgtccctttatgtgctttatgttcctttagagctgtttataaagttctttatatctcaagtgttaggataaatcgacatactaacttttccccctgcaaaattaaaagcctgaggtacaagtctaagaagcttttagtgctctacataatataaattctggctggtgttaatgctatgaagataatatgtagttagaaaattgagtcggggaggaatgctcttcattttaagtggattttaaagtttctccttgagtggatgaagaacttgcctggtttgcaaaaatcttagttcaaaattatattttctaacaaaaactgcattttgagaagataagctaattttactcagtagtaagtcaaatgaggaagtgcagagggtttttttacatatatatagcaaccttgtcaagtggtcctcacaagagtcataaatactttgtaattagcacagtatattcagcagtgtataactctacaaatagtaccttatattagtgtagtattatatcaatatcttatgtataattcttatattaataccttatgcataattggattcaaacattgaaggtctattttagtgttcttcaaaatgtgcttccctgacctactgaaatagaaacttggtgatgaagttcaagaatttgtattctaatcatctcaaacaattcctaaagacactgattttaaaatatctagtctaggccccattgtgtaatagttagcactctaaaagatgaaaaagaaaatagtctatgtgccaaccacttcattagtacttatgaatttaaaaatgaaaaagtctggtacaggagacaagtatatatataaaattataatgcagtgtgataaatccattatagtatgtataagatacagaagagggactttaaacttgagaattcaatagagataataaatgggtaggagggaaatagaaactttggtgccactactacctgtcaggtactgtattatatactccattttaactgtacctcattttgcagatactcaggcacaaggaggtggttatttgtccaaactggaaccaagattcaaacccagacagagtcttaagcacatttttaatcactaactaacttgagatgcctaaatgccaaatactgttgggagttcaagtggttcttgattagcaaaatctatttttattagtgcaaaagaaacaccacagcttataaagtattatgaattcaataaatggagtcttaactaatgagatattattttctagaatggtgtagctgagagtatgtgtgattcaactgaaaggaataatgtttaatcagtgactcttactatatacaggaaaaggtgcagttctgtctttcaaatctgcctccttaccatattggcttacatccctcatgctgttttcttgtgtttgctagaaagttgttgccaagccaaatgtcatggccatgttgaaggcaaggaagaaaaaatggaaatggcctgtgccagctatatatatcgccttttatgagggaaagcaaagctttctcagaaatcccaaatggattttcccttgacttaattgcctgaccagttaaatggccactggtacctgcaaagaaagcagggtacatagctgtcccaaataaaatcagtattagcaagaagaaagaatattgagaaagcaattaacagtgtctgtgactgtgacatgtctgtgactttatattgtcaagtcctttccccttgaatatagttttggaagaattagctgaaggagtgtgttgacattgaatggccaagagaatgggctgtagcagacatctgtcatttctcttttggctgcccagtatcctaactcctgtgtttaaggaatccctcacctaatgaggcagagcatttcttcctcctaaagaatttgaaagtaccaggtaatgttttctcagcctccttttgcagctaaggaagaaacatctgccttcaattttaaaattagtgatacaaagaaggagggaaccatgcagattcctttgaagatggtgattaacaacactactgcattcatctccacagaggtacagcaaaagtgatttagttagcgataacctctaattctatttttttatttttattttttgagacagtcttgctctgtcaaccaggctggagtgcagtagcactgtcttaactcactgcaacctccacctcctgggttcaagcgattctcctgcctcagcctcccaagtcgctgggattacaagtgcccaccaccatgcacagctaatttttgtgtttttagtagatggggtttctccatgttggccaggctggtctcgaacttatgacttcaggtgatccgcccgccttggcctcccaaagtgctgggattataggcgtgagccactgtgcctggcctgtaacctctaattcttgtttgctggctgtcctagagatcctgagaattacttttaataaaatcatttttttgctgttattaaaactaacctgaattgcctaaaaccaagaactctgcttgataaaataagcatagttttaggaacagccatgcagatataaattttatcaacactttatacataatttgggacttatatttaaatgtaatatttgatgcttataaaagggtaaatggggaatgcaaataaattatcaagcataataactcatcacctaacttaagaataacattatgagtgcttgtattttatctatttgagctcttctcctatctttgccgacccccccgctctctttttaatagatttgttcgaatgtagaaagacctaaaatacatatgtatccctaaagtgacttattttatagttttctttctttttgaacttcaaaaaaattgtatcatactctatgtagtctaaggatttggtttttttcactcaacatgtctctagaattcacaagttttattgttttatagctgtcattttcattgatgtatatttcattgttgggttatacaacatattgttaaggaatacatacatatataataaattatacattttttaaaaaaaacct

SEQ ID NO: 310402 - DNA, 5303 bp, Homo sapiens
atctgagcgagtcgcgtagctgagcccggcaggggctggggtggtgctgctgctatgagctgcaccatcgagaagatcctgacagacgccaagacgctgctggagaggctacgggagcacgatgcggccgccgagtcgctggtggatcagtcggcggcgctgcaccggcgggtagcagctatgcgggaggcggggacagcgcttccggaccagtatcaagaggatgcatccgatatgaaggacatgtccaaatacaaacctcacattctgctgtcccaagagaacacacagattagagacttgcaacaggaaaacagagagctatggatttccttggaggaacaccaggatgctttggaacttatcatgagcaaatatcggaaacagatgttacagttaatggttgctaaaaaagcggtggatgctgaaccagtcctgaaagctcaccagtctcactctgcacttgaaaataaggaacttcgagaattattgtccatcagcagtgagtctcttcaagccagaaaggaaaactcaatggacactgcttcccaagccatcaaataactgaactctgaatgatggctggagattgtctatcaaggaaggaagttactgtcttcccattcaagtactgtccattaagtgtcttgcctcagatttgatttaatcttaattaaaggtatcaggtggcaatttagaattccagtcaatattggctgtccacagttctcagatgtgttaatgtgaatactacatgctgaatttcaccattcctttctcaaagagactacttttaattttcatttctgggaccttgatttatataaactatgttttcagttctttgttatttttcacatctctgaaactttgagcattttttataagccagcaatttattttacatagcattgtaaaatacacttctaggaaattttaggaaagatttaactgtttaaatctatttggcataaaccttgattttttttttccatttgacaaaaataatacaattccacagaactagatcagcagattctctgatttgtaatgtcattcacctgtgacattttaagtctctctggtgctaagaattggcactttatagcctggtgcctttacttttaatttgagagaacctactgctagtcccaggaaacacacttggaaataagtcagctattttttttgcccagtgatgctatagttgtcatattgtccaaagttcatattgttcaaagctgaggagcttgtcctgtgtatgtgaatgcacacatgtgcacttagttcaaatactaaaagtagcttttattaaatataatcagccaaaaacacacacaaaataaaaaaaacaaatataagtagtcagtttttcaatgttatcctactagttctacattctattttaatttttatacaatttccattttatagttaagaaccatcacttacttggattggatgtctttcattcctagcactaatagttggctttctttttttttgtttacatagaagcagggtttttttttatcttttttctttttttttgtttaagctatataaaaaggtgaggaagcagttttgttacctaatgaaaattattacactcataatgctgtgtaggcaacattgagattcaaatgcccagtggtcaactgggttcactcatcaactcattcccgtcccagtttactcacatttcaaatttataaatttcttcatgttatactattctatttagatttgcccagaattagttgaaataatgctaaacctgtcaatattttccagtaacattaagcaccatactgcatgggagagacacagtactaaaaagagttgttagtgctttatgtgagtgatatttctttcgtaatgctataaagaactacagttaaaataacaaaatattttaaagatgtcctaaaagcatctgatcccagtaataactaatggatgtcatctagagcagtgggtgttaatgaataggtatatgtcatttaagaatttttcaaatttctgtttgatatcctgcatagaatttgacaaaaaaaacacttccaagtgtgagcattttttatttcatttcccaagagtaagtaagtaactattagcccagccatctgcctcgaagtataccttaagtgaccccataaatccattcaagaggcaggtactctataccatttggcagccacggccaaacctaccatggccagatttcagtgaaaatgatgaagtaatcaaatcaaggtataatatggtgtccctttatgtgctttatgttcctttagagctgtttataaagttctttatatctcaagtgttaggataaatcgacatactaacttttccccctgcaaaattaaaagcctgaggtacaagtctaagaagcttttagtgctctacataatataaattctggctggtgttaatgctatgaagataatatgtagttagaaaattgagtcggggaggaatgctcttcattttaagtggattttaaagtttctccttgagtggatgaagaacttgcctggtttgcaaaaatcttagttcaaaattatattttctaacaaaaactgcattttgagaagataagctaattttactcagtagtaagtcaaatgaggaagtgcagagggtttttttacatatatatagcaaccttgtcaagtggtcctcacaagagtcataaatactttgtaattagcacagtatattcagcagtgtataactctacaaatagtaccttatattagtgtagtattatatcaatatcttatgtataattcttatattaataccttatgcataattggattcaaacattgaaggtctattttagtgttcttcaaaatgtgcttccctgacctactgaaatagaaacttggtgatgaagttcaagaatttgtattctaatcatctcaaacaattcctaaagacactgattttaaaatatctagtctaggccccattgtgtaatagttagcactctaaaagatgaaaaagaaaatagtctatgtgccaaccacttcattagtacttatgaatttaaaaatgaaaaagtctggtacaggagacaagtatatatataaaattataatgcagtgtgataaatccattatagtatgtataagatacagaagagggactttaaacttgagaattcaatagagataataaatgggtaggagggaaatagaaactttggtgccactactacctgtcaggtactgtattatatactccattttaactgtacctcattttgcagatactcaggcacaaggaggtggttatttgtccaaactggaaccaagattcaaacccagacagagtcttaagcacatttttaatcactaactaacttgagatgcctaaatgccaaatactgttgggagttcaagtggttcttgattagcaaaatctatttttattagtgcaaaagaaacaccacagcttataaagtattatgaattcaataaatggagtcttaactaatgagatattattttctagaatggtgtagctgagagtatgtgtgattcaactgaaaggaataatgtttaatcagtgactcttactatatacaggaaaaggtgcagttctgtctttcaaatctgcctccttaccatattggcttacatccctcatgctgttttcttgtgtttgctagaaagttgttgccaagccaaatgtcatggccatgttgaaggcaaggaagaaaaaatggaaatggcctgtgccagctatatatatcgccttttatgagggaaagcaaagctttctcagaaatcccaaatggattttcccttgacttaattgcctgaccagttaaatggccactggtacctgcaaagaaagcagggtacatagctgtcccaaataaaatcagtattagcaagaagaaagaatattgagaaagcaattaacagtgtctgtgactgtgacatgtctgtgactttatattgtcaagtcctttccccttgaatatagttttggaagaattagctgaaggagtgtgttgacattgaatggccaagagaatgggctgtagcagacatctgtcatttctcttttggctgcccagtatcctaactcctgtgtttaaggaatccctcacctaatgaggcagagcatttcttcctcctaaagaatttgaaagtaccaggtaatgttttctcagcctccttttgcagctaaggaagaaacatctgccttcaattttaaaattagtgatacaaagaaggagggaaccatgcagattcctttgaagatggtgattaacaacactactgcattcatctccacagaggtacagcaaaagtgatttagttagcgataacctctaattctatttttttatttttattttttgagacagtcttgctctgtcaaccaggctggagtgcagtagcactgtcttaactcactgcaacctccacctcctgggttcaagcgattctcctgcctcagcctcccaagtcgctgggattacaagtgcccaccaccatgcacagctaatttttgtgtttttagtagatggggtttctccatgttggccaggctggtctcgaacttatgacttcaggtgatccgcccgccttggcctcccaaagtgctgggattataggcgtgagccactgtgcctggcctgtaacctctaattcttgtttgctggctgtcctagagatcctgagaattacttttaataaaatcatttttttgctgttattaaaactaacctgaattgcctaaaaccaagaactctgcttgataaaataagcatagttttaggaacagccatgcagatataaattttatcaacactttatacataatttgggacttatatttaaatgtaatatttgatgcttataaaagggtaaatggggaatgcaaataaattatcaagcataataactcatcacctaacttaagaataacattatgagtgcttgtattttatctatttgagctcttctcctatctttgccgacccccccgctctctttttaatagatttgttcgaatgtagaaagacctaaaatacatatgtatccctaaagtgacttattttatagttttctttctttttgaacttcaaaaaaattgtatcatactctatgtagtctaaggatttggtttttttcactcaacatgtctctagaattcacaagttttattgttttatagctgtcattttcattgatgtatatttcattgttgggttatacaacatattgttaaggaatacatacatatataataaattatacattttttaaaaaaaacct

SEQ ID NO: 310403 - DNA, 879 bp, Homo sapiens
tccaattgtcttacttggttattaagtatcgcacactggcaaataatatgtaaggaataagtgacaagaaagttcatgcagattctttatttaaatccaattttagttttttaaaaatagagagatggggtttctccatgttggccaggctggtctcgaacttatgacttcaggtgatccgcccgccttggcctcccaaagtgctgggattataggcgtgagccactgtgcctggcctgtaacctctaattcttgtttgctggctgtcctagagatcctgagaattacttttaataaaatcatttttttgctgttattaaaactaacctgaattgcctaaaaccaagaactctgcttgataaaataagcatagttttaggaacagccatgcagatataaattttatcaacactttatacataatttgggacttatatttaaatgtaatatttgatgcttataaaagggtaaatggggaatgcaaataaattatcaagcataataactcatcacctaacttaagaataacattatgagtgcttgtattttatctatttgagctcttctcctatctttgccgacccccccgctctctttttaatagatttgttcgaatgtagaaagacctaaaatacatatgtatccctaaagtgacttattttatagttttctttctttttgaacttcaaaaaaattgtatcatactctatgtagtctaaggatttggtttttttcactcaacatgtctctagaattcacaagttttattgttttatagctgtcattttcattgatgtatatttcattgttgggttatacaacatattgttaaggaatacatacatatataataaattatacattttttaaaaaaaacct

SEQ ID NO: 310404 - DNA, 705 bp, Homo sapiens
aggaagtgcagagggtttttttacatatatatagcaaccttgtcaagtggtcctcacaagagtcataaatactttgtaattagcacagtatattcagcagtgtataactctacaaatagtaccttatattagtgtagtattatatcaatatcttatgtataattcttatattaataccttatgcataattggattcaaacattgaaggtctattttagtgttcttcaaaatgtgcttccctgacctactgaaatagaaacttggtgatgaagttcaagaatttgtattctaatcatctcaaacaattcctaaagacactgattttaaaatatctagtctaggccccattgtgtaatagttagcactctaaaagatgaaaaagaaaatagtctatgtgccaaccacttcattagtacttatgaatttaaaaatgaaaaagtctggtacaggagacaagtatatatataaaattataatgcagtgtgataaatccattatagtatgtataagatacagaagagggactttaaacttgagaattcaatagagataataaatgggtaggagggaaatagaaactttggtgccacaaaagcaaagtatgtatggtattgccaataatagctaccatctattgagtgctttactacctgtcaggtactgtattatatactccattttaactgtacctcattttgcagatac

SEQ ID NO: 310405 - DNA, 2246 bp, Homo sapiens
ggcagctgcgggcgcacctggaccctcgcaaggcccgggcggcgccgatccccgcgggacgcgctgcgctcggggcctcccgcctccccccctgccccagccgccccccggccgcgcggcgccccgcaccctgcagggacggctgccgcatcgctgggacaaactcggcagcggaggcaaagttatttcccctcccaggcagcgggattccgactggcaagatggtgcccagctctccgcgcgcgctcttccttctgctcctgatcctcgcctgccccgagccgcgggcttcccagaactgtctcagcaaacagcagctcctctcggccatccgccagctgcagcagctgctgaagggccaggagacacgcttcgccgagggcatccgccacatgaagagccggctggccgcgctgcagaactctgtgggcagggtgggcccagatgcccttccagtttcctgcccggctctgaacacccccgcagacggcagaaagtttggaagcaagtacttagtggatcacgaagtccattttacctgcaaccctgggttccggctggtcgggcccagcagcgtggtgtgtcttcccaatggcacctggacaggggagcagccccactgtagaggtatcagtgaatgctccagccagccttgtcaaaatggtggtacatgtgtagaaggagtcaaccagtacagatgcatttgtcctccaggaaggactgggaaccgctgtcagcatcaggcccagactgccgcccccgagggcagcgtggccggcgactccgccttcagccgcgcgccgcgctgtgcgcaggtggagcgggctcagcactgcagctgcgaggccggattccacctgagcggcgccgccggcgacagcgtctgccagggtaggcgcgggctccgccaggacactggggacagcacggggaggacatggggcggggaaggggctctcacccaccgccctcctgccggcacgggtggcttcctgcgcgcggtctcagaaggcctggccactttgcattatagacgtgaacgagtgtgagctctacgggcaggaggggcgcccccggctctgcatgcacgcctgcgtgaacaccccgggctcttaccgttgcacctgccccggtggataccgaactctggctgacgggaagagctgtgaggatgtggatgaatgtgtgggcctgcagccggtgtgcccccaggggaccacatgcatcaacaccggtggaagcttccagtgtgtcagccctgagtgccccgagggcagcggcaatgtgagctacgtgaagacgtctccattaacctggaggggcctcagacgctggaggtggacgtcgacatgtcggaatacctggaccgctccttccaggccaaccacgtgtccaaggtcaccatctttgtatccccctatgacttctgagggtacacaggggcactggggtgtggagagctgacctcatttctcttccccgaaggctcagcttcgggcaccgactgcgtggagcctcccgcctgttcccgcccactcaccagtgcacccaggcttctagggcagcgttgcacggcgccccatggaatagcacggaagagcagccacaaaactcaactgctgccatcactctttttttttttctgctttgaggcccttcccttagattatgcactaactttcttaaaactttttcatccaggggatgggtggctttccaaaatgctgtgcaaatggccttgtgagtttgaactagctggggagagaaaaggtggcaatgtgtgtcaggtgactatcagcccttctgcctttttgtagccaggcttgctatgaatgaaacggttctagtcgtgcggggggccctagtcatgcctctgcgcatgtggcataggaagtggagtctcctcccatgacccagcacgttgttcttatctgccttttcctctgtgacatgcctgcctgcctgccttctcatcagagagtcacaggagggccttaaaccccacgcagatccttctagaccaaggacccattgttaaaagcatggattctgcctgagttacttcccttttgagaaatcatatctcaaatacataacctggtaatataactgaaaaaataaaagtgattgctccttcctgcccgcctgacttctacctgagcatgagacagcccacttccttctaggagggggtggctgactctcttcctgtctgggttggatacactggaataaatgagtcagag

SEQ ID NO: 310406 - DNA, 2136 bp, Homo sapiens
ggcagctgcgggcgcacctggaccctcgcaaggcccgggcggcgccgatccccgcgggacgcgctgcgctcggggcctcccgcctccccccctgccccagccgccccccggccgcgcggcgccccgcaccctgcagggacggctgccgcatcgctgggacaaactcggcagcggaggcaaagttatttcccctcccaggcagcgggattccgactggcaagatggtgcccagctctccgcgcgcgctcttccttctgctcctgatcctcgcctgccccgagccgcgggcttcccagaactgtctcagcaaacagcagctcctctcggccatccgccagctgcagcagctgctgaagggccaggagacacgcttcgccgagggcatccgccacatgaagagccggctggccgcgctgcagaactctgtgggcagggtgggcccagatgcccttccagtttcctgcccggctctgaacacccccgcagacggcagaaagtttggaagcaagtacttagtggatcacgaagtccattttacctgcaaccctgggttccggctggtcgggcccagcagcgtggtgtgtcttcccaatggcacctggacaggggagcagccccactgtagaggtatcagtgaatgctccagccagccttgtcaaaatggtggtacatgtgtagaaggagtcaaccagtacagatgcatttgtcctccaggaaggactgggaaccgctgtcagcatcaggcccagactgccgcccccgagggcagcgtggccggcgactccgccttcagccgcgcgccgcgctgtgcgcaggtggagcgggctcagcactgcagctgcgaggccggattccacctgagcggcgccgccggcgacagcgtctgccagggtaggcgcgggctccgccaggacactggggacagcacggggaggacatggggcggggaaggggctctcacccaccgccctcctgccggcacgggtggcttcctgcgcgcggtctcagaaggcctggccactttgcattatagacgtgaacgagtgtgagctctacgggcaggaggggcgcccccggctctgcatgcacgcctgcgtgaacaccccgggctcttaccgttgcacctgccccggtggataccgaactctggctgacgggaagagctgtgaggatgtggatgaatgtgtgggcctgcagccggtgtgcccccaggggaccacatgcatcaacaccggtggaagcttccagtgtgtcagccctgagtgccccgagggcagcggcaatgtgagctacgtgaagacgtctccattaacctggaggggcctcagacgctggaggtggacgtcgacatgtcggaatacctggaccgctccttccaggccaaccacgtgtccaaggtcaccatctttgtatccccctatgacttctgagggtacacaggggcactggggtgtggagagctgacctcatttctcttccccgaaggctcagcttcgggcaccgactgcgtggagcctcccgcctgttcccgcccactcaccagtgcacccaggcttctagggcagcgttgcacggcgccccatggaatagcacggaagagcagccacaaaactcaactgctgccatcactctttttttttttctgctttgaggcccttcccttagattatgcactaactttcttaaaactttttcatccaggggatgggtggctttccaaaatgctgtgcaaatggccttgtgagtttgaactagctggggagagaaaaggtggcaatgtgtgtcaggtgactatcagcccttctgcctttttgtagccaggcttgctatgaatgaaacggttctagtcgtgcggggggccctagtcatgcctctgcgcatgtggcataggaagtggagtctcctcccatgacccagcacgttgttcttatctgccttttcctctgtgacatgcctgcctgcctgccttctcatcagagagtcacaggagggccttaaaccccacgcagatccttctagaccaaggacccattgttaaaagcatggattctgcctgagttacttcccttttgagaaatcatatctcaaatacataacctggtaatataactgaaaaaataaaagtgattgctcctt

SEQ ID NO: 310407 - DNA, 1501 bp, Homo sapiens
ggcagctgcgggcgcacctggaccctcgcaaggcccgggcggcgccgatccccgcgggacgcgctgcgctcggggcctcccgcctccccccctgccccagccgccccccggccgcgcggcgccccgcaccctgcagggacggctgccgcatcgctgggacaaactcggcagcggaggcaaagttatttcccctcccaggcagcgggattccgactggcaagatggtgcccagctctccgcgcgcgctcttccttctgctcctgatcctcgcctgccccgagccgcgggcttcccagaactgtctcagcaaacagcagctcctctcggccatccgccagctgcagcagctgctgaagggccaggagacacgcttcgccgagggcatccgccacatgaagagccggctggccgcgctgcagaactctgtgggcagggtgggcccagatgcccttccagtttcctgcccggctctgaacacccccgcagacggcagaaagtttggaagcaagtacttagtggatcacgaagtccattttacctgcaaccctgggttccggctggtcgggcccagcagcgtggtgtgtcttcccaatggcacctggacaggggagcagccccactgtagaggtatcagtgaatgctccagccagccttgtcaaaatggtggtacatgtgtagaaggagtcaaccagtacagatgcatttgtcctccaggaaggactgggaaccgctgtcagcatcaggcccagactgccgcccccgagggcagcgtggccggcgactccgccttcagccgcgcgccgcgctgtgcgcaggtggagcgggctcagcactgcagctgcgaggccggattccacctgagcggcgccgccggcgacagcgtctgccagggtaggcgcgggctccgccaggacactggggacagcacggggaggacatggggcggggaaggggctctcacccaccgccctcctgccggcacgggtggcttcctgcgcgcggtctcagaaggcctggccactttgcattatagacgtgaacgagtgtgagctctacgggcaggaggggcgcccccggctctgcatgcacgcctgcgtgaacaccccgggctcttaccgttgcacctgccccggtggataccgaactctggctgacgggaagagctgtgaggatgtggatgaatgtgtgggcctgcagccggtgtgcccccaggggaccacatgcatcaacaccggtggaagcttccagtgtgtcagccctgagtgccccgagggcagcggcaatgtgagctacgtgaagacgtctccatttctgactgaggtattttggagagccagtcttccagctctgagattccttcttcagcttggttgattctgctgataagacttgagactgcactgtgaaattcttctagtgtgttcttcagctttatcagtggcggaggaagaagaaaaatacttctatttgagaaccctattgaggttgcatgccaacttct

SEQ ID NO: 310408 - DNA, 1345 bp, Homo sapiens
ggcagctgcgggcgcacctggaccctcgcaaggcccgggcggcgccgatccccgcgggacgcgctgcgctcggggcctcccgcctccccccctgccccagccgccccccggccgcgcggcgccccgcaccctgcagggacggctgccgcatcgctgggacaaactcggcagcggaggcaaagttatttcccctcccaggcagcgggattccgactggcaagatggtgcccagctctccgcgcgcgctcttccttctgctcctgatcctcgcctgccccgagccgcgggcttcccagaactgtctcagcaaacagcagctcctctcggccatccgccagctgcagcagctgctgaagggccaggagacacgcttcgccgagggcatccgccacatgaagagccggctggccgcgctgcagaactctgtgggcagggtgggcccagatgcccttccagtttcctgcccggctctgaacacccccgcagacggcagaaagtttggaagcaagtacttagtggatcacgaagtccattttacctgcaaccctgggttccggctggtcgggcccagcagcgtggtgtgtcttcccaatggcacctggacaggggagcagccccactgtagaggtatcagtgaatgctccagccagccttgtcaaaatggtggtacatgtgtagaaggagtcaaccagtacagatgcatttgtcctccaggaaggactgggaaccgctgtcagcatcaggcccagactgccgcccccgagggcagcgtggccggcgactccgccttcagccgcgcgccgcgctgtgcgcaggtggagcgggctcagcactgcagctgcgaggccggattccacctgagcggcgccgccggcgacagcgtctgccagggtaggcgcgggctccgccaggacactggggacagcacggggaggacatggggcggggaaggggctctcacccaccgccctcctgccggcacgggtggcttcctgcgcgcggtctcagaaggcctggccactttgcattatagacgtgaacgagtgtgagctctacgggcaggaggggcgcccccggctctgcatgcacgcctgcgtgaacaccccgggctcttaccgttgcacctgccccggtggataccgaactctggctgacgggaagagctgtgaggatgtggatgaatgtgtgggcctgcagccggtgtgcccccaggggaccacatgcatcaacaccggtggaagcttccagtgtgtcagccctgagtgccccgagggcagcggcaatgtgagctacgtgaagacgtctccattccagtgtgagcggaacccctgccccatggacagca

SEQ ID NO: 310409 - DNA, 433 bp, Homo sapiens
ggctaccatgcatgtacttggggctgtccagcggcaggtcacttttacgttgcgttgagtgagcttcaaacgcggtttggaccccgtggcttcggcgatttcggaagctcagacaagcatgtgggactgagtcagtctcaatgggtggtggcggcgatgtcttctctccgcagaactgtctcagcaaacagcagctcctctcggccatccgccagctgcagcagctgctgaagggccaggagacacgcttcgccgagggcatccgccacatgaagagccggctggccgcgctgcagaactctgtgggcagggtgggcccagatgcccttccaggtgggtccccacgtcggcaccgctggggcggcagcgcagcactcgagcactctccccgagacgctcccagctggaggcccctcgtcacccctcacccttc

SEQ ID NO: 310410 - DNA, 1484 bp, Homo sapiens
aaatatgcaggagctatggaatctgaaccctgtgtctgcactgaggctgattttgattgcgactatggttatgagcgacacagcaatggccagtgcctgccggcattttggttcaatccatcctctctgtcaaaggattgcagcttgggacagagttacctcaatagtactgggtacaggaaggtggtttccaataattgcactgatggcgtaagggaacagtacactgccaaaccgcagaagtgcccagggaaagccccgcgggggctgcggatagtcacggctgatggaaagctgacagcggaacaaggacacaacgtcactctcatggtgcaattagaagagggtgatgttcagcggacactcatccaagtggactttggcgatggtatcgcggtgtcttacgtcaatctcagctccatggaagatgggatcaaacacgtctatcagaacgtgggcattttccgtgtgaccgtgcaggtggacaacagtctgggttctgacagcgccgtcctgtacttacatgtaacttgtcccttggagcacgtgcacctgtctcttccctttgttaccacaaagaacaaagaggtcaatgcgacggcagtgcagtggcccagccaagtgggcaccctcacttacgtgtggtggtacggaaacaacacggagcctttgatcaccttggagggaagcatatccttcagatttacttcagaaggaatgaataccatcacagtgcaggtctcagctgggaatgccatcctacaagacacaaagaccatcgcagtatatgaggaattccggtctcttcgcttgtccttttctccaaacctggatgactacaacccggacatccctgagtggaggagggacatcggtcgagtcatcaaaaaatccctggtggaagccacaggggttccaggccagcacatcctggtggcggtgctccctggcttacccaccactgctgaactctttgtcctaccctatcaggatccagctggagaaaacaaaaggtcaactgatgacctggagcagctccatgttcctttccatgaagatgccagcactgacacctaagatgtgttctgctagaaaagatagtaagaagcaagcaactttaccaaaatagtgttcacagcatatataatgtcctttagaatatatgtaacaacttgtaatcttttgaaaaaatacaggataaacacttctacaagtggtgtggaaaacatctaaaatattgtcaaaatctgtcaacagtttcatactcatttcagtagaaaagcacatggttctaattgagattattcttatatgcaatgtaaattttatttagttttgttttcttatgcaaattttttctcacaaagcatgtgttcattgttgaatgtcctttgatgcaagttaaatatatgaaacgtactttctgttaccagataatttttaaatttaaatttccttcttaaaattttgtaaataacacagat

SEQ ID NO: 310411 - DNA, 973 bp, Homo sapiens
aaatatgcaggagctatggaatctgaaccctgtgtctgcactgaggctgattttgattgcgactatggttatgagcgacacagcaatggccagtgcctgccggcattttggttcaatccatcctctctgtcaaaggattgcagcttgggacagagttacctcaatagtactgggtacaggaaggtggtttccaataattgcactgatggcgtaagggaacagtacactgccaaaccgcagaagtgcccagggaaagccccgcgggggctgcggatagtcacggctgatggaaagctgacagcggaacaaggacacaacgtcactctcatggtgcaattagaagagggtgatgttcagcggacactcatccaagtggactttggcgatggtatcgcggtgtcttacgtcaatctcagctccatggaagatgggatcaaacacgtctatcagaacgtgggcattttccgtgtgaccgtgcaggtggacaacagtctgggttctgacagcgccgtcctgtacttacatgtaacttgtcccttggagcacgtgcacctgtctcttccctttgttaccacaaagaacaaagaggtcaatgcgacggcagtgcagtggcccagccaagtgggcaccctcacttacgtgtggtggtacggaaacaacacggaggtgggttcaccttccacatgcgatctagggacagaagctcaattcacgctgcctgaagcaaaggagggaatgaaatggcttatgaaccctagagtgtagaagcagttgtagcttcaaggacaacaagctcccttggtgctcaagtatctcatcattatgttctctctctctctctctctggcccctctccaccttctgcatttcatctctgccttcctctatgtttacgtttttctccagctgtacttgtctttgtagtgactcttagcagccctagcttagcagagaaattaaactctatttcctg

SEQ ID NO: 310412 - DNA, 381 bp, Homo sapiens
ttacactaagatgtgcaaatgtctccctaaatgtcactcatgtggagcagagaaagtccaagctatgtgcccaagtatctgtgatccttctctgcttacagggggaagcatgtatcatgggagcaaaaaggatatataagaagcgaaaatcagagcggaagtgtatgcaaggaaaatatgcaggagctatggaatctgaaccctgtgtctgcactgaggctgattttgattggtgagcttgtgcaattatctcctggagccatttggtgtatcaaatccacatgggcctgaatgaaagcttagaattgaaataatagtaacatacatagggctaagtggccagcttcatattcttataaaattacctcatagtttactagc

SEQ ID NO: 310413 - DNA, 1150 bp, Homo sapiens
  misc_feature (434)..(434): n is a, c, g, or t
  misc_feature (446)..(446): n is a, c, g, or t
  misc_feature (449)..(449): n is a, c, g, or t
  misc_feature (463)..(463): n is a, c, g, or t
  misc_feature (471)..(471): n is a, c, g, or t
  misc_feature (493)..(493): n is a, c, g, or t
tcccaggcaacgcgccgcgcggggctccaggttccgcccaggactaactccaggtctgcgcgcgtccaacgagcacggctctcaaccggcctcctggcgcccaacgaccatggcttccaaccggcctccgtgcgcccaacgaccatgactcccaaccggcctccagtttccaactgtttctcgaacagggaagccgccatgacacagctgactacgcccttggtcacaggggacctgagatcctccacgatttacgggaccggcgccacctcgggctcgaaccaccctctcgatagggccgccgctaagtaatcggcgtaggggttcagccgcacatctccttcccgcgccgcggaccgagcagtcgttggtgctcttcaggtgcggcctgggtgcccagagccttcgttagactctcggagccccctgttccnataccgggtagntgnttgtttgggacgangcgccaangcgaggggaattcgcccgaagngggggggggggggggggggggggggggggggggggggggggggggggggggggggggggggggggggggggggggggggactcgctctccctcagccggacctcggccctttttcacaccccaggggagtctggatttctcatagtcctgggcaccagccccttcccagtctagctcttgggactccctgaagccggaactccctcgcctggactcccgggagaacctggaatccccatctccagtccacattttctcagaatctgtcctagcccttcagtctcccaggcatgacatcgtgtggtcccagcgccctaggtggtgagctgtgactctccttagagcctggcgaggccgaggtcctccccagctcgaacccatcccacactccccttctcagcctctgtgttccccagtggtcctggaaaagcccccagttccctctgcctggccccaatcctcacaaacccaattacccacgctcctttccattccataacccccatcactgcatcctccaggctcccatccatggaggacttgaggtggaaagcaatttggttcaaaataaccattatttattacttgaaagggaatatttccagtcgttgccagcctcctccccttctagtattggtaaattttttgcaccactga

SEQ ID NO: 310414 - DNA, 1026 bp, Homo sapiens
tcccaggcaacgcgccgcgcggggctccaggttccgcccaggactaactccaggtctgcgcgcgtccaacgagcacggctctcaaccggcctcctggcgcccaacgaccatggcttccaaccggcctccgtgcgcccaacgaccatgactcccaaccggcctccagtttccaactgtttctcgaacagggaagccgccatgacacagctgactacgcccttggtcacaggggacctgagatcctccacgatttacgggaccggcgccacctcgggctcgaaccaccctctcgatagggccgccgctaagtaatcggcgtaggggttcagccgcacatctccttcccgcgccgcggaccgagcagtcgttggtgctcttcaggtgcggcctgggtgcccagagccttcgttagactctcggacccgcaagggagcccgaactctttcagactcgctctccctcagccggacctcggccctttttcacaccccaggggagtctggatttctcatagtcctgggcaccagccccttcccagtctagctcttgggactccctgaagccggaactccctcgcctggactcccgggagaacctggaatccccatctccagtccacattttctcagaatctgtcctagcccttcagtctcccaggcatgacatcgtgtggtcccagcgccctaggtggtgagctgtgactctccttagagcctggcgaggccgaggtcctccccagctcgaacccatcccacactccccttctcagcctctgtgttccccagtggtcctggaaaagcccccagttccctctgcctggccccaatcctcacaaacccaattacccacgctcctttccattccataacccccatcactgcatcctccaggctcccatccatggaggacttgaggtggaaagcaatttggttcaaaataaccattatttattacttgaaagggaatatttccagtcgttgccagcctcctccccttctagtattggtaaattttttgcaccactga

SEQ ID NO: 310415 - DNA, 6180 bp, Homo sapiens
  misc_feature (647)..(647): n is a, c, g, or t
ctcgcgaggagagcggagcaggcgcgcggcccaggcggaggagcgccgactctggagcagccggagctggaagaggaggaggaggagaggcggcggggaaggaggaggagggggagagtcgctcccgccgggcgagcatggggcgcctggcctcgaggccgctgctgctggcgctcctgtcgttggctctttgccgagggcgtgtggtgagagtccccacagcgaccctggttcgagtggtgggcactgagctggtcatcccctgcaacgtcagtgactatgatggccccagcgagcaaaactttgactggagcttctcatctttggggagcagctttgtggagcttgcaagcacctgggaggtggggttcccagcccagctgtaccaggagcggctgcagaggggcgagatcctgttaaggcggactgccaacgacgccgtggagctccacataaagaacgtccagccttcagaccaaggccactacaaatgttcaacccccagcacagatgccactgtccagggaaactatgaggacacagtgcaggttaaagtgctggccgactccctgcacgtgggccccagcgcgcggcccccgccgagcctgagcctgcgggagggggagcccttcgagctgcgctgcacngccgcctccgcctcgccgctgcacacgcacctggcgctgctgtgggaggtgcaccgcggcccggccaggcggagcgtcctcgccctgacccacgagggcaggttccacccgggcctggggtacgagcagcgctaccacagtggggacgtgcgcctcgacaccgtgggcagcgacgcctaccgcctctcagtgtcccgggctctgtctgccgaccagggctcctacaggtgtatcgtcagcgagtggatcgccgagcagggcaactggcaggaaatccaagaaaaggccgtggaagttgccaccgtggtgatccagccatcagttctgcgagcagctgtgcccaagaatgtgtctgtggctgaaggaaaggaactggacctgacctgtaacatcacaacagaccgagccgatgacgtccggcccgaggtgacgtggtccttcagcaggatgcctgacagcaccctacctggctcccgcgtgttggcgcggcttgaccgtgattccctggtgcacagctcgcctcatgttgctttgagtcatgtggatgcacgctcctaccatttactggttcgggatgttagcaaagaaaactctggctactattactgccacgtgtccctgtgggcacccggacacaacaggagctggcacaaagtggcagaggccgtgtcttccccagctggtgtgggtgtgacctggctagaaccagactaccaggtgtacctgaatgcttccaaggtccccgggtttgcggatgaccccacagagctggcatgccgggtggtggacacgaagagtggggaggcgaatgtccgattcacggtttcgtggtactacaggatgaaccggcgcagcgacaatgtggtgaccagcgagctgcttgcagtcatggacggggactggacgctaaaatatggagagaggagcaagcagcgggcccaggatggagactttattttttctaaggaacatacagacacgttcaatttccggatccaaaggactacagaggaagacagaggcaattattactgtgttgtgtctgcctggaccaaacagcggaacaacagctgggtgaaaagcaaggatgtcttctccaagcctgttaacatattttgggcattagaagattccgtgcttgtggtgaaggcgaggcagccaaagcctttctttgctgccggaaatacatttgagatgacttgcaaagtatcttccaagaatattaagtcgccacgctactctgttctcatcatggctgagaagcctgtcggcgacctctccagtcccaatgaaacggaaacgaagtacatcatctctctggaccaggattctgtggtgaagctggagaattggacagatgcatcacgggtggatggcgttgttttagaaaaagtgcaggaggatgagttccgctatcgaatgtaccagactcaggtctcagacgcagggctgtaccgctgcatggtgacagcctggtctcctgtcaggggcagcctttggcgagaagcagcaaccagtctctccaatcctattgagatagacttccaaacctcaggtcctatatttaatgcttctgtgcattcagacacaccatcagtacttcggggagatctgatcaaattgttctgtatcatcactgtcgagggagcagcactggatccagatgacatggcctttgatgtgtcctggtttgcggtgcactcttttggcctggacaaggctcctgtgctcctgtcttccctggatcggaagggcatcgtgaccacctcccggagggactggaagagcgacctcagcctggagcgcgtgagtgtgctggaattcttgctgcaagtgcatggctccgaggaccaggactttggcaactactactgttccgtgactccatgggtgaagtcaccaacaggttcctggcagaaggaggcagagatccactccaagcccgtttttataactgtgaagatggatgtgctgaacgccttcaagtatcccttgctgatcggcgtcggtctgtccacggtcatcgggctcctgtcctgtctcatcgggtactgcagctcccactggtgttgtaagaaggaggttcaggagacacggcgcgagcgccgcaggctcatgtcgatggagatggactaggctggcccgggaggggagtgacagagggacgttctaggagcaattggggcaagaagaggacagtgatattttaaaacaaagtgtgttacactaaaaaccagtcctctctaatctcaggtgggacttggcgctctctcttttctgcatgtcaagttctgagcgcggacatgtttaccagcacacggctcttcttcccacggcactttctgatgtaacaatcgagtgtgtgttttcccaactgcagctttttaatggttaaccttcatctaattttttttctcccactggtttatagatcctctgacttgtgtgtgtttatagcttttgtttcgcggggttgtggtgaggaaggggtgatggcatgcggagttctttatcttcagtgagaatgtgcctgcccgcctgagagccagcttccgcgttggaggcacgtgttcagagagctgctgagcgccaccctctacccggctgacagacaacacagacctgtgccgaaggctaatttgtggcttttacgaccctaccccaccccctgttttcaggggtttagactacatttgaaatccaaacttggagtatataacttcttattgagcccaactgctttttttttttttttttttgcttctctgccccttttccatttcttttgtatttgttttctgtgagagcactgaaatggcggccctggaatctacaatttggctctccactgagcaccttatcttgccaccttagccttaagaatgaatatgaagaaaaatacacagccacctctgtccagggcagtaagaagggctgcaaggaaggggaggatggggacaaggaaaggatcagatacctgctccagtagttgtgaggccactgtgtctcaggggactccaggaagagcagaagagggatcccacgaagttatttttatgcagctggggccaggagggtcagagtggtgccaggtgcaagttaggctaaagaagccaccactattcctctctcttgcccattgtggggggcaaaggcattggtcaccaagagtcttgcagggggacccacagatatgccatgtccttcacacgtgcttgggctccttaacctgaaggcaaattgctacttgcaagactgactgacttcaaggaatcagaaattacctagaagcaccatgttttttctatgaccttttcagtccttcaggtcattttaaggtccactgcagggggttagtgagaaagggtatactttgtggtatgttttgctttcctaatagggacatgaaggaaacccagcaatttgctgttatgtgaatggcctgtagagcagagtcaagagcggtgtgctttgcccgactgctcccatcaggaataggagagtagacagagatcttccacatcccaggcttctgctgctgctttaaaagctctgtccttggagcctcccgctccctgaagtgtctcgccccctgcacagcactggcctttcggaagcatcccagtagggttttctgaggctcgctggtgactcatgccctaattgcaatcctctgcttttatcttgactttgaaggatctaacactgctctctcttccaaaggggaaaaaaagattcatttgttttgagcaataaactaatacaaaatgatggccattcatgtgcagctctttgtcaccatgggccggatgagttgtgctcctcctggctcaccatttccccctgctcccccacagccggttctgcacttatcaccgagtcgcccctggaagcagattcccattgagttttccccaccaaggggaccatgcacatggtagaaacattagattctgcattgacagtagcctttccttggcccgggcctgtggtgggaagacgggcaacaagtataccccaccagggcctgagtgactagaggaagaggacgaggccttgttggcactagatttgggtattttctgcatgtcataacatatcctaactgctatttcagaagaggcagcttgtaggtgattgtacaagtgagaattaaagagagaacagatatttaaacaggtgctgtattagtaacagccagtgccctttcagcccttgcatctattaaaaggagattcaggattttattggcacaggcccttcttagtaggaagaaagggtgcttagctttggacctgaccgggtgtgtgtaaaaccatggactgagtcacagcagacactcgatggtggtaaatgtgatgggtgcttacacactgtaccttttcctttcatactgatgctgcagttcagggctggagttgttaaggcattgacctccacccacctgccccatgtccactgggctgcccaagctgcatgtcacctgagggctggcaggaaggggcgagaaatcccagggcattgtaccaaggacctagttccttctagggatataaatttccaggaatgtgtatttttaatgtggtgagatgcactcttttgttgtaccaaatagggctccccaccccacccctgcgacaagtgctcttctagaacaggttcctaccagcagcactggtgtgaatgaaagagagacccagccgcgtctcacacaggtggaattgcacttcttaacaaaaaggaactttataaaagtttgggattttttttcctaatcataaaaatagccccagaaagagcctaagctatgttcagatagaagcctcgaaattcctgtaaattgtttactttatgatgtttacatacacgtttcactttgaaaaaaaatgcaaatcgactttttaacaactgttgagatgtttcatgggacagtagaactctgactcaccaactgggctaaattttaatttaaaaatgtatttatttgagtgtctttccccccctcaccctcaccatctgaggggctccctgagatcttggtagaggaggcccctcctgcccagaccttcgtttgtttccccggtggcccttgcttcttgctttgcagactgcctgcagccatgattttgtcactgacatctgtgagccaaagactgagcctttttggcaggaataataagcaatactacacaacttgctactttcagaaaacttttttttagcttcaccgatgacaacagaggaagaagggaactgggatttgggtaagttctcctccactgtttgaccaaattctcagtgataaatatgtgtgcagatccctagaagagaaaacgctgactttctttttaagtgtggcacataaggatctgcagaattttccgtagacaaagaaaggatcttgtgtatttttgtccatatccaatgttatatgaactaattgtattgttttatactgtgaccacaaatattatgcaatgcaccatttgttttttatttcattaaaggaagtttaatttaaattaaaaaaaaa

SEQ ID NO: 310416 - DNA, 4269 bp, Homo sapiens
cgcgtggactacgacccgtagtgacacacagcgaaacgaagtacatcatctctctggaccaggattctgtggtgaagctggagaattggacagatgcatcacgggtggatggcgttgttttagaaaaagtgcaggaggatgagttccgctatcgaatgtaccagactcaggtctcagacgcagggctgtaccgctgcatggtgacagcctggtctcctgtcaggggcagcctttggcgagaagcagcaaccagtctctccaatcctattgagatagacttccaaacctcaggtcctatatttaatgcttctgtgcattcagacacaccatcagtacttcggggagatctgatcaaattgttctgtatcatcactgtcgagggagcagcactggatccagatgacatggcctttgatgtgtcctggtttgcggtgcactcttttggcctggacaaggctcctgtgctcctgtcttccctggatcggaagggcatcgtgaccacctcccggagggactggaagagcgacctcagcctggagcgcgtgagtgtgctggaattcttgctgcaagtgcatggctccgaggaccaggactttggcaactactactgttccgtgactccatgggtgaagtcaccaacaggttcctggcagaaggaggcagagatccactccaagcccgtttttataactgtgaagatggatgtgctgaacgccttcaagtatcccttgctgatcggcgtcggtctgtccacggtcatcgggctcctgtcctgtctcatcgggtactgcagctcccactggtgttgtaagaaggaggttcaggagacacggcgcgagcgccgcaggctcatgtcgatggagatggactaggctggcccgggaggggagtgacagagggacgttctaggagcaattggggcaagaagaggacagtgatattttaaaacaaagtgtgttacactaaaaaccagtcctctctaatctcaggtgggacttggcgctctctcttttctgcatgtcaagttctgagcgcggacatgtttaccagcacacggctcttcttcccacggcactttctgatgtaacaatcgagtgtgtgttttcccaactgcagctttttaatggttaaccttcatctaattttttttctcccactggtttatagatcctctgacttgtgtgtgtttatagcttttgtttcgcggggttgtggtgaggaaggggtgatggcatgcggagttctttatcttcagtgagaatgtgcctgcccgcctgagagccagcttccgcgttggaggcacgtgttcagagagctgctgagcgccaccctctacccggctgacagacaacacagacctgtgccgaaggctaatttgtggcttttacgaccctaccccaccccctgttttcaggggtttagactacatttgaaatccaaacttggagtatataacttcttattgagcccaactgctttttttttttttttttttgcttctctgccccttttccatttcttttgtatttgttttctgtgagagcactgaaatggcggccctggaatctacaatttggctctccactgagcaccttatcttgccaccttagccttaagaatgaatatgaagaaaaatacacagccacctctgtccagggcagtaagaagggctgcaaggaaggggaggatggggacaaggaaaggatcagatacctgctccagtagttgtgaggccactgtgtctcaggggactccaggaagagcagaagagggatcccacgaagttatttttatgcagctggggccaggagggtcagagtggtgccaggtgcaagttaggctaaagaagccaccactattcctctctcttgcccattgtggggggcaaaggcattggtcaccaagagtcttgcagggggacccacagatatgccatgtccttcacacgtgcttgggctccttaacctgaaggcaaattgctacttgcaagactgactgacttcaaggaatcagaaattacctagaagcaccatgttttttctatgaccttttcagtccttcaggtcattttaaggtccactgcagggggttagtgagaaagggtatactttgtggtatgttttgctttcctaatagggacatgaaggaaacccagcaatttgctgttatgtgaatggcctgtagagcagagtcaagagcggtgtgctttgcccgactgctcccatcaggaataggagagtagacagagatcttccacatcccaggcttctgctgctgctttaaaagctctgtccttggagcctcccgctccctgaagtgtctcgccccctgcacagcactggcctttcggaagcatcccagtagggttttctgaggctcgctggtgactcatgccctaattgcaatcctctgcttttatcttgactttgaaggatctaacactgctctctcttccaaaggggaaaaaaagattcatttgttttgagcaataaactaatacaaaatgatggccattcatgtgcagctctttgtcaccatgggccggatgagttgtgctcctcctggctcaccatttccccctgctcccccacagccggttctgcacttatcaccgagtcgcccctggaagcagattcccattgagttttccccaccaaggggaccatgcacatggtagaaacattagattctgcattgacagtagcctttccttggcccgggcctgtggtgggaagacgggcaacaagtataccccaccagggcctgagtgactagaggaagaggacgaggccttgttggcactagatttgggtattttctgcatgtcataacatatcctaactgctatttcagaagaggcagcttgtaggtgattgtacaagtgagaattaaagagagaacagatatttaaacaggtgctgtattagtaacagccagtgccctttcagcccttgcatctattaaaaggagattcaggattttattggcacaggcccttcttagtaggaagaaagggtgcttagctttggacctgaccgggtgtgtgtaaaaccatggactgagtcacagcagacactcgatggtggtaaatgtgatgggtgcttacacactgtaccttttcctttcatactgatgctgcagttcagggctggagttgttaaggcattgacctccacccacctgccccatgtccactgggctgcccaagctgcatgtcacctgagggctggcaggaaggggcgagaaatcccagggcattgtaccaaggacctagttccttctagggatataaatttccaggaatgtgtatttttaatgtggtgagatgcactcttttgttgtaccaaatagggctccccaccccacccctgcgacaagtgctcttctagaacaggttcctaccagcagcactggtgtgaatgaaagagagacccagccgcgtctcacacaggtggaattgcacttcttaacaaaaaggaactttataaaagtttgggattttttttcctaatcataaaaatagccccagaaagagcctaagctatgttcagatagaagcctcgaaattcctgtaaattgtttactttatgatgtttacatacacgtttcactttgaaaaaaaatgcaaatcgactttttaacaactgttgagatgtttcatgggacagtagaactctgactcaccaactgggctaaattttaatttaaaaatgtatttatttgagtgtctttccccccctcaccctcaccatctgaggggctccctgagatcttggtagaggaggcccctcctgcccagaccttcgtttgtttccccggtggcccttgcttcttgctttgcagactgcctgcagccatgattttgtcactgacatctgtgagccaaagactgagcctttttggcaggaataataagcaatactacacaacttgctactttcagaaaacttttttttagcttcaccgatgacaacagaggaagaagggaactgggatttgggtaagttctcctccactgtttgaccaaattctcagtgataaatatgtgtgcagatccctagaagagaaaacgctgactttctttttaagtgtggcacataaggatctgcagaattttccgtagacaaagaaaggatcttgtgtatttttgtccatatccaatgttatatgaactaattgtattgttttatactgtgaccacaaatattatgcaatgcaccatttgttttttatttcattaaaggaagtttaatttaaattaaaaaaaaa

SEQ ID NO: 310417 - DNA, 5238 bp, Homo sapiens
gcaggctcatgtcgatggagatggactaggctggcccgggaggggagtgacagagggacgttctaggagcaattggggcaagaagaggacagtgatattttaaaacaaagtgtgttacactaaaaaccagtcctctctaatctcaggtgggacttggcgctctctcttttctgcatgtcaagttctgagcgcggcttgaccgtgattccctggtgcacagctcgcctcatgttgctttgagtcatgtggatgcacgctcctaccatttactggttcgggatgttagcaaagaaaactctggctactattactgccacgtgtccctgtgggcacccggacacaacaggagctggcacaaagtggcagaggccgtgtcttccccagctggtgtgggtgtgacctggctagaaccagactaccaggtgtacctgaatgcttccaaggtccccgggtttgcggatgaccccacagagctggcatgccgggtggtggacacgaagagtggggaggcgaatgtccgattcacggtttcgtggtactacaggatgaaccggcgcagcgacaatgtggtgaccagcgagctgcttgcagtcatggacggggactggacgctaaaatatggagagaggagcaagcagcgggcccaggatggagactttattttttctaaggaacatacagacacgttcaatttccggatccaaaggactacagaggaagacagaggcaattattactgtgttgtgtctgcctggaccaaacagcggaacaacagctgggtgaaaagcaaggatgtcttctccaagcctgttaacatattttgggcattagaagattccgtgcttgtggtgaaggcgaggcagccaaagcctttctttgctgccggaaatacatttgagatgacttgcaaagtatcttccaagaatattaagtcgccacgctactctgttctcatcatggctgagaagcctgtcggcgacctctccagtcccaatgaaacggaaacgaagtacatcatctctctggaccaggattctgtggtgaagctggagaattggacagatgcatcacgggtggatggcgttgttttagaaaaagtgcaggaggatgagttccgctatcgaatgtaccagactcaggtctcagacgcagggctgtaccgctgcatggtgacagcctggtctcctgtcaggggcagcctttggcgagaagcagcaaccagtctctccaatcctattgagatagacttccaaacctcaggtcctatatttaatgcttctgtgcattcagacacaccatcagtacttcggggagatctgatcaaattgttctgtatcatcactgtcgagggagcagcactggatccagatgacatggcctttgatgtgtcctggtttgcggtgcactcttttggcctggacaaggctcctgtgctcctgtcttccctggatcggaagggcatcgtgaccacctcccggagggactggaagagcgacctcagcctggagcgcgtgagtgtgctggaattcttgctgcaagtgcatggctccgaggaccaggactttggcaactactactgttccgtgactccatgggtgaagtcaccaacaggttcctggcagaaggaggcagagatccactccaagcccgtttttataactgtgaagatggatgtgctgaacgccttcaagtatcccttgctgatcggcgtcggtctgtccacggtcatcgggctcctgtcctgtctcatcgggtactgcagctcccactggtgttgtaagaaggaggttcaggagacacggcgcgagcgccgcaggctcatgtcgatggagatggactaggctggcccgggaggggagtgacagagggacgttctaggagcaattggggcaagaagaggacagtgatattttaaaacaaagtgtgttacactaaaaaccagtcctctctaatctcaggtgggacttggcgctctctcttttctgcatgtcaagttctgagcgcggacatgtttaccagcacacggctcttcttcccacggcactttctgatgtaacaatcgagtgtgtgttttcccaactgcagctttttaatggttaaccttcatctaattttttttctcccactggtttatagatcctctgacttgtgtgtgtttatagcttttgtttcgcggggttgtggtgaggaaggggtgatggcatgcggagttctttatcttcagtgagaatgtgcctgcccgcctgagagccagcttccgcgttggaggcacgtgttcagagagctgctgagcgccaccctctacccggctgacagacaacacagacctgtgccgaaggctaatttgtggcttttacgaccctaccccaccccctgttttcaggggtttagactacatttgaaatccaaacttggagtatataacttcttattgagcccaactgctttttttttttttttttttgcttctctgccccttttccatttcttttgtatttgttttctgtgagagcactgaaatggcggccctggaatctacaatttggctctccactgagcaccttatcttgccaccttagccttaagaatgaatatgaagaaaaatacacagccacctctgtccagggcagtaagaagggctgcaaggaaggggaggatggggacaaggaaaggatcagatacctgctccagtagttgtgaggccactgtgtctcaggggactccaggaagagcagaagagggatcccacgaagttatttttatgcagctggggccaggagggtcagagtggtgccaggtgcaagttaggctaaagaagccaccactattcctctctcttgcccattgtggggggcaaaggcattggtcaccaagagtcttgcagggggacccacagatatgccatgtccttcacacgtgcttgggctccttaacctgaaggcaaattgctacttgcaagactgactgacttcaaggaatcagaaattacctagaagcaccatgttttttctatgaccttttcagtccttcaggtcattttaaggtccactgcagggggttagtgagaaagggtatactttgtggtatgttttgctttcctaatagggacatgaaggaaacccagcaatttgctgttatgtgaatggcctgtagagcagagtcaagagcggtgtgctttgcccgactgctcccatcaggaataggagagtagacagagatcttccacatcccaggcttctgctgctgctttaaaagctctgtccttggagcctcccgctccctgaagtgtctcgccccctgcacagcactggcctttcggaagcatcccagtagggttttctgaggctcgctggtgactcatgccctaattgcaatcctctgcttttatcttgactttgaaggatctaacactgctctctcttccaaaggggaaaaaaagattcatttgttttgagcaataaactaatacaaaatgatggccattcatgtgcagctctttgtcaccatgggccggatgagttgtgctcctcctggctcaccatttccccctgctcccccacagccggttctgcacttatcaccgagtcgcccctggaagcagattcccattgagttttccccaccaaggggaccatgcacatggtagaaacattagattctgcattgacagtagcctttccttggcccgggcctgtggtgggaagacgggcaacaagtataccccaccagggcctgagtgactagaggaagaggacgaggccttgttggcactagatttgggtattttctgcatgtcataacatatcctaactgctatttcagaagaggcagcttgtaggtgattgtacaagtgagaattaaagagagaacagatatttaaacaggtgctgtattagtaacagccagtgccctttcagcccttgcatctattaaaaggagattcaggattttattggcacaggcccttcttagtaggaagaaagggtgcttagctttggacctgaccgggtgtgtgtaaaaccatggactgagtcacagcagacactcgatggtggtaaatgtgatgggtgcttacacactgtaccttttcctttcatactgatgctgcagttcagggctggagttgttaaggcattgacctccacccacctgccccatgtccactgggctgcccaagctgcatgtcacctgagggctggcaggaaggggcgagaaatcccagggcattgtaccaaggacctagttccttctagggatataaatttccaggaatgtgtatttttaatgtggtgagatgcactcttttgttgtaccaaatagggctccccaccccacccctgcgacaagtgctcttctagaacaggttcctaccagcagcactggtgtgaatgaaagagagacccagccgcgtctcacacaggtggaattgcacttcttaacaaaaaggaactttataaaagtttgggattttttttcctaatcataaaaatagccccagaaagagcctaagctatgttcagatagaagcctcgaaattcctgtaaattgtttactttatgatgtttacatacacgtttcactttgaaaaaaaatgcaaatcgactttttaacaactgttgagatgtttcatgggacagtagaactctgactcaccaactgggctaaattttaatttaaaaatgtatttatttgagtgtctttccccccctcaccctcaccatctgaggggctccctgagatcttggtagaggaggcccctcctgcccagaccttcgtttgtttccccggtggcccttgcttcttgctttgcagactgcctgcagccatgattttgtcactgacatctgtgagccaaagactgagcctttttggcaggaataataagcaatactacacaacttgctactttcagaaaacttttttttagcttcaccgatgacaacagaggaagaagggaactgggatttgggtaagttctcctccactgtttgaccaaattctcagtgataaatatgtgtgcagatccctagaagagaaaacgctgactttctttttaagtgtggcacataaggatctgcagaattttccgtagacaaagaaaggatcttgtgtatttttgtccatatccaatgttatatgaactaattgtattgttttatactgtgaccacaaatattatgcaatgcaccatttgttttttatttcattaaaggaagtttaatttaaattaaaaaaaaa

SEQ ID NO: 310418 - DNA, 4215 bp, Homo sapiens
cgcgtggactacgacccgtagtgacacacagcgaaacgaagtacatcatctctctggaccaggattctgtggtgaagctggagaattggacagatgcatcacgggtggatggcgttgttttagaaaaagtgcaggaggatgagttccgctatcgaatgtaccagactcaggtctcagacgcagggctgtaccgctgcatggtgacagcctggtctcctgtcaggggcagcctttggcgagaagcagcaaccagtctctccaatcctattgagatagacttccaaacctcaggtcctatatttaatgcttctgtgcattcagacacaccatcagtacttcggggagatctgatcaaattgttctgtatcatcactgtcgagggagcagcactggatccagatgacatggcctttgatgtgtcctggtttgcggtgcactcttttggcctggacaaggctcctgtgctcctgtcttccctggatcggaagggcatcgtgaccacctcccggagggactggaagagcgacctcagcctggagcgcgtgagtgtgctggaattcttgctgcaagtgcatggctccgaggaccaggactttggcaactactactgttccgtgactccatgggtgaagtcaccaacaggttcctggcagaaggaggcagagatccactccaagcccgtttttataactgtgaagatggatgtgctgaacgccttcaagtatcccttgctgatcggcgtcggtctgtccacggtcatcgggctcctgtcctgtctcatcgggtactgcagctcccactggtgttgtaagaaggaggttcaggagacacggcgcgagcgccgcaggctcatgtcgatggagatggactaggctggcccgggaggggagtgacagagggacgttctaggagcaattggggcaagaagaggacagtgatattttaaaacaaagtgtgttacactaaaaaccagtcctctctaatctcaggtgggacttggcgctctctcttttctgcatgtcaagttctgagcgcggacatgtttaccagcacacggctcttcttcccacggcactttctgatgtaacaatcgagtgtgtgttttcccaactgcagctttttaatggttaaccttcatctaattttttttctcccactggtttatagatcctctgacttgtgtgtgtttatagcttttgtttcgcggggttgtggtgaggaaggggtgatggcatgcggagttctttatcttcagtgagaatgtgcctgcccgcctgagagccagcttccgcgttggaggcacgtgttcagagagctgctgagcgccaccctctacccggctgacagacaacacagacctgtgccgaaggctaatttgtggcttttacgaccctaccccaccccctgttttcaggggtttagactacatttgaaatccaaacttggagtatataacttcttattgagcccaactgctttttttttttttttttttgcttctctgccccttttccatttcttttgtatttgttttctgtgagagcactgaaatggcggccctggaatctacaatttggctctccactgagcaccttatcttgccaccttagccttaagaatgaatatgaagaagatggggacaaggaaaggatcagatacctgctccagtagttgtgaggccactgtgtctcaggggactccaggaagagcagaagagggatcccacgaagttatttttatgcagctggggccaggagggtcagagtggtgccaggtgcaagttaggctaaagaagccaccactattcctctctcttgcccattgtggggggcaaaggcattggtcaccaagagtcttgcagggggacccacagatatgccatgtccttcacacgtgcttgggctccttaacctgaaggcaaattgctacttgcaagactgactgacttcaaggaatcagaaattacctagaagcaccatgttttttctatgaccttttcagtccttcaggtcattttaaggtccactgcagggggttagtgagaaagggtatactttgtggtatgttttgctttcctaatagggacatgaaggaaacccagcaatttgctgttatgtgaatggcctgtagagcagagtcaagagcggtgtgctttgcccgactgctcccatcaggaataggagagtagacagagatcttccacatcccaggcttctgctgctgctttaaaagctctgtccttggagcctcccgctccctgaagtgtctcgccccctgcacagcactggcctttcggaagcatcccagtagggttttctgaggctcgctggtgactcatgccctaattgcaatcctctgcttttatcttgactttgaaggatctaacactgctctctcttccaaaggggaaaaaaagattcatttgttttgagcaataaactaatacaaaatgatggccattcatgtgcagctctttgtcaccatgggccggatgagttgtgctcctcctggctcaccatttccccctgctcccccacagccggttctgcacttatcaccgagtcgcccctggaagcagattcccattgagttttccccaccaaggggaccatgcacatggtagaaacattagattctgcattgacagtagcctttccttggcccgggcctgtggtgggaagacgggcaacaagtataccccaccagggcctgagtgactagaggaagaggacgaggccttgttggcactagatttgggtattttctgcatgtcataacatatcctaactgctatttcagaagaggcagcttgtaggtgattgtacaagtgagaattaaagagagaacagatatttaaacaggtgctgtattagtaacagccagtgccctttcagcccttgcatctattaaaaggagattcaggattttattggcacaggcccttcttagtaggaagaaagggtgcttagctttggacctgaccgggtgtgtgtaaaaccatggactgagtcacagcagacactcgatggtggtaaatgtgatgggtgcttacacactgtaccttttcctttcatactgatgctgcagttcagggctggagttgttaaggcattgacctccacccacctgccccatgtccactgggctgcccaagctgcatgtcacctgagggctggcaggaaggggcgagaaatcccagggcattgtaccaaggacctagttccttctagggatataaatttccaggaatgtgtatttttaatgtggtgagatgcactcttttgttgtaccaaatagggctccccaccccacccctgcgacaagtgctcttctagaacaggttcctaccagcagcactggtgtgaatgaaagagagacccagccgcgtctcacacaggtggaattgcacttcttaacaaaaaggaactttataaaagtttgggattttttttcctaatcataaaaatagccccagaaagagcctaagctatgttcagatagaagcctcgaaattcctgtaaattgtttactttatgatgtttacatacacgtttcactttgaaaaaaaatgcaaatcgactttttaacaactgttgagatgtttcatgggacagtagaactctgactcaccaactgggctaaattttaatttaaaaatgtatttatttgagtgtctttccccccctcaccctcaccatctgaggggctccctgagatcttggtagaggaggcccctcctgcccagaccttcgtttgtttccccggtggcccttgcttcttgctttgcagactgcctgcagccatgattttgtcactgacatctgtgagccaaagactgagcctttttggcaggaataataagcaatactacacaacttgctactttcagaaaacttttttttagcttcaccgatgacaacagaggaagaagggaactgggatttgggtaagttctcctccactgtttgaccaaattctcagtgataaatatgtgtgcagatccctagaagagaaaacgctgactttctttttaagtgtggcacataaggatctgcagaattttccgtagacaaagaaaggatcttgtgtatttttgtccatatccaatgttatatgaactaattgtattgttttatactgtgaccacaaatattatgcaatgcaccatttgttttttatttcattaaaggaagtttaatttaaattaaaaaaaaa

SEQ ID NO: 310419 - DNA, 4283 bp, Homo sapiens
cggcgacctagcaggacccgcaaggttaacaacacagcgaaacgaagaaacgaagtacatcatctctctggaccaggattctgtggtgaagctggagaattggacagatgcatcacgggtggatggcgttgttttagaaaaagtgcaggaggatgagttccgctatcgaatgtaccagactcaggtctcagacgcagggctgtaccgctgcatggtgacagcctggtctcctgtcaggggcagcctttggcgagaagcagcaaccagtctctccaatcctattgagatagacttccaaacctcaggtcctatatttaatgcttctgtgcattcagacacaccatcagtacttcggggagatctgatcaaattgttctgtatcatcactgtcgagggagcagcactggatccagatgacatggcctttgatgtgtcctggtttgcggtgcactcttttggcctggacaaggctcctgtgctcctgtcttccctggatcggaagggcatcgtgaccacctcccggagggactggaagagcgacctcagcctggagcgcgtgagtgtgctggaattcttgctgcaagtgcatggctccgaggaccaggactttggcaactactactgttccgtgactccatgggtgaagtcaccaacaggttcctggcagaaggaggcagagatccactccaagcccgtttttataactgtgaagatggatgtgctgaacgccttcaagtatcccttgctgatcggcgtcggtctgtccacggtcatcgggctcctgtcctgtctcatcgggtactgcagctcccactggtgttgtaagaaggaggttcaggagacacggcgcgagcgccgcaggctcatgtcgatggagatggactaggctggcccgggaggggagtgacagagggacgttctaggagcaattggggcaagaagaggacagtgatattttaaaacaaagtgtgttacactaaaaaccagtcctctctaatctcaggtgggacttggcgctctctcttttctgcatgtcaagttctgagcgcggacatgtttaccagcacacggctcttcttcccacggcactttctgatgtaacaatcgagtgtgtgttttcccaactgcagctttttaatggttaaccttcatctaattttttttctcccactggtttatagatcctctgacttgtgtgtgtttatagcttttgtttcgcggggttgtggtgaggaaggggtgatggcatgcggagttctttatcttcagtgagaatgtgcctgcccgcctgagagccagcttccgcgttggaggcacgtgttcagagagctgctgagcgccaccctctacccggctgacagacaacacagacctgtgccgaaggctaatttgtggcttttacgaccctaccccaccccctgttttcaggggtttagactacatttgaaatccaaacttggagtatataacttcttattgagcccaactgctttttttttttttttttttgcttctctgccccttttccatttcttttgtatttgttttctgtgagagcactgaaatggcggccctggaatctacaatttggctctccactgagcaccttatcttgccaccttagccttaagaatgaatatgaagaaaaatacacagccacctctgtccagggcagtaagaagggctgcaaggaaggggaggatggggacaaggaaaggatcagatacctgctccagtagttgtgaggccactgtgtctcaggggactccaggaagagcagaagagggatcccacgaagttatttttatgcagctggggccaggagggtcagagtggtgccaggtgcaagttaggctaaagaagccaccactattcctctctcttgcccattgtggggggcaaaggcattggtcaccaagagtcttgcagggggacccacagatatgccatgtccttcacacgtgcttgggctccttaacctgaaggcaaattgctacttgcaagactgactgacttcaaggaatcagaaattacctagaagcaccatgttttttctatgaccttttcagtccttcaggtcattttaaggtccactgcagggggttagtgagaaagggtatactttgtggtatgttttgctttcctaatagggacatgaaggaaacccagcaatttgctgttatgtgaatggcctgtagagcagagtcaagagcggtgtgctttgcccgactgctcccatcaggaataggagagtagacagagatcttccacatcccaggcttctgctgctgctttaaaagctctgtccttggagcctcccgctccctgaagtgtctcgccccctgcacagcactggcctttcggaagcatcccagtagggttttctgaggctcgctggtgactcatgccctaattgcaatcctctgcttttatcttgactttgaaggatctaacactgctctctcttccaaaggggaaaaaaagattcatttgttttgagcaataaactaatacaaaatgatggccattcatgtgcagctctttgtcaccatgggccggatgagttgtgctcctcctggctcaccatttccccctgctcccccacagccggttctgcacttatcaccgagtcgcccctggaagcagattcccattgagttttccccaccaaggggaccatgcacatggtagaaacattagattctgcattgacagtagcctttccttggcccgggcctgtggtgggaagacgggcaacaagtataccccaccagggcctgagtgactagaggaagaggacgaggccttgttggcactagatttgggtattttctgcatgtcataacatatcctaactgctatttcagaagaggcagcttgtaggtgattgtacaagtgagaattaaagagagaacagatatttaaacaggtgctgtattagtaacagccagtgccctttcagcccttgcatctattaaaaggagattcaggattttattggcacaggcccttcttagtaggaagaaagggtgcttagctttggacctgaccgggtgtgtgtaaaaccatggactgagtcacagcagacactcgatggtggtaaatgtgatgggtgcttacacactgtaccttttcctttcatactgatgctgcagttcagggctggagttgttaaggcattgacctccacccacctgccccatgtccactgggctgcccaagctgcatgtcacctgagggctggcaggaaggggcgagaaatcccagggcattgtaccaaggacctagttccttctagggatataaatttccaggaatgtgtatttttaatgtggtgagatgcactcttttgttgtaccaaatagggctccccaccccacccctgcgacaagtgctcttctagaacaggttcctaccagcagcactggtgtgaatgaaagagagacccagccgcgtctcacacaggtggaattgcacttcttaacaaaaaggaactttataaaagtttgggattttttttcctaatcataaaaatagccccagaaagagcctaagctatgttcagatagaagcctcgaaattcctgtaaattgtttactttatgatgtttacatacacgtttcactttgaaaaaaaatgcaaatcgactttttaacaactgttgagatgtttcatgggacagtagaactctgactcaccaactgggctaaattttaatttaaaaatgtatttatttgagtgtctttccccccctcaccctcaccatctgaggggctccctgagatcttggtagaggaggcccctcctgcccagaccttcgtttgtttccccggtggcccttgcttcttgctttgcagactgcctgcagccatgattttgtcactgacatctgtgagccaaagactgagcctttttggcaggaataataagcaatactacacaacttgctactttcagaaaacttttttttagcttcaccgatgacaacagaggaagaagggaactgggatttgggtaagttctcctccactgtttgaccaaattctcagtgataaatatgtgtgcagatccctagaagagaaaacgctgactttctttttaagtgtggcacataaggatctgcagaattttccgtagacaaagaaaggatcttgtgtatttttgtccatatccaatgttatatgaactaattgtattgttttatactgtgaccacaaatattatgcaatgcaccatttgttttttatttcattaaaggaagtttaatttaaattaaaaaaaaa

SEQ ID NO: 310420 - DNA, 4325 bp, Homo sapiens
tgcgactctagacgatcccaagtcgagaaactgccagtatcagtgactagaaagtgtaggttgcagtaaacaacacagtcgacgcgaagaaacgaagtacatcatctctctggaccaggattctgtggtgaagctggagaattggacagatgcatcacgggtggatggcgttgttttagaaaaagtgcaggaggatgagttccgctatcgaatgtaccagactcaggtctcagacgcagggctgtaccgctgcatggtgacagcctggtctcctgtcaggggcagcctttggcgagaagcagcaaccagtctctccaatcctattgagatagacttccaaacctcaggtcctatatttaatgcttctgtgcattcagacacaccatcagtacttcggggagatctgatcaaattgttctgtatcatcactgtcgagggagcagcactggatccagatgacatggcctttgatgtgtcctggtttgcggtgcactcttttggcctggacaaggctcctgtgctcctgtcttccctggatcggaagggcatcgtgaccacctcccggagggactggaagagcgacctcagcctggagcgcgtgagtgtgctggaattcttgctgcaagtgcatggctccgaggaccaggactttggcaactactactgttccgtgactccatgggtgaagtcaccaacaggttcctggcagaaggaggcagagatccactccaagcccgtttttataactgtgaagatggatgtgctgaacgccttcaagtatcccttgctgatcggcgtcggtctgtccacggtcatcgggctcctgtcctgtctcatcgggtactgcagctcccactggtgttgtaagaaggaggttcaggagacacggcgcgagcgccgcaggctcatgtcgatggagatggactaggctggcccgggaggggagtgacagagggacgttctaggagcaattggggcaagaagaggacagtgatattttaaaacaaagtgtgttacactaaaaaccagtcctctctaatctcaggtgggacttggcgctctctcttttctgcatgtcaagttctgagcgcggacatgtttaccagcacacggctcttcttcccacggcactttctgatgtaacaatcgagtgtgtgttttcccaactgcagctttttaatggttaaccttcatctaattttttttctcccactggtttatagatcctctgacttgtgtgtgtttatagcttttgtttcgcggggttgtggtgaggaaggggtgatggcatgcggagttctttatcttcagtgagaatgtgcctgcccgcctgagagccagcttccgcgttggaggcacgtgttcagagagctgctgagcgccaccctctacccggctgacagacaacacagacctgtgccgaaggctaatttgtggcttttacgaccctaccccaccccctgttttcaggggtttagactacatttgaaatccaaacttggagtatataacttcttattgagcccaactgctttttttttttttttttttgcttctctgccccttttccatttcttttgtatttgttttctgtgagagcactgaaatggcggccctggaatctacaatttggctctccactgagcaccttatcttgccaccttagccttaagaatgaatatgaagaaaaatacacagccacctctgtccagggcagtaagaagggctgcaaggaaggggaggatggggacaaggaaaggatcagatacctgctccagtagttgtgaggccactgtgtctcaggggactccaggaagagcagaagagggatcccacgaagttatttttatgcagctggggccaggagggtcagagtggtgccaggtgcaagttaggctaaagaagccaccactattcctctctcttgcccattgtggggggcaaaggcattggtcaccaagagtcttgcagggggacccacagatatgccatgtccttcacacgtgcttgggctccttaacctgaaggcaaattgctacttgcaagactgactgacttcaaggaatcagaaattacctagaagcaccatgttttttctatgaccttttcagtccttcaggtcattttaaggtccactgcagggggttagtgagaaagggtatactttgtggtatgttttgctttcctaatagggacatgaaggaaacccagcaatttgctgttatgtgaatggcctgtagagcagagtcaagagcggtgtgctttgcccgactgctcccatcaggaataggagagtagacagagatcttccacatcccaggcttctgctgctgctttaaaagctctgtccttggagcctcccgctccctgaagtgtctcgccccctgcacagcactggcctttcggaagcatcccagtagggttttctgaggctcgctggtgactcatgccctaattgcaatcctctgcttttatcttgactttgaaggatctaacactgctctctcttccaaaggggaaaaaaagattcatttgttttgagcaataaactaatacaaaatgatggccattcatgtgcagctctttgtcaccatgggccggatgagttgtgctcctcctggctcaccatttccccctgctcccccacagccggttctgcacttatcaccgagtcgcccctggaagcagattcccattgagttttccccaccaaggggaccatgcacatggtagaaacattagattctgcattgacagtagcctttccttggcccgggcctgtggtgggaagacgggcaacaagtataccccaccagggcctgagtgactagaggaagaggacgaggccttgttggcactagatttgggtattttctgcatgtcataacatatcctaactgctatttcagaagaggcagcttgtaggtgattgtacaagtgagaattaaagagagaacagatatttaaacaggtgctgtattagtaacagccagtgccctttcagcccttgcatctattaaaaggagattcaggattttattggcacaggcccttcttagtaggaagaaagggtgcttagctttggacctgaccgggtgtgtgtaaaaccatggactgagtcacagcagacactcgatggtggtaaatgtgatgggtgcttacacactgtaccttttcctttcatactgatgctgcagttcagggctggagttgttaaggcattgacctccacccacctgccccatgtccactgggctgcccaagctgcatgtcacctgagggctggcaggaaggggcgagaaatcccagggcattgtaccaaggacctagttccttctagggatataaatttccaggaatgtgtatttttaatgtggtgagatgcactcttttgttgtaccaaatagggctccccaccccacccctgcgacaagtgctcttctagaacaggttcctaccagcagcactggtgtgaatgaaagagagacccagccgcgtctcacacaggtggaattgcacttcttaacaaaaaggaactttataaaagtttgggattttttttcctaatcataaaaatagccccagaaagagcctaagctatgttcagatagaagcctcgaaattcctgtaaattgtttactttatgatgtttacatacacgtttcactttgaaaaaaaatgcaaatcgactttttaacaactgttgagatgtttcatgggacagtagaactctgactcaccaactgggctaaattttaatttaaaaatgtatttatttgagtgtctttccccccctcaccctcaccatctgaggggctccctgagatcttggtagaggaggcccctcctgcccagaccttcgtttgtttccccggtggcccttgcttcttgctttgcagactgcctgcagccatgattttgtcactgacatctgtgagccaaagactgagcctttttggcaggaataataagcaatactacacaacttgctactttcagaaaacttttttttagcttcaccgatgacaacagaggaagaagggaactgggatttgggtaagttctcctccactgtttgaccaaattctcagtgataaatatgtgtgcagatccctagaagagaaaacgctgactttctttttaagtgtggcacataaggatctgcagaattttccgtagacaaagaaaggatcttgtgtatttttgtccatatccaatgttatatgaactaattgtattgttttatactgtgaccacaaatattatgcaatgcaccatttgttttttatttcattaaaggaagtttaatttaaattaaaaaaaaa

SEQ ID NO: 310421 - DNA, 4215 bp, Homo sapiens
cgcgtggactacgacccgtagtgacacacagcgaaacgaagtacatcatctctctggaccaggattctgtggtgaagctggagaattggacagatgcatcacgggtggatggcgttgttttagaaaaagtgcaggaggatgagttccgctatcgaatgtaccagactcaggtctcagacgcagggctgtaccgctgcatggtgacagcctggtctcctgtcaggggcagcctttggcgagaagcagcaaccagtctctccaatcctattgagatagacttccaaacctcaggtcctatatttaatgcttctgtgcattcagacacaccatcagtacttcggggagatctgatcaaattgttctgtatcatcactgtcgagggagcagcactggatccagatgacatggcctttgatgtgtcctggtttgcggtgcactcttttggcctggacaaggctcctgtgctcctgtcttccctggatcggaagggcatcgtgaccacctcccggagggactggaagagcgacctcagcctggagcgcgtgagtgtgctggaattcttgctgcaagtgcatggctccgaggaccaggactttggcaactactactgttccgtgactccatgggtgaagtcaccaacaggttcctggcagaaggaggcagagatccactccaagcccgtttttataactgtgaagatggatgtgctgaacgccttcaagtatcccttgctgatcggcgtcggtctgtccacggtcatcgggctcctgtcctgtctcatcgggtactgcagctcccactggtgttgtaagaaggaggttcaggagacacggcgcgagcgccgcaggctcatgtcgatggagatggactaggctggcccgggaggggagtgacagagggacgttctaggagcaattggggcaagaagaggacagtgatattttaaaacaaagtgtgttacactaaaaaccagtcctctctaatctcaggtgggacttggcgctctctcttttctgcatgtcaagttctgagcgcggacatgtttaccagcacacggctcttcttcccacggcactttctgatgtaacaatcgagtgtgtgttttcccaactgcagctttttaatggttaaccttcatctaattttttttctcccactggtttatagatcctctgacttgtgtgtgtttatagcttttgtttcgcggggttgtggtgaggaaggggtgatggcatgcggagttctttatcttcagtgagaatgtgcctgcccgcctgagagccagcttccgcgttggaggcacgtgttcagagagctgctgagcgccaccctctacccggctgacagacaacacagacctgtgccgaaggctaatttgtggcttttacgaccctaccccaccccctgttttcaggggtttagactacatttgaaatccaaacttggagtatataacttcttattgagcccaactgctttttttttttttttttttgcttctctgccccttttccatttcttttgtatttgttttctgtgagagcactgaaatggcggccctggaatctacaatttggctctccactgagcaccttatcttgccaccttagccttaagaatgaatatgaagaaaaatacacagccacctctgtccagggcagtaagaagggctgcaaggaaggggaggatggggacaaggaaaggatcagatacctgctccagtagttgtgaggccactgtgtctcaggggactccaggaagagcagaagagggatcccacgaagttatttttatgcagctggggccaggagggtcagagtggtgccaggtgcaagttaggctaaagaagccaccactattcctctctcttgcccattgtggggggcaaaggcattggtcaccaagagtcttgcagggggacccacagatatgccatgtccttcacacgtgcttgggctccttaacctgaaggcaaattgctacttgcaagactgactgacttcaaggaatcagaaattacctagaagcaccatgttttttctatgaccttttcagtccttcaggtcattttaaggtccactgcagggggttagtgagaaagggtatactttgtggtatgttttgctttcctaatagggacatgaaggaaacccagcaatttgctgttatgtgaatggcctgtagagcagagtcaagagcggtgtgctttgcccgactgctcccatcaggaataggagagtagacagagatcttccacatcccaggcttctgctgctgctttaaaagctctgtccttggagcctcccgctccctgaagtgtctcgccccctgcacagcactggcctttcggaagcatcccagtagggttttctgaggctcgctggtgactcatgccctaattgcaatcctctgcttttatcttgactttgaaggatctaacactgctctctcttccaaaggggaaaaaaagattcatttgttttgagcaataaactaatacaaaatgatggccattcatgtgcagctctttgtcaccatgggccggatgagttgtgctcctcctggctcaccatttccccctgctcccccacagccggttctgcacttatcaccgagtcgcccctggaagcagattcccattgagttttccccaccaaggggaccatgcacatggtagaaacattagattctgcattgacagtagcctttccttggcccgggcctgtggtgggaagacgggcaacaagtataccccaccagggcctgagtgactagaggaagaggacgaggccttgttggcactagatttgggtattttctgcatgtcataacatatcctaactgctatttcagaagaggcagcttgtaggtgattgtacaagtgagaattaaagagagaacagatatttaaacaggtgctgtattagtaacagccagtgccctttcagcccttgcatctattaaaaggagattcaggattttattggcacaggcccttcttagtaggaagaaagggtgcttagctttggacctgaccgggtgtgtgtaaaaccatggactgagtcacagcagacactcgatggtggtaaatgtgatgggtgcttacacactgtaccttttcctttcatactgatgctgcagttcagggctggagttgttaaggcattgacctccacccacctgccccatgtccactgggctgcccaagctgcatgtcacctgagggctggcaggaaggggcgagaaatcccagggcattgtaccaaggacctagttccttctagggatataaatttccaggaatgtgtatttttaatgtggtgagatgcactcttttgttgtaccaaatagggctccccaccccacccctgcgacaagtgctcttctagaacaggttcctaccagcagcactggtgtgaatgaaagagagacccagccgcgtctcacacaggtggaattgcacttcttaacaaaaaggaactttataaaagtttgggattttttttcctaatcataaaaatagccccagaaagagcctaagctatgttcagatagaagcctcgaaattcctgtaaattgtttactttatgatgtttacatacacgtttcactttgaaaaaaaatgcaaatcgactttttaacaactgttgagatgtttcatgggacagtagaactctgactcaccaactgggctaaattttaatttatccctgagatcttggtagaggaggcccctcctgcccagaccttcgtttgtttccccggtggcccttgcttcttgctttgcagactgcctgcagccatgattttgtcactgacatctgtgagccaaagactgagcctttttggcaggaataataagcaatactacacaacttgctactttcagaaaacttttttttagcttcaccgatgacaacagaggaagaagggaactgggatttgggtaagttctcctccactgtttgaccaaattctcagtgataaatatgtgtgcagatccctagaagagaaaacgctgactttctttttaagtgtggcacataaggatctgcagaattttccgtagacaaagaaaggatcttgtgtatttttgtccatatccaatgttatatgaactaattgtattgttttatactgtgaccacaaatattatgcaatgcaccatttgttttttatttcattaaaggaagtttaatttaaattaaaaaaaaa

SEQ ID NO: 310422 - DNA, 2512 bp, Homo sapiens
cgcgtggactacgacccgtagtgacacacagcgaaacgaagtacatcatctctctggaccaggattctgtggtgaagctggagaattggacagatgcatcacgggtggatggcgttgttttagaaaaagtgcaggaggatgagttccgctatcgaatgtaccagactcaggtctcagacgcagggctgtaccgctgcatggtgacagcctggtctcctgtcaggggcagcctttggcgagaagcagcaaccagtctctccaatcctattgagatagacttccaaacctcaggtcctatatttaatgcttctgtgcattcagacacaccatcagtacttcggggagatctgatcaaattgttctgtatcatcactgtcgagggagcagcactggatccagatgacatggcctttgatgtgtcctggtttgcggtgcactcttttggcctggacaaggctcctgtgctcctgtcttccctggatcggaagggcatcgtgaccacctcccggagggactggaagagcgacctcagcctggagcgcgtgagtgtgctggaattcttgctgcaagtgcatggctccgaggaccaggactttggcaactactactgttccgtgactccatgggtgaagtcaccaacaggttcctggcagaaggaggcagagatccactccaagcccgtttttataactgtgaagatggatgtgctgaacgccttcaagtatcccttgctgatcggcgtcggtctgtccacggtcatcgggctcctgtcctgtctcatcgggtactgcagctcccactggtgttgtaagaaggaggttcaggagacacggcgcgagcgccgcaggctcatgtcgatggagatggactaggctggcccgggaggggagtgacagagggacgttctaggagcaattggggcaagaagaggacagtgatattttaaaacaaagtgtgttacactaaaaaccagtcctctctaatctcaggtgggacttggcgctctctcttttctgcatgtcaagttctgagcgcggacatgtttaccagcacacggctcttcttcccacggcactttctgatgtaacaatcgagtgtgtgttttcccaactgcagctttttaatggttaaccttcatctaattttttttctcccactggtttatagatcctctgacttgtgtgtgtttatagcttttgtttcgcggggttgtggtgaggaaggggtgatggcatgcggagttctttatcttcagtgagaatgtgcctgcccgcctgagagccagcttccgcgttggaggcacgtgttcagagagctgctgagcgccaccctctacccggctgacagacaacacagacctgtgccgaaggctaatttgtggcttttacgaccctaccccaccccctgttttcaggggtttagactacatttgaaatccaaacttggagtatataacttcttattgagcccaactgctttttttttttttttttttgcttctctgccccttttccatttcttttgtatttgttttctgtgagagcactgaaatggcggccctggaatctacaatttggctctccactgagcaccttatcttgccaccttagccttaagaatgaatatgaagaaaaatacacagccacctctgtccagggcagtaagaagggctgcaaggaaggggaggatggggacaaggaaaggatcagatacctgctccagtagttgtgaggccactgtgtctcaggggactccaggaagagcagaagagggatcccacgaagttatttttatgcagctggggccaggagggtcagagtggtgccaggtgcaagttaggctaaagaagccaccactattcctctctcttgcccattgtggggggcaaaggcattggtcaccaagagtcttgcagggggacccacagatatgccatgtccttcacacgtgcttgggctccttaacctgaaggcaaattgctacttgcaagactgactgacttcaaggaatcagaaattacctagaagcaccatgttttttctatgaccttttcagtccttcaggtcattttaaggtccactgcagggggttagtgagaaagggtatactttgtggtatgttttgctttcctaatagggacatgaaggaaacccagcaatttgctgttatgtgaatggcctgtagagcagagtcaagagcggtgtgctttgcccgactgctcccatcaggaataggagagtagacagagatcttccacatcccaggcttctgctgctgctttaaaagctctgtccttggagcctcccgctccctgaagtgtctcgccccctgcacagcactggcctttcggaagcatcccagtagggttttctgaggctcgctggtgactcatgccctaattgcaatcctctgcttttatcttgactttgaaggatctaacactgctctctcttccaaaggggaaaaaaagattcatttgttttgagcaataaactaatacaaaatgatggcc

SEQ ID NO: 310423 - DNA, 2462 bp, Homo sapiens
cgcgtggactacgacccgtagtgacacacagcgaaacgaagtacatcatctctctggaccaggattctgtggtgaagctggagaattggacagatgcatcacgggtggatggcgttgttttagaaaaagtgcaggaggatgagttccgctatcgaatgtaccagactcaggtctcagacgcagggctgtaccgctgcatggtgacagcctggtctcctgtcaggggcagcctttggcgagaagcagcaaccagtctctccaatcctattgagatagacttccaaacctcaggtcctatatttaatgcttctgtgcattcagacacaccatcagtacttcggggagatctgatcaaattgttctgtatcatcactgtcgagggagcagcactggatccagatgacatggcctttgatgtgtcctggtttgcggtgcactcttttggcctggacaaggctcctgtgctcctgtcttccctggatcggaagggcatcgtgaccacctcccggagggactggaagagcgacctcagcctggagcgcgtgagtgtgctggaattcttgctgcaagtgcatggctccgaggaccaggactttggcaactactactgttccgtgactccatgggtgaagtcaccaacaggttcctggcagaaggaggcagagatccactccaagcccgtttttataactgtgaagatggatgtgctgaacgccttcaagtatcccttgctgatcggcgtcggtctgtccacggtcatcgggctcctgtcctgtctcatcgggtactgcagctcccactggtgttgtaagaaggaggttcaggagacacggcgcgagcgccgcaggctcatgtcgatggagatggactaggctggcccgggaggggagtgacagagggacgttctaggagcaattggggcaagaagaggacagtgatattttaaaacaaagtgtgttacactaaaaaccagtcctctctaatctcaggtgggacttggcgctctctcttttctgcatgtcaagttctgagcgcggacatgtttaccagcacacggctcttcttcccacggcactttctgatgtaacaatcgagtgtgtgttttcccaactgcagctttttaatggttaaccttcatctaattttttttctcccactggtttatagatcctctgacttgtgtgtgtttatagcttttgtttcgcggggttgtggtgaggaaggggtgatggcatgcggagttctttatcttcagtgagaatgtgcctgcccgcctgagagccagcttccgcgttggaggcacgtgttcagagagctgctgagcgccaccctctacccggctgacagacaacacagacctgtgccgaaggctaatttgtggcttttacgaccctaccccaccccctgttttcaggggtttagactacatttgaaatccaaacttggagtatataacttcttattgagcccaactgctttttttttttttttttttgcttctctgccccttttccatttcttttgtatttgttttctgtgagagcactgaaatggcggccctggaatctacaatttggctctccactgagcaccttatcttgccaccttagccttaagaatgaatatgaagaaaaatacacagccacctctgtccagggcagtaagaagggctgcaaggaaggggaggatggggacaaggaaaggatcagatacctgctccagtagttgtgaggccactgtgtctcaggggactccaggaagagcagaagagggatcccacgaagttatttttatgcagctggggccaggagggtcagagtggtgccaggtgcaagttaggctaaagaagccaccactattcctctctcttgcccattgtggggggcaaaggcattggtcaccaagagtcttgcagggggacccacagatatgccatgtccttcacacgtgcttgggctccttaacctgaaggcaaattgctacttgcaagactgactgacttcaaggaatcagaaattacctagaagcaccatgttttttctatgaccttttcagtccttcaggtcattttaaggtccactgcagggggttagtgagaaagggtatactttgtggtatgttttgctttcctaatagggacatgaaggaaacccagcaatttgctgttatgtgaatggcctgtagagcagagtcaagagcggtgtgctttgcccgactgctcccatcaggaataggagagtagacagagatcttccacatcccaggcttctgctgctgctttaaaagctctgtccttggagcctcccgctccctgaagtgtctcgccccctgcacagcactggcctttcggaagcatcccagtagggttttctgaggctcgctggtgactcatgccctaattgcaatcctctgcttttatcttgactttgaaggaagcgtcgcgcatggtaccgagctcgatt

SEQ ID NO: 310424 - DNA, 2457 bp, Homo sapiens
cgcgtggactacgacccgtagtgacacacagcgaaacgaagtacatcatctctctggaccaggattctgtggtgaagctggagaattggacagatgcatcacgggtggatggcgttgttttagaaaaagtgcaggaggatgagttccgctatcgaatgtaccagactcaggtctcagacgcagggctgtaccgctgcatggtgacagcctggtctcctgtcaggggcagcctttggcgagaagcagcaaccagtctctccaatcctattgagatagacttccaaacctcaggtcctatatttaatgcttctgtgcattcagacacaccatcagtacttcggggagatctgatcaaattgttctgtatcatcactgtcgagggagcagcactggatccagatgacatggcctttgatgtgtcctggtttgcggtgcactcttttggcctggacaaggctcctgtgctcctgtcttccctggatcggaagggcatcgtgaccacctcccggagggactggaagagcgacctcagcctggagcgcgtgagtgtgctggaattcttgctgcaagtgcatggctccgaggaccaggactttggcaactactactgttccgtgactccatgggtgaagtcaccaacaggttcctggcagaaggaggcagagatccactccaagcccgtttttataactgtgaagatggatgtgctgaacgccttcaagtatcccttgctgatcggcgtcggtctgtccacggtcatcgggctcctgtcctgtctcatcgggtactgcagctcccactggtgttgtaagaaggaggttcaggagacacggcgcgagcgccgcaggctcatgtcgatggagatggactaggctggcccgggaggggagtgacagagggacgttctaggagcaattggggcaagaagaggacagtgatattttaaaacaaagtgtgttacactaaaaaccagtcctctctaatctcaggtgggacttggcgctctctcttttctgcatgtcaagttctgagcgcggacatgtttaccagcacacggctcttcttcccacggcactttctgatgtaacaatcgagtgtgtgttttcccaactgcagctttttaatggttaaccttcatctaattttttttctcccactggtttatagatcctctgacttgtgtgtgtttatagcttttgtttcgcggggttgtggtgaggaaggggtgatggcatgcggagttctttatcttcagtgagaatgtgcctgcccgcctgagagccagcttccgcgttggaggcacgtgttcagagagctgctgagcgccaccctctacccggctgacagacaacacagacctgtgccgaaggctaatttgtggcttttacgaccctaccccaccccctgttttcaggggtttagactacatttgaaatccaaacttggagtatataacttcttattgagcccaactgctttttttttttttttttttgcttctctgccccttttccatttcttttgtatttgttttctgtgagagcactgaaatggcggccctggaatctacaatttggctctccactgagcaccttatcttgccaccttagccttaagaatgaatatgaagaaaaatacacagccacctctgtccagggcagtaagaagggctgcaaggaaggggaggatggggacaaggaaaggatcagatacctgctccagtagttgtgaggccactgtgtctcaggggactccaggaagagcagaagagggatcccacgaagttatttttatgcagctggggccaggagggtcagagtggtgccaggtgcaagttaggctaaagaagccaccactattcctctctcttgcccattgtggggggcaaaggcattggtcaccaagagtcttgcagggggacccacagatatgccatgtccttcacacgtgcttgggctccttaacctgaaggcaaattgctacttgcaagactgactgacttcaaggaatcagaaattacctagaagcaccatgttttttctatgaccttttcagtccttcaggtcattttaaggtccactgcagggggttagtgagaaagggtatactttgtggtatgttttgctttcctaatagggacatgaaggaaacccagcaatttgctgttatgtgaatggcctgtagagcagagtcaagagcggtgtgctttgcccgactgctcccatcaggaataggagagtagacagagatcttccacatcccaggcttctgctgctgctttaaaagctctgtccttggagcctcccgctccctgaagtgtctcgccccctgcacagcactggcctttcggaagcatcccagtagggttttctgaggctcgctggtgactcatgccctaaacgctctctgcaagaggcgtttagcattggagtagggtttagggtgatgtagtgtagg

SEQ ID NO: 310425 - DNA, 1415 bp, Homo sapiens
cgcgtggactacgacccgtagtgacacacagcgaaacgaagtacatcatctctctggaccaggattctgtggtgaagctggagaattggacagatgcatcacgggtggatggcgttgttttagaaaaagtgcaggaggatgagttccgctatcgaatgtaccagactcaggtctcagacgcagggctgtaccgctgcatggtgacagcctggtctcctgtcaggggcagcctttggcgagaagcagcaaccagtctctccaatcctattgagatagacttccaaacctcaggtcctatatttaatgcttctgtgcattcagacacaccatcagtacttcggggagatctgatcaaattgttctgtatcatcactgtcgagggagcagcactggatccagatgacatggcctttgatgtgtcctggtttgcggtgcactcttttggcctggacaaggctcctgtgctcctgtcttccctggatcggaagggcatcgtgaccacctcccggagggactggaagagcgacctcagcctggagcgcgtgagtgtgctggaattcttgctgcaagtgcatggctccgaggaccaggactttggcaactactactgttccgtgactccatgggtgaagtcaccaacaggttcctggcagaaggaggcagagatccactccaagcccgtttttataactgtgaagatggatgtgctgaacgccttcaagtatcccttgctgatcggcgtcggtctgtccacggtcatcgggctcctgtcctgtctcatcgggtactgcagctcccactggtgttgtaagaaggaggttcaggagacacggcgcgagcgccgcaggctcatgtcgatggagatggactaggctggcccgggaggggagtgacagagggacgttctaggagcaattggggcaagaagaggacagtgatattttaaaacaaagtgtgttacactaaaaaccagtcctctctaatctcagactgcctgcagccatgattttgtcactgacatctgtgagccaaagactgagcctttttggcaggaataataagcaatactacacaacttgctactttcagaaaacttttttttagcttcaccgatgacaacagaggaagaagggaactgggatttgggtaagttctcctccactgtttgaccaaattctcagtgataaatatgtgtgcagatccctagaagagaaaacgctgactttctttttaagtgtggcacataaggatctgcagaattttccgtagacaaagaaaggatcttgtgtatttttgtccatatccaatgttatatgaactaattgtattgttttatactgtgaccacaaatattatgcaatgcaccatttgttttttatttcattaaaggaagtttaatttaaattaaaaaaaaa

SEQ ID NO: 310426 - DNA, 1304 bp, Homo sapiens
cgcgtggactacgacccgtagtgacacacagcgaaacgaagtacatcatctctctggaccaggattctgtggtgaagctggagaattggacagatgcatcacgggtggatggcgttgttttagaaaaagtgcaggaggatgagttccgctatcgaatgtaccagactcaggtctcagacgcagggctgtaccgctgcatggtgacagcctggtctcctgtcaggggcagcctttggcgagaagcagcaaccagtctctccaatcctattgagatagacttccaaacctcaggtcctatatttaatgcttctgtgcattcagacacaccatcagtacttcggggagatctgatcaaattgttctgtatcatcactgtcgagggagcagcactggatccagatgacatggcctttgatgtgtcctggtttgcggtgcactcttttggcctggacaaggctcctgtgctcctgtcttccctggatcggaagggcatcgtgaccacctcccggagggactggaagagcgacctcagcctggagcgcgtgagtgtgctggaattcttgctgcaagtgcatggctccgaggaccaggactttggcaactactactgttccgtgactccatgggtgaagtcaccaacaggttcctggcagaaggaggcagagatccactccaagcccgtttttataactgtgaagatggatgtgctgaacgccttcaagtatcccttgctgatcggcgtcggtctgtccacggtcatcgggctcctgtcctgtctcatcgggtactgcagctcccactggtgttgtaagaaggaggttcaggagacacggcgcgagcgccgcaggctcatgtcgatggagatggactaggctggcccgggaggggagtgacagagggacgttctaggagcaattggggcaagaagaggacagtgatattttaaaacaaagtgtgttacactaaaaaccagtcctctctaatctcaggtgggacttggcgctctctcttttctgcatgtcaagttctgagcgcggacatgtttaccagcacacggctcttcttcccacggcactttctgatgtaacaatcgagtgtgtgttttcccaactgcagctttttaatggttaaccttcatctaattttttttctcccactggtttatagatcctctgaaaaaaaaaaaaaaaaaaaaaaagcggggttttttttgggggcgccacaacgggtaaaaaggcccggccataggttccccccccttttggcaaggggaactcgggggcccaagggggaaaatgaaccgc

SEQ ID NO: 310427 - DNA, 374 bp, Homo sapiens
cgcgtggactacgacccgtagtgacacacagcgaaacgaagtacatcatctctctggaccaggattctgtggtgaagctggagaattggacagatgcatcacgggtggatggcgttgttttagaaaaagtgcaggaggatgagttccgctatcgaatgtaccagactcaggtctcagacgcagggctgtaccgctgcatggtgacagcctggtctcctgtcaggggcagcctttggcgagaagcagcaaccagtctctccaatcctattgagatagacttccaaacctcaggtcctatatttaatgcttctgtgcattcagacacaccatcagtacttcgtttcgctgtgttgtacacttgcggtaccgagctc

SEQ ID NO: 310428 - DNA, 573 bp, Homo sapiens
cgcgtggactacgacccgtagtgacacacagcgaaacgaagtacatcatctctctggaccaggattctgtggtgaagctggagaattggacagatgcatcacgggtggatggcgttgttttagaaaaagtgcaggaggatgagttccgctatcgaatgtaccagactcaggtctcagacgcagggctgtaccgctgcatggtgacagcctggtctcctgtcaggggcagcctttggcgagaagcagcaaccagtctctccaatcctattgagatagacttccaaacctcaggtcctatatttaatgcttctgtgcattcagacacaccatcagtacttcggggagatctgatcaaattgttctgtatcatcactgtcgagggagcagcactggatccaggtacctcactccatcctcaccccttcaccatgttgctttctgtaaatgtttctcatatcatccgcactgtgttacacagatgtgggttagggataggattatctatttatcccctaactgcctggcccagtactttgtactcattaagtgtttaataaatacatgttgagtgga

SEQ ID NO: 310429 - DNA, 2218 bp, Homo sapiens
  misc_feature (30)..(30): n is a, c, g, or t
cggggtcgtctagaggatccctcataggtncgcaggggttagtgagaaagggtatactttgtggtatgttttgctttcctaatagggacatgaaggaaacccagcaatttgctgttatgtgaatggcctgtagagcagagtcaagagcggtgtgctttgcccgactgctcccatcaggaataggagagtagacagagatcttccacatcccaggcttctgctgctgctttaaaagctctgtccttggagcctcccgctccctgaagtgtctcgccccctgcacagcactggcctttcggaagcatcccagtagggttttctgaggctcgctggtgactcatgccctaattgcaatcctctgcttttatcttgactttgaaggatctaacactgctctctcttccaaaggggaaaaaaagattcatttgttttgagcaataaactaatacaaaatgatggccattcatgtgcagctctttgtcaccatgggccggatgagttgtgctcctcctggctcaccatttccccctgctcccccacagccggttctgcacttatcaccgagtcgcccctggaagcagattcccattgagttttccccaccaaggggaccatgcacatggtagaaacattagattctgcattgacagtagcctttccttggcccgggcctgtggtgggaagacgggcaacaagtataccccaccagggcctgagtgactagaggaagaggacgaggccttgttggcactagatttgggtattttctgcatgtcataacatatcctaactgctatttcagaagaggcagcttgtaggtgattgtacaagtgagaattaaagagagaacagatatttaaacaggtgctgtattagtaacagccagtgccctttcagcccttgcatctattaaaaggagattcaggattttattggcacaggcccttcttagtaggaagaaagggtgcttagctttggacctgaccgggtgtgtgtaaaaccatggactgagtcacagcagacactcgatggtggtaaatgtgatgggtgcttacacactgtaccttttcctttcatactgatgctgcagttcagggctggagttgttaaggcattgacctccacccacctgccccatgtccactgggctgcccaagctgcatgtcacctgagggctggcaggaaggggcgagaaatcccagggcattgtaccaaggacctagttccttctagggatataaatttccaggaatgtgtatttttaatgtggtgagatgcactcttttgttgtaccaaatagggctccccaccccacccctgcgacaagtgctcttctagaacaggttcctaccagcagcactggtgtgaatgaaagagagacccagccgcgtctcacacaggtggaattgcacttcttaacaaaaaggaactttataaaagtttgggattttttttcctaatcataaaaatagccccagaaagagcctaagctatgttcagatagaagcctcgaaattcctgtaaattgtttactttatgatgtttacatacacgtttcactttgaaaaaaaatgcaaatcgactttttaacaactgttgagatgtttcatgggacagtagaactctgactcaccaactgggctaaattttaatttaaaaatgtatttatttgagtgtctttccccccctcaccctcaccatctgaggggctccctgagatcttggtagaggaggcccctcctgcccagaccttcgtttgtttccccggtggcccttgcttcttgctttgcagactgcctgcagccatgattttgtcactgacatctgtgagccaaagactgagcctttttggcaggaataataagcaatactacacaacttgctactttcagaaaacttttttttagcttcaccgatgacaacagaggaagaagggaactgggatttgggtaagttctcctccactgtttgaccaaattctcagtgataaatatgtgtgcagatccctagaagagaaaacgctgactttctttttaagtgtggcacataaggatctgcagaattttccgtagacaaagaaaggatcttgtgtatttttgtccatatccaatgttatatgaactaattgtattgttttatactgtgaccacaaatattatgcaatgcaccatttgttttttatttcattaaaggaagtttaatttaaattaaaaaaaaa

SEQ ID NO: 310430 - DNA, 1970 bp, Homo sapiens
ggatcttcggagcatgttggcctactgaaagatcgcggcgccatttgctgccgccgagcgtggacgcaggcggatctctgaagagctgggtcgccagcctctcccgcgcacgttgcctggcctccagcacctacttggtcccgcgcgctccctcgtgtcgcccctcggagcagcagccgccgcggtcgccgctacccggaaagaagtcagagacgccgcgaggtcgccgccaccgccatgcccaagaataaaggtaaaggaggtaaaaacagacgcaggggtaagaatgagaatgaatctgaaaaaagagaactggtattcaaagaggatggtcaggagtatgctcaggtaatcaaaatgttgggaaatggacggctagaagcaatgtgtttcgatggtgtaaagaggttatgtcacatcagaggaaaattgagaaaaaaggtttggataaatacctcggacattattttggttggtctccgagactaccaggataacaaagctgatgtaattttaaaatacaatgcagacgaagctagaagtctgaaggcatacggcgagcttccagagcatgctaaaatcaatgaaactgatacatttggtcctggagatgatgatgaaattcagtttgatgacattggagatgatgatgaagatattgatgacatctaaattgaactcaacattttacattccatcttttctgaagattgtcctacaatttggattttgatcatgacaaagaagattaaaatttcattagcatgaatgcaatttgttaaagcagactgatttgtttctaagatatttttggtttttttaaaactgataataatgctgaattatcttaagtgagatgttaagcccactttgttcttttaatgtaatggagcttatgggtagaagaccatgtctactaattacaaaaaaaaaaaaaaaccatgcattgctgcttttcctaccacttccagtaagaaaatgggtgttttgaagaaatcatttgccttgtcctcacggaatctgattaagccctggcctcttgattgtatagagtcattgtgtatattccagttacctagatattcccttgagattttgatacaatttgagggaggcagaagtctgcagttgaagaaaaaaaataagtctgtttgtcatatttaagtagcctgtggctatttttatactgattttgatatcatgttcttttcatagtcgtattttgccaccgtaaacataaaaaaaaaaaaaaagatttccaaaatgccgttttcagaacctgggttttaatagcagtattgaatttgtaagcttagtagttgcagaaattgaacactaggtggcactcagttatcttaacaggggaagtactgatacaattgttgacttttcttttactatgtgtaagaaataccccaaacatgaaaagattgttttgatcatatgcatgtatgtagaatatttttgcagagcagaaagattatgttagaagtgtgatttttattttcagaagtcatatacatgtaagctacaattttgagtgctttataaacacttaagatatatatataaattttaatttcatagcaacttgtaaaaaataaaatacttgttgaaaagcctttttcaacatatccctaagctaagggaagaggaaggaataacaactcagtgaaaagatggtctccagtttctgaatgaaaaagctacagctgagaaataaaataaaatgtcatgctgcagaatatgttatacccttattttgtgttaaggatatattttattatgtgaatggttttgtttttgttttttgtttttgttttttgcttgtattgggaattagctttactggtaacttccttatttagtttttagtggtcaactctaataaaatgaaactagggctgagctagttagccctcactagccaaactgaaactctatgcaacattaaaagaagagatccatca

SEQ ID NO: 310431 - DNA, 2075 bp, Homo sapiens
ggatcttcggagcatgttggcctactgaaagatcgcggcgccatttgctgccgccgagcgtggacgcaggcggatctctgaagagctgggtcgccagcctctcccgcgcacgttgcctggcctccagcacctacttggtcccgcgcgctccctcgtgtcgcccctcggagcagcagccgccgcggtcgccgctacccggaaagaagtcagagacgccgcgaggtcgccgccaccgccatgcccaagaataaaggtaaaggaggtaaaaacagacgcaggggtaagaatgagaatgaatctgaaaaaagagaactggtattcaaagaggatggtcaggagtatgctcaggtaatcaaaatgttgggaaatggacggctagaagcaatgtgtttcgatggtgtaaagaggttatgtcacatcagaggaaaattgagaaaaaaggtttggataaatacctcggacattattttggttggtctccgagactaccaggataacaaagctgatgtaattttaaaatacaatgcagacgaagctagaagtctgaaggcatacggcgagcttccagagcatgctaaaatcaatgaaactgatacatttggtcctggagatgatgatgaaattcagtttgatgacattggagatgatgatgaagatattgatgacatctaaattgaactcaacattttacattccatcttttctgaagattgtcctacaatttggattttgatcatgacaaagaagattaaaatttcattagcatgaatgcaatttgttaaagcagactgatttgtttctaagatatttttggtttttttaaaactgataataatgctgaattatcttaagtgagatgttaagcccactttgttcttttaatgtaatggagcttatgggtagaagaccatgtctactaattacaaaaaaaaaaaaaaaccatgcattgctgcttttcctaccacttccagtaagaaaatgggtgttttgaagaaatcatttgccttgtcctcacggaatctgattaagccctggcctcttgattgtatagagtcattgtgtatattccagttacctagatattcccttgagattttgatacaatttgagggaggcagaagtctgcagttgaagaaaaaaaataagtctgtttgtcatatttaagtagcctgtggctatttttatactgattttgatatcatgttcttttcatagtcgtattttgccaccgtaaacataaaaaaaaaaaaaaagatttccaaaatgccgttttcagaacctgggttttaatagcagtattgaatttgtaagcttagtagttgcagaaattgaacactaggtggcactcagttatcttaacaggggaagtactgatacaattgttgacttttcttttactatgtgtaagaaataccccaaacatgaaaagattgttttgatcatatgcatgtatgtagaatatttttgcagagcagaaagattatgttagaagtgtgatttttattttcagaagtcatatacatgtaagctacaattttgagtgctttataaacacttaagatatatatataaattttaatttcatagcaacttgtaaaaaataaaatacttgttgaaaagcctttttcaacatatccctaagctaagggaagaggaaggaataacaactcagtgaaaagatggtctccagtttctgaatgaaaaagctacagctgagaaataaaataaaatgtcatgctgcagaatatgttatacccttattttgtgttaaggatatattttattatgtgaatggttttgtttttgttttttgtttttgttttttgcttgtattgggaattagctttactggtaacttccttatttagtttttagtggtcaactctaataaaatgaaactagggctgagctagttagccctcactagccaaactgaaactctatgcaacattaaaagaagagatccatcaaaaacaaaaaacaaaaacaaaaccattcacataataaaatatatccttaacacaaaataagggtataacatattctgcagcatgacattttattttatgtcgacg

SEQ ID NO: 310432 - DNA, 1742 bp, Homo sapiens
ggatcttcggagcatgttggcctactgaaagatcgcggcgccatttgctgccgccgagcgtggacgcaggcggatctctgaagagctgggtcgccagcctctcccgcgcacgttgcctggcctccagcacctacttggtcccgcgcgctccctcgtgtcgcccctcggagcagcagccgccgcggtcgccgctacccggaaagaagtcagagacgccgcgaggtcgccgccaccgccatgcccaagaataaaggtaaaggaggtaaaaacagacgcaggggtaagaatgagaatgaatctgaaaaaagagaactggtattcaaagaggatggtcaggagtatgctcaggtaatcaaaatgttgggaaatggacggctagaagcaatgtgtttcgatggtgtaaagaggttatgtcacatcagaggaaaattgagaaaaaaggtttggataaatacctcggacattattttggttggtctccgagactaccaggataacaaagctgatgtaattttaaaatacaatgcagacgaagctagaagtctgaaggcatacggcgagcttccagagcatgctaaaatcaatgaaactgatacatttggtcctggagatgatgatgaaattcagtttgatgacattggagatgatgatgaagatattgatgacatctaaattgaactcaacattttacattccatcttttctgaagattgtcctacaatttggattttgatcatgacaaagaagattaaaatttcattagcatgaatgcaatttgttaaagcagactgatttgtttctaagatatttttggtttttttaaaactgataataatgctgaattatcttaagtgagatgttaagcccactttgttcttttaatgtaatggagcttatgggtagaagaccatgtctactaattacaaaaaaaaaaaaaaaccatgcattgctgcttttcctaccacttccagtaagaaaatgggtgttttgaagaaatcatttgccttgtcctcacggaatctgattaagccctggcctcttgattgtatagagtcattgtgtatattccagttacctagatattcccttgagattttgatacaatttgagggaggcagaagtctgcagttgaagaaaaaaaataagtctgtttgtcatatttaagtagcctgtggctatttttatactgattttgatatcatgttcttttcatagtcgtattttgccaccgtaaacataaaaaaaaaaaaaaagatttccaaaatgccgttttcagaacctgggttttaatagcagtattgaatttgtaagcttagtagttgcagaaattgaacactaggtggcactcagttatcttaacaggggaagtactgatacaattgttgacttttcttttactatgtgtaagaaataccccaaacatgaaaagattgttttgatcatatgcatgtatgtagaatatttttgcagagcagaaagattatgttagaagtgtgatttttattttcagaagtcatatacatgtaagctacaattttgagtgctttataaacacttaagatatatatataaattttaatttcatagcaacttgtaaaaaataaaatacttgttgaaaagcctttttcaacatatccctaagctaagggaagaggaaggaataacaactcagtgaaaagatggtctccagtttctgaatgaaaaagctacagctgagaaataaaataaaatgtcatgctgca

SEQ ID NO: 310433 - DNA, 4368 bp, Homo sapiens
ggatcttcggagcatgttggcctactgaaagatcgcggcgccatttgctgccgccgagcgtggacgcaggcggatctctgaagagctgggtcgccagcctctcccgcgcacgttgcctggcctccagcacctacttggtcccgcgcgctccctcgtgtcgcccctcggagcagcagccgccgcggtcgccgctacccggaaagaagtcagagacgccgcgaggtcgccgccaccgccatgcccaagaataaaggagtatgctcaggtaatcaaaatgttgggaaatggacggctagaagcaatgtgtttcgatggtgtaaagaggttatgtcacatcagaggaaaattgagaaaaaaggtttggataaatacctcggacattattttggttggtctccgagactaccaggataacaaagctgatgtaattttaaaatacaatgcagacgaagctagaagtctgaaggcatacggcgagcttccagagcatgctaaaatcaatgaaactgatacatttggtcctggagatgatgatgaaattcagtttgatgacattggagatgatgatgaagatattgatgacatctaaattgaactcaacattttacattccatcttttctgaagattgtcctacaatttggattttgatcatgacaaagaagattaaaatttcattagcatgaatgcaatttgttaaagcagactgatttgtttctaagatatttttggtttttttaaaactgataataatgctgaattatcttaagtgagatgttaagcccactttgttcttttaatgtaatggagcttatgggtagaagaccatgtctactaattacaaaaaaaaaaaaaaaccatgcattgctgcttttcctaccacttccagtaagaaaatgggtgttttgaagaaatcatttgccttgtcctcacggaatctgattaagccctggcctcttgattgtatagagtcattgtgtatattccagttacctagatattcccttgagattttgatacaatttgagggaggcagaagtctgcagttgaagaaaaaaaataagtctgtttgtcatatttaagtagcctgtggctatttttatactgattttgatatcatgttcttttcatagtcgtattttgccaccgtaaacataaaaaaaaaaaaaaagatttccaaaatgccgttttcagaacctgggttttaatagcagtattgaatttgtaagcttagtagttgcagaaattgaacactaggtggcactcagttatcttaacaggggaagtactgatacaattgttgacttttcttttactatgtgtaagaaataccccaaacatgaaaagattgttttgatcatatgcatgtatgtagaatatttttgcagagcagaaagattatgttagaagtgtgatttttattttcagaagtcatatacatgtaagctacaattttgagtgctttataaacacttaagatatatatataaattttaatttcatagcaacttgtaaaaaataaaatacttgttgaaaagcctttttcaacatatccctaagctaagggaagaggaaggaataacaactcagtgaaaagatggtctccagtttctgaatgaaaaagctacagctgagaaataaaataaaatgtcatgctgcagaatatgttatacccttattttgtgttaaggatatattttattatgtgaatggttttgtttttgttttttgtttttgttttttgcttgtattgggaattagctttactggtaacttccttatttagtttttagtggtcaactctaataaaatgaaactagggctgagctagttagccctcactagccaaactgaaactctatgcaacattaaaagaagagatccatcatgtagcttgtgacacttttattttattagtcaccggggaacttttcagtgatgaaaatacacagggtaataaaccttcacatggcttcaaaaggaaaacaagcaaatcttctctaatctactcttactataatttcctaagtgtacaccaaactctggatttaaaaatctgaagtactatagaacattaagttgaagaatggaaattaagagtacgtattcatggtttatatttcttattctatggagttcgtgaacacatctaggtggaatgcatctgagactaagggctggtttttaatcctcataagaaaccagccttgaagaattaacaattctcttcattggtattctaaacctcctaagatatttaggcttctgtacataaaagtgtttttgctaaatttacagtatatatagatcctttcatattattttactaagaatgtttgaactttgcatatttgatatagttcctggtaggaatagcacagctcaaacattagtttttctacttacctcctctaacacgtggtttgtctggagagtttctaaaaattcagctataaccccagttcatgtatttactggtgattgttcttgctgaggtagtaacagcccaatcttgggctgttaaatcctaggaaatctcgaatcatagtgattaaaatagttggggtaaagttgtagcttatatgcaatactacttggaggaattcttctactaatttgtatttaatgtggaaattgtatagtttcattgatttaatcataaataatggaaatggtctccaagaagttttatttttcatttttttgcttatacactctgattcctataatacagtgctataagctatgcacagaaaataaaatgtttgaaatccaagaataatggttcttactgctaagagggagtaatagttattactaatgattttgattgggttgcatttttgttgcaatgtttattccacttgcagttagaatatgaatatgttttatcactagtgtggctaaataaccaaacatttgtgtaaaaaaaaaaaaaagccaagatttcattgtttgttgaatatttcttaagcatctggcccctaaagagaccgcttcttaccaagcctgtaaactatgcatgatggaaattcttgtattttatttaggaatggctgttggtttactcaccacatctgtggaatcatggctataaatgtttgcttacaaactctttgtgacttgtaatttaacttaatctcatctaatgtaaatattagattatgatgttcagtaacatcttccataggtataaactgctgtcattattgatttcagagtaactctgagtaatcaaataggtaaaagcatgttttgagtaaaatagctagatttatactttacttgtatacagacttaacaacaaccggtattgactggattgacagctaaagtatcagaatgaaagcaaggtttttttgatgttacctgactgtcataaagatgaaaatgatttgtattggtatgaaatgcttatctttattctacttcgtaagggtaagttttatttatactctttggactcccatgaacttttgcacactgctttgtgtttttggtttaccctaaactaccatcctttttatctttgctttttttcttcctattcagaaaagagcaaaatgtgaaaagacacaagactctcaggtatagaatgaactgagcaatttggagaatgtattggactttgtcctctcttattcccccctcctagccctgcaagttgctaggtacttgtgaggcagtgtactggagaggggagagcatggatcctggggtcaaagggcctttgcccccacccttacttggccctctacctgcaggtgaccactggcacattctcctgcttgtctcagcttcaggttcttcacctctaagatggggatgatgaaaacagtacctgtcatgcagaattgttgggaggattgataatttagatgtttatacatgtaatgtacttagatcagtgtctgctcttttcacttgatatccagtactatgtaagatagaaggtgcatgtcttctgtattctgtatttcccatttcttttgcgtgcagtctttgattcgtacaatagaaggaacacgtagaatgtatatttgtacattcatgtcaacatagtatttgaaattgctaccaaactcatttaatttggcataagactaacagatgaagtctctcatttgcttgaagatattttacaaaataccaactgttctatatttctttagaaaaagattatagttattaatattgatacctctgataatattttattcttaaatcttcagtgattccttttactatagattcatgacagctaattagtactaactgatttagaggtttcctttcccatcatatggaatgatgtaaagaaatcagatacaaactactgcaattagaaaataaaatatgaacaactttc

SEQ ID NO: 310434 - DNA, 4023 bp, Homo sapiens
caagcattaaaggaaggagacagtaaattttattaagaatattttgcataacatgtaacattacaaaggagatcatcacgatttacttatagcaggccagaattataggaatttcttcttcaaactggatttgtttctcacatagcctaaggaggtgaaagtctcccttatatatggagtagactgttggaatataagaattctttttcctttcatctgatgttcttttcccttccagatctaaattgaactcaacattttacattccatcttttctgaagattgtcctacaatttggattttgatcatgacaaagaagattaaaatttcattagcatgaatgcaatttgttaaagcagactgatttgtttctaagatatttttggtttttttaaaactgataataatgctgaattatcttaagtgagatgttaagcccactttgttcttttaatgtaatggagcttatgggtagaagaccatgtctactaattacaaaaaaaaaaaaaaaccatgcattgctgcttttcctaccacttccagtaagaaaatgggtgttttgaagaaatcatttgccttgtcctcacggaatctgattaagccctggcctcttgattgtatagagtcattgtgtatattccagttacctagatattcccttgagattttgatacaatttgagggaggcagaagtctgcagttgaagaaaaaaaataagtctgtttgtcatatttaagtagcctgtggctatttttatactgattttgatatcatgttcttttcatagtcgtattttgccaccgtaaacataaaaaaaaaaaaaaagatttccaaaatgccgttttcagaacctgggttttaatagcagtattgaatttgtaagcttagtagttgcagaaattgaacactaggtggcactcagttatcttaacaggggaagtactgatacaattgttgacttttcttttactatgtgtaagaaataccccaaacatgaaaagattgttttgatcatatgcatgtatgtagaatatttttgcagagcagaaagattatgttagaagtgtgatttttattttcagaagtcatatacatgtaagctacaattttgagtgctttataaacacttaagatatatatataaattttaatttcatagcaacttgtaaaaaataaaatacttgttgaaaagcctttttcaacatatccctaagctaagggaagaggaaggaataacaactcagtgaaaagatggtctccagtttctgaatgaaaaagctacagctgagaaataaaataaaatgtcatgctgcagaatatgttatacccttattttgtgttaaggatatattttattatgtgaatggttttgtttttgttttttgtttttgttttttgcttgtattgggaattagctttactggtaacttccttatttagtttttagtggtcaactctaataaaatgaaactagggctgagctagttagccctcactagccaaactgaaactctatgcaacattaaaagaagagatccatcatgtagcttgtgacacttttattttattagtcaccggggaacttttcagtgatgaaaatacacagggtaataaaccttcacatggcttcaaaaggaaaacaagcaaatcttctctaatctactcttactataatttcctaagtgtacaccaaactctggatttaaaaatctgaagtactatagaacattaagttgaagaatggaaattaagagtacgtattcatggtttatatttcttattctatggagttcgtgaacacatctaggtggaatgcatctgagactaagggctggtttttaatcctcataagaaaccagccttgaagaattaacaattctcttcattggtattctaaacctcctaagatatttaggcttctgtacataaaagtgtttttgctaaatttacagtatatatagatcctttcatattattttactaagaatgtttgaactttgcatatttgatatagttcctggtaggaatagcacagctcaaacattagtttttctacttacctcctctaacacgtggtttgtctggagagtttctaaaaattcagctataaccccagttcatgtatttactggtgattgttcttgctgaggtagtaacagcccaatcttgggctgttaaatcctaggaaatctcgaatcatagtgattaaaatagttggggtaaagttgtagcttatatgcaatactacttggaggaattcttctactaatttgtatttaatgtggaaattgtatagtttcattgatttaatcataaataatggaaatggtctccaagaagttttatttttcatttttttgcttatacactctgattcctataatacagtgctataagctatgcacagaaaataaaatgtttgaaatccaagaataatggttcttactgctaagagggagtaatagttattactaatgattttgattgggttgcatttttgttgcaatgtttattccacttgcagttagaatatgaatatgttttatcactagtgtggctaaataaccaaacatttgtgtaaaaaaaaaaaaaagccaagatttcattgtttgttgaatatttcttaagcatctggcccctaaagagaccgcttcttaccaagcctgtaaactatgcatgatggaaattcttgtattttatttaggaatggctgttggtttactcaccacatctgtggaatcatggctataaatgtttgcttacaaactctttgtgacttgtaatttaacttaatctcatctaatgtaaatattagattatgatgttcagtaacatcttccataggtataaactgctgtcattattgatttcagagtaactctgagtaatcaaataggtaaaagcatgttttgagtaaaatagctagatttatactttacttgtatacagacttaacaacaaccggtattgactggattgacagctaaagtatcagaatgaaagcaaggtttttttgatgttacctgactgtcataaagatgaaaatgatttgtattggtatgaaatgcttatctttattctacttcgtaagggtaagttttatttatactctttggactcccatgaacttttgcacactgctttgtgtttttggtttaccctaaactaccatcctttttatctttgctttttttcttcctattcagaaaagagcaaaatgtgaaaagacacaagactctcaggtatagaatgaactgagcaatttggagaatgtattggactttgtcctctcttattcccccctcctagccctgcaagttgctaggtacttgtgaggcagtgtactggagaggggagagcatggatcctggggtcaaagggcctttgcccccacccttacttggccctctacctgcaggtgaccactggcacattctcctgcttgtctcagcttcaggttcttcacctctaagatggggatgatgaaaacagtacctgtcatgcagaattgttgggaggattgataatttagatgtttatacatgtaatgtacttagatcagtgtctgctcttttcacttgatatccagtactatgtaagatagaaggtgcatgtcttctgtattctgtatttcccatttcttttgcgtgcagtctttgattcgtacaatagaaggaacacgtagaatgtatatttgtacattcatgtcaacatagtatttgaaattgctaccaaactcatttaatttggcataagactaacagatgaagtctctcatttgcttgaagatattttacaaaataccaactgttctatatttctttagaaaaagattatagttattaatattgatacctctgataatattttattcttaaatcttcagtgattccttttactatagattcatgacagctaattagtactaactgatttagaggtttcctttcccatcatatggaatgatgtaaagaaatcagatacaaactactgcaattagaaaataaaatatgaacaactttc

SEQ ID NO: 310435 - DNA, 344 bp, Homo sapiens
ggatcttcggagcatgttggcctactgaaagatcgcggcgccatttgctgccgccgagcgtggacgcaggcggatctctgaagagctgggtcgccagcctctcccgcgcacgttgcctggcctccagcacctacttggtcccgcgcgctccctcgtgtcgcccctcggagcagcagccgccgcggtcgccgctacccggaaagaagtcagagacgccgcgaggtcgccgccaccgccatgcccaagaataaaggtaatgtccgcccggaccccggaccacgggtcttctcggccgggtttccaggtcctgtccctgagattgcaggtaccccggccggcagtaa

SEQ ID NO: 310436 - DNA, 4451 bp, Homo sapiens
ggatcttcggagcatgttggcctactgaaagatcgcggcgccatttgctgccgccgagcgtggacgcaggcggatctctgaagagctgggtcgccagcctctcccgcgcacgttgcctggcctccagcacctacttggtcccgcgcgctccctcgtgtcgcccctcggagcagcagccgccgcggtcgccgctacccggaaagaagtcagagacgccgcgaggtcgccgccaccgccatgcccaagaataaaggtaaaggaggtaaaaacagacgcaggggtaagaatgagaatgaatctgaaaaaagagaactggtattcaaagaggatggtcaggagtatgctcaggtaatcaaaatgttgggaaatggacggctagaagcaatgtgtttcgatggtgtaaagaggttatgtcacatcagaggaaaattgagaaaaaaggtttggataaatacctcggacattattttggttggtctccgagactaccaggataacaaagctgatgtaattttaaaatacaatgcagacgaagctagaagtctgaaggcatacggcgagcttccagagcatgctaaaatcaatgaaactgatacatttggtcctggagatgatgatgaaattcagtttgatgacattggagatgatgatgaagatattgatgacatctaaattgaactcaacattttacattccatcttttctgaagattgtcctacaatttggattttgatcatgacaaagaagattaaaatttcattagcatgaatgcaatttgttaaagcagactgatttgtttctaagatatttttggtttttttaaaactgataataatgctgaattatcttaagtgagatgttaagcccactttgttcttttaatgtaatggagcttatgggtagaagaccatgtctactaattacaaaaaaaaaaaaaaaccatgcattgctgcttttcctaccacttccagtaagaaaatgggtgttttgaagaaatcatttgccttgtcctcacggaatctgattaagccctggcctcttgattgtatagagtcattgtgtatattccagttacctagatattcccttgagattttgatacaatttgagggaggcagaagtctgcagttgaagaaaaaaaataagtctgtttgtcatatttaagtagcctgtggctatttttatactgattttgatatcatgttcttttcatagtcgtattttgccaccgtaaacataaaaaaaaaaaaaaagatttccaaaatgccgttttcagaacctgggttttaatagcagtattgaatttgtaagcttagtagttgcagaaattgaacactaggtggcactcagttatcttaacaggggaagtactgatacaattgttgacttttcttttactatgtgtaagaaataccccaaacatgaaaagattgttttgatcatatgcatgtatgtagaatatttttgcagagcagaaagattatgttagaagtgtgatttttattttcagaagtcatatacatgtaagctacaattttgagtgctttataaacacttaagatatatatataaattttaatttcatagcaacttgtaaaaaataaaatacttgttgaaaagcctttttcaacatatccctaagctaagggaagaggaaggaataacaactcagtgaaaagatggtctccagtttctgaatgaaaaagctacagctgagaaataaaataaaatgtcatgctgcagaatatgttatacccttattttgtgttaaggatatattttattatgtgaatggttttgtttttgttttttgtttttgttttttgcttgtattgggaattagctttactggtaacttccttatttagtttttagtggtcaactctaataaaatgaaactagggctgagctagttagccctcactagccaaactgaaactctatgcaacattaaaagaagagatccatcatgtagcttgtgacacttttattttattagtcaccggggaacttttcagtgatgaaaatacacagggtaataaaccttcacatggcttcaaaaggaaaacaagcaaatcttctctaatctactcttactataatttcctaagtgtacaccaaactctggatttaaaaatctgaagtactatagaacattaagttgaagaatggaaattaagagtacgtattcatggtttatatttcttattctatggagttcgtgaacacatctaggtggaatgcatctgagactaagggctggtttttaatcctcataagaaaccagccttgaagaattaacaattctcttcattggtattctaaacctcctaagatatttaggcttctgtacataaaagtgtttttgctaaatttacagtatatatagatcctttcatattattttactaagaatgtttgaactttgcatatttgatatagttcctggtaggaatagcacagctcaaacattagtttttctacttacctcctctaacacgtggtttgtctggagagtttctaaaaattcagctataaccccagttcatgtatttactggtgattgttcttgctgaggtagtaacagcccaatcttgggctgttaaatcctaggaaatctcgaatcatagtgattaaaatagttggggtaaagttgtagcttatatgcaatactacttggaggaattcttctactaatttgtatttaatgtggaaattgtatagtttcattgatttaatcataaataatggaaatggtctccaagaagttttatttttcatttttttgcttatacactctgattcctataatacagtgctataagctatgcacagaaaataaaatgtttgaaatccaagaataatggttcttactgctaagagggagtaatagttattactaatgattttgattgggttgcatttttgttgcaatgtttattccacttgcagttagaatatgaatatgttttatcactagtgtggctaaataaccaaacatttgtgtaaaaaaaaaaaaaagccaagatttcattgtttgttgaatatttcttaagcatctggcccctaaagagaccgcttcttaccaagcctgtaaactatgcatgatggaaattcttgtattttatttaggaatggctgttggtttactcaccacatctgtggaatcatggctataaatgtttgcttacaaactctttgtgacttgtaatttaacttaatctcatctaatgtaaatattagattatgatgttcagtaacatcttccataggtataaactgctgtcattattgatttcagagtaactctgagtaatcaaataggtaaaagcatgttttgagtaaaatagctagatttatactttacttgtatacagacttaacaacaaccggtattgactggattgacagctaaagtatcagaatgaaagcaaggtttttttgatgttacctgactgtcataaagatgaaaatgatttgtattggtatgaaatgcttatctttattctacttcgtaagggtaagttttatttatactctttggactcccatgaacttttgcacactgctttgtgtttttggtttaccctaaactaccatcctttttatctttgctttttttcttcctattcagaaaagagcaaaatgtgaaaagacacaagactctcaggtatagaatgaactgagcaatttggagaatgtattggactttgtcctctcttattcccccctcctagccctgcaagttgctaggtacttgtgaggcagtgtactggagaggggagagcatggatcctggggtcaaagggcctttgcccccacccttacttggccctctacctgcaggtgaccactggcacattctcctgcttgtctcagcttcaggttcttcacctctaagatggggatgatgaaaacagtacctgtcatgcagaattgttgggaggattgataatttagatgtttatacatgtaatgtacttagatcagtgtctgctcttttcacttgatatccagtactatgtaagatagaaggtgcatgtcttctgtattctgtatttcccatttcttttgcgtgcagtctttgattcgtacaatagaaggaacacgtagaatgtatatttgtacattcatgtcaacatagtatttgaaattgctaccaaactcatttaatttggcataagactaacagatgaagtctctcatttgcttgaagatattttacaaaataccaactgttctatatttctttagaaaaagattatagttattaatattgatacctctgataatattttattcttaaatcttcagtgattccttttactatagattcatgacagctaattagtactaactgatttagaggtttcctttcccatcatatggaatgatgtaaagaaatcagatacaaactactgcaattagaaaataaaatatgaacaactttc

SEQ ID NO: 310437 - DNA, 3144 bp, Homo sapiens
ggatcttcggagcatgttggcctactgaaagatcgcggcgccatttgctgccgccgagcgtggacgcaggcggatctctgaagagctgggtcgccagcctctcccgcgcacgttgcctggcctccagcacctacttggtcccgcgcgctccctcgtgtcgcccctcggagcagcagccgccgcggtcgccgctacccggaaagaagtcagagacgccgcgaggtcgccgccaccgccatgcccaagaataaaggtaaaggaggtaaaaacagacgcaggggtaagaatgagaatgaatctgaaaaaagagaactggtattcaaagaggatggtcaggagtatgctcaggtaatcaaaatgttgggaaatggacggctagaagcaatgtgtttcgatggtgtaaagaggttatgtcacatcagaggaaaattgagaaaaaaggtttggataaatacctcggacattattttggttggtctccgagactaccaggataacaaagctgatgtaattttaaaatacaatgcagacgaagctagaagtctgaaggcatacggcgagcttccagagcatgctaaaatcaatgaaactgatacatttggtcctggagatgatgatgaaattcagtttgatgacattggagatgatgatgaagatattgatgacatctaaattgaactcaacattttacattccatcttttctgaagattgtcctacaatttggattttgatcatgacaaagaagattaaaatttcattagcatgaatgcaatttgttaaagcagactgatttgtttctaagatatttttggtttttttaaaactgataataatgctgaattatcttaagtgagatgttaagcccactttgttcttttaatgtaatggagcttatgggtagaagaccatgtctactaattacaaaaaaaaaaaaaaaccatgcattgctgcttttcctaccacttccagtaagaaaatgggtgttttgaagaaatcatttgccttgtcctcacggaatctgattaagccctggcctcttgattgtatagagtcattgtgtatattccagttacctagatattcccttgagattttgatacaatttgagggaggcagaagtctgcagttgaagaaaaaaaataagtctgtttgtcatatttaagtagcctgtggctatttttatactgattttgatatcatgttcttttcatagtcgtattttgccaccgtaaacataaaaaaaaaaaaaaagatttccaaaatgccgttttcagaacctgggttttaatagcagtattgaatttgtaagcttagtagttgcagaaattgaacactaggtggcactcagttatcttaacaggggaagtactgatacaattgttgacttttcttttactatgtgtaagaaataccccaaacatgaaaagattgttttgatcatatgcatgtatgtagaatatttttgcagagcagaaagattatgttagaagtgtgatttttattttcagaagtcatatacatgtaagctacaattttgagtgctttataaacacttaagatatatatataaattttaatttcatagcaacttgtaaaaaataaaatacttgttgaaaagcctttttcaacatatccctaagctaagggaagaggaaggaataacaactcagtgaaaagatggtctccagtttctgaatgaaaaagctacagctgagaaataaaataaaatgtcatgctgcagaatatgttatacccttattttgtgttaaggatatattttattatgtgaatggttttgtttttgttttttgtttttgttttttgcttgtattgggaattagctttactggtaacttccttatttagtttttagtggtcaactctaataaaatgaaactagggctgagctagttagccctcactagccaaactgaaactctatgcaacattaaaagaagagatccatcatgtagcttgtgacacttttattttattagtcaccggggaacttttcagtgatgaaaatacacagggtaataaaccttcacatggcttcaaaaggaaaacaagcaaatcttctctaatctactcttactataatttcctaagtgtacaccaaactctggatttaaaaatctgaagtactatagaacattaagttgaagaatggaaattaagagtacgtattcatggtttatatttcttattctatggagttcgtgaacacatctaggtggaatgcatctgagactaagggctggtttttaatcctcataagaaaccagccttgaagaattaacaattctcttcattggtattctaaacctcctaagatatttaggcttctgtacataaaagtgtttttgctaaatttacagtatatatagatcctttcatattattttactaagaatgtttgaactttgcatatttgatatagttcctggtaggaatagcacagctcaaacattagtttttctacttacctcctctaacacgtggtttgtctggagagtttctaaaaattcagctataaccccagttcatgtatttactggtgattgttcttgctgaggtagtaacagcccaatcttgggctgttaaatcctaggaaatctcgaatcatagtgattaaaatagttggggtaaagttgtagcttatatgcaatactacttggaggaattcttctactaatttgtatttaatgtggaaattgtatagtttcattgatttaatcataaataatggaaatggtctccaagaagttttatttttcatttttttgcttatacactctgattcctataatacagtgctataagctatgcacagaaaataaaatgtttgaaatccaaaaaaaaaaaggggcgcgccagaagaatcccctagggccacactatgcatcaccgcattttgtcacagaggccccaacgagagggataataaaaggcaggagcgagtacaacaactacaggagaaagcaaggtaatttgtatacacaactctggtcgtaattgagccacacaacaccacacacgaaactcactatgtaactcatgtgggcgtgttcagatctcagtagaatagtaaaatacagagataatgaacataacatagacaatcatactcacatccctatga

SEQ ID NO: 310438 - DNA, 1538 bp, Homo sapiens
ggatcttcggagcatgttggcctactgaaagatcgcggcgccatttgctgccgccgagcgtggacgcaggcggatctctgaagagctgggtcgccagcctctcccgcgcacgttgcctggcctccagcacctacttggtcccgcgcgctccctcgtgtcgcccctcggagcagcagccgccgcggtcgccgctacccggaaagaagtcagagacgccgcgaggtcgccgccaccgccatgcccaagaataaaggtaaaggaggtaaaaacagacgcaggggtaagaatgagaatgaatctgaaaaaagagaactggtattcaaagaggatggtcaggagtatgctcaggtaatcaaaatgttgggaaatggacggctagaagcaatgtgtttcgatggtgtaaagaggttatgtcacatcagaggaaaattgagaaaaaaggtttggataaatacctcggacattattttggttggtctccgagactaccaggataacaaagctgatgtaattttaaaatacaatgcagacgaagctagaagtctgaaggcatacggcgagcttccagagcatgctaaaatcaatgaaactgatacatttggtcctggagatgatgatgaaattcagtttgatgacattggagatgatgatgaagatattgatgacatctaaattgaactcaacattttacattccatcttttctgaagattgtcctacaatttggattttgatcatgacaaagaagattaaaatttcattagcatgaatgcaatttgttaaagcagactgatttgtttctaagatatttttggtttttttaaaactgataataatgctgaattatcttaagtgagatgttaagcccactttgttcttttaatgtaatggagcttatgggtagaagaccatgtctactaattacaaaaaaaaaaaaaaaccatgcattgctgcttttcctaccacttccagtaagaaaatgggtgttttgaagaaatcatttgccttgtcctcacggaatctgattaagccctggcctcttgattgtatagagtcattgtgtatattccagttacctagatattcccttgagattttgatacaatttgagggaggcagaagtctgcagttgaagaaaaaaaataagtctgtttgtcatatttaagtagcctgtggctatttttatactgattttgatatcatgttcttttcatagtcgtattttgccaccgtaaacataaaaaaaaaaaaaaagatttccaaaatgccgttttcagaacctgggttttaatagcagtattgaatttgtaagcttagtagttgcagaaattgaacactaggtggcactcagttatcttaacaggggaagtactgatacaattgttgacttttcttttactatgtgtaagaaataccccaaacatgaaaagattgttttgatcatatgcatgtatgtagaaaaaaaataagtctgtttgtcatatttaagtagcctgtggctatttttatactgattttgatatcatgttcttttcatag

SEQ ID NO: 310439 - DNA, 4397 bp, Homo sapiens
ggatcttcggagcatgttggcctactgaaagatcgcggcgccatttgctgccgccgagcgtggacgcaggcggatctctgaagagctgggtcgccagcctctcccgcgcacgttgcctggcctccagcacctacttggtcccgcgcgctccctcgtgtcgcccctcggagcagcagccgccgcggtcgccgctacccggaaagaagtcagagacgccgcgaggtcgccgccaccgccatgcccaagaataaaggtaaaggaggtaaaaacagacgcaggggtaagaatgagaatgaatctgaaaaaagagaactggtattcaaagaggatggtcaggagtatgctcaggtaatcaaaatgttgggaaatggacggctagaagcaatgtgtttcgatggtgtaaagaggttatgtcacatcagaggaaaattgagaaaaaaggtttggataaatacctcggacattattttggttggtctccgagactaccaggataacaaagctgatgtaattttaaaatacaatgcagacgaagctagaagtctgaaggcatacggcgagcttccagagcattttgatgacattggagatgatgatgaagatattgatgacatctaaattgaactcaacattttacattccatcttttctgaagattgtcctacaatttggattttgatcatgacaaagaagattaaaatttcattagcatgaatgcaatttgttaaagcagactgatttgtttctaagatatttttggtttttttaaaactgataataatgctgaattatcttaagtgagatgttaagcccactttgttcttttaatgtaatggagcttatgggtagaagaccatgtctactaattacaaaaaaaaaaaaaaaccatgcattgctgcttttcctaccacttccagtaagaaaatgggtgttttgaagaaatcatttgccttgtcctcacggaatctgattaagccctggcctcttgattgtatagagtcattgtgtatattccagttacctagatattcccttgagattttgatacaatttgagggaggcagaagtctgcagttgaagaaaaaaaataagtctgtttgtcatatttaagtagcctgtggctatttttatactgattttgatatcatgttcttttcatagtcgtattttgccaccgtaaacataaaaaaaaaaaaaaagatttccaaaatgccgttttcagaacctgggttttaatagcagtattgaatttgtaagcttagtagttgcagaaattgaacactaggtggcactcagttatcttaacaggggaagtactgatacaattgttgacttttcttttactatgtgtaagaaataccccaaacatgaaaagattgttttgatcatatgcatgtatgtagaatatttttgcagagcagaaagattatgttagaagtgtgatttttattttcagaagtcatatacatgtaagctacaattttgagtgctttataaacacttaagatatatatataaattttaatttcatagcaacttgtaaaaaataaaatacttgttgaaaagcctttttcaacatatccctaagctaagggaagaggaaggaataacaactcagtgaaaagatggtctccagtttctgaatgaaaaagctacagctgagaaataaaataaaatgtcatgctgcagaatatgttatacccttattttgtgttaaggatatattttattatgtgaatggttttgtttttgttttttgtttttgttttttgcttgtattgggaattagctttactggtaacttccttatttagtttttagtggtcaactctaataaaatgaaactagggctgagctagttagccctcactagccaaactgaaactctatgcaacattaaaagaagagatccatcatgtagcttgtgacacttttattttattagtcaccggggaacttttcagtgatgaaaatacacagggtaataaaccttcacatggcttcaaaaggaaaacaagcaaatcttctctaatctactcttactataatttcctaagtgtacaccaaactctggatttaaaaatctgaagtactatagaacattaagttgaagaatggaaattaagagtacgtattcatggtttatatttcttattctatggagttcgtgaacacatctaggtggaatgcatctgagactaagggctggtttttaatcctcataagaaaccagccttgaagaattaacaattctcttcattggtattctaaacctcctaagatatttaggcttctgtacataaaagtgtttttgctaaatttacagtatatatagatcctttcatattattttactaagaatgtttgaactttgcatatttgatatagttcctggtaggaatagcacagctcaaacattagtttttctacttacctcctctaacacgtggtttgtctggagagtttctaaaaattcagctataaccccagttcatgtatttactggtgattgttcttgctgaggtagtaacagcccaatcttgggctgttaaatcctaggaaatctcgaatcatagtgattaaaatagttggggtaaagttgtagcttatatgcaatactacttggaggaattcttctactaatttgtatttaatgtggaaattgtatagtttcattgatttaatcataaataatggaaatggtctccaagaagttttatttttcatttttttgcttatacactctgattcctataatacagtgctataagctatgcacagaaaataaaatgtttgaaatccaagaataatggttcttactgctaagagggagtaatagttattactaatgattttgattgggttgcatttttgttgcaatgtttattccacttgcagttagaatatgaatatgttttatcactagtgtggctaaataaccaaacatttgtgtaaaaaaaaaaaaaagccaagatttcattgtttgttgaatatttcttaagcatctggcccctaaagagaccgcttcttaccaagcctgtaaactatgcatgatggaaattcttgtattttatttaggaatggctgttggtttactcaccacatctgtggaatcatggctataaatgtttgcttacaaactctttgtgacttgtaatttaacttaatctcatctaatgtaaatattagattatgatgttcagtaacatcttccataggtataaactgctgtcattattgatttcagagtaactctgagtaatcaaataggtaaaagcatgttttgagtaaaatagctagatttatactttacttgtatacagacttaacaacaaccggtattgactggattgacagctaaagtatcagaatgaaagcaaggtttttttgatgttacctgactgtcataaagatgaaaatgatttgtattggtatgaaatgcttatctttattctacttcgtaagggtaagttttatttatactctttggactcccatgaacttttgcacactgctttgtgtttttggtttaccctaaactaccatcctttttatctttgctttttttcttcctattcagaaaagagcaaaatgtgaaaagacacaagactctcaggtatagaatgaactgagcaatttggagaatgtattggactttgtcctctcttattcccccctcctagccctgcaagttgctaggtacttgtgaggcagtgtactggagaggggagagcatggatcctggggtcaaagggcctttgcccccacccttacttggccctctacctgcaggtgaccactggcacattctcctgcttgtctcagcttcaggttcttcacctctaagatggggatgatgaaaacagtacctgtcatgcagaattgttgggaggattgataatttagatgtttatacatgtaatgtacttagatcagtgtctgctcttttcacttgatatccagtactatgtaagatagaaggtgcatgtcttctgtattctgtatttcccatttcttttgcgtgcagtctttgattcgtacaatagaaggaacacgtagaatgtatatttgtacattcatgtcaacatagtatttgaaattgctaccaaactcatttaatttggcataagactaacagatgaagtctctcatttgcttgaagatattttacaaaataccaactgttctatatttctttagaaaaagattatagttattaatattgatacctctgataatattttattcttaaatcttcagtgattccttttactatagattcatgacagctaattagtactaactgatttagaggtttcctttcccatcatatggaatgatgtaaagaaatcagatacaaactactgcaattagaaaataaaatatgaacaactttc

SEQ ID NO: 310440 - DNA, 1336 bp, Homo sapiens
ggatcttcggagcatgttggcctactgaaagatcgcggcgccatttgctgccgccgagcgtggacgcaggcggatctctgaagagctgggtcgccagcctctcccgcgcacgttgcctggcctccagcacctacttggtcccgcgcgctccctcgtgtcgcccctcggagcagcagccgccgcggtcgccgctacccggaaagaagtcagagacgccgcgaggtcgccgccaccgccatgcccaagaataaaggtaaaggaggtaaaaacagacgcaggggtaagaatgagaatgaatctgaaaaaagagaactggtattcaaagaggatggtcaggagtatgctcaggtaatcaaaatgttgggaaatggacggctagaagcaatgtgtttcgatggtgtaaagaggttatgtcacatcagaggaaaattgagaaaaaaggtttggataaatacctcggacattattttggttggtctccgagactaccaggataacaaagctgatgtaattttaaaatacaatgcagacgaagctagaagtctgaaggcatacggcgagcttccagagcatgctaaaatcaatgaaactgatacatttggtcctggagatgatgatgaaattcagtttgatgacattggagatgatgatgaagatattgatgacatctaaattgaactcaacattttacattccatcttttctgaagattgtcctacaatttggattttgatcatgacaaagaagattaaaatttcattagcatgaatgcaatttgttaaagcagactgatttgtttctaagatatttttggtttttttaaaactgataataatgctgaattatcttaagtgagatgttaagcccactttgttcttttaatgtaatggagcttatgggtagaagaccatgtctactaattacaaaaaacaccaaaaaccaggacatggaggcctttcccaaaccattctccagtgagaaactgtgggttgatatggcacgaaaaatcaatgatgcctggcaccctaagggaaactacgtgattaaagcccctgagtctctcatagaagtcggtatacgaagctcatagtgtattattcccagttaccctagaattccccttgacatactgctgtcatatcccaattttacaggacacggctaaaaccgtcttgcaacgtatgagaacaaaaaatacattaacttcgtgttgtgcacaacatgtacgatactacccgtgtagcataattatacagccggacattcgaacatagaactgtccgattacactaagtcggaattgggcgccacggtaagctttaataacacaaataga

SEQ ID NO: 310441 - DNA, 2655 bp, Homo sapiens
tggtgggtgggtgcctgccagcagctgaggcgccatggcggcggcagcggtgtcagagtcttggccggagctggagctggctgagcgcgagcggcggcgggagctgctgctgacggggcccgggctggaggagcgagtgcgggcggcgggtgggcagctgccgccgcggcttttcaccctgccgctgctgcactacttggaagtgagcggctgcgggagcttgcgcgcgccggggcctggcctggcgcagggcctgccgcagctgcacagcctcgtgctgcggcgcaacgcgctggggcccggcctgagccccgagctcgggccgctgcctgcccttcgggtgctcgacctgtcgggcaacgcgctggaggcgctgccgccgggccaaggcctgggccccgccgagccgccgggccttccgcagctgcagagcctcaacctcagcggcaaccggctgcgcgagctgccagccgacctggcgcgctgcgccccgcgcctgcagagcctcaacctcaccggcaattgcctagactcctttcccgccgagctctttcgccccggcgcgctgcccctgctcagtgaactggcggctgctgacaactgcctccgagaactcagccccgacatcgcccacctggcctcgctcaagacgttggacctctcgaacaaccagctgagcgagatccctgcagagcttgcggactgccccaagctcaaggagatcaatttccgtgggaacaagctgagggacaagcgcctggagaagatggtcagcggctgccagaccagatccatcctggagtacctgcgcgtcggaggccgtggtggcgggaagggcaagggccgtgccgagggctcggagaaggaagagagccggaggaagaggagggagaggaagcagaggcgggaaggtggtgatggggaggagcaggacgtgggagatgccggccggctgctgctcagggtcctgcacgtctctgaaaaccccgtacctctgacagtcagagtgagccccgaggtccgggatgtgcggccctacattgtgggggccgtggtgcgaggcatggacctgcagccagggaatgcactcaagcgcttcctcacctcgcagaccaagctccacgaagatctctgtgagaagaggacggctgccacccttgccacccacgagctccgtgccgtcaaagggcccctgctgtactgcgcccggcccccacaggacctcaagattgtccccttggggcggaaagaagccaaggccaaggagctggtgcggcagctgcagctggaggccgaggagcagaggaagcagaagaagcggcagagtgtgtcgggcctgcacagataccttcacttgctggatggaaatgaaaattacccgtgtcttgtggatgcagacggtgatgtgatttccttcccaccaataaccaacagtgagaagacaaaggttaagaaaacgacttctgatttgtttttggaagtaacaagtgccaccagtctgcagatttgcaaggatgtcatggatgccctcattctgaaaatggcagaaatgaaaaagtacactttagaaaataaagaggaaggatcactctcagatactgaagccgatgcagtctctggacaacttccagatcccacaacgaatcccagtgctggaaaggacgggccctcccttctggtggtggagcaggtccgggtggtggatctggaagggagcctgaaggtggtgtacccgtccaaggccgacctggccactgcccctccccacgtgactgtcgtgcgctgacgccagggccgcctgtccgcgtttgtttggccggttttgcggaggtttctatgcggcaatgctgaattatccgttagattttcaccccagtttttttgttggtttttttttttggagatggagtctcgctctgtcgccaggctggagtgcagtggcgtgatctcgagtcactgcagcctgtgtctcctgggttcaagcgattctcctgcctcagcctcccaagtagctgggactacaggtgtgtgccactaagctcagctaatttttgtatttttagtagagacggggtttcaccattttgaccaggatggtcttgatctcttgacctcatgatctgtccacctctgcccctcaaagtgctgggattacgtgatccacccgcctcagcctcccaaagtgctgggattacaggcgtgagctgtgcctggcccaccccagcattttttaagatgtatgtattcgttgttctgtttttccagatgattctgtcgtaaagtgatgctatgttgtcgttacaacatcaaagtgattttacggtttttgatgggattattcaagtgtcagaattaactgttcaaaatgttctgaatcatgtagatacatggcaggtaactgtttatgggagaaaagtacagtgctgttacgtggcactgtacagtcatgtgccacgtaacagcgtctgggtcagtgacggacacttacctgacagcggatccacaatattctcgtgcagtgtgtttggaatcctggtctgggctctcgtcgttggccttgtagatcaagtaggggaagtgagtgatgttcagtcatgctgctgggacacttggttttccagatgaaaacacataaataaaactacatgcaccatc

SEQ ID NO: 310442 - DNA, 313 bp, Homo sapiens
gcccaggggaaagtctcgtgcgccccgcagtggcagcgacagagcatggcgggccgagagtgactgtcgtgagagtcctgcctgcagcttggggaggaagggaacaggcatcacagccagggctttacaacttaaagctcagcctttatttacattttagttcaagatgggttctttgaaatctcaaatattatgtcagaattagagaaggaagaaagtctgctgattgataggttaagatagttttcctgatggtgattccacaaagtgagtgcctggctggccgggtggagaggagttggaggggagccct

SEQ ID NO: 310443 - DNA, 2926 bp, Homo sapiens
tggtgggtgggtgcctgccagcagctgaggcgccatggcggcggcagcggtgtcagagtcttggccggagctggagctggctgagcgcgagcggcggcgggagctgctgctgacggggcccgggctggaggagcgagtgcgggcggcgggtgggcagctgccgccgcggcttttcaccctgccgctgctgcactacttggaagtgagcggctgcgggagcttgcgcgcgccggggcctggcctggcgcagggcctgccgcagctgcacagcctcgtgctgcggcgcaacgcgctggggcccggcctgagccccgagctcgggccgctgcctgcccttcgggtgctcgacctgtcgggcaacgcgctggaggcgctgccgccgggccaaggcctgggccccgccgagccgccgggccttccgcagctgcagagcctcaacctcagcggcaaccggctgcgcgagctgccagccgacctggcgcgctgcgccccgcgcctgcagagcctcaacctcaccggcaattgcctagactcctttcccgccgagctctttcgccccggcgcgctgcccctgctcagtgaactggcggctgctgacaactgcctccgagaactcagccccgacatcgcccacctggcctcgctcaagacgttggacctctcgaacaaccagctgagcgagatccctgcagagcttgcggactgccccaagctcaaggagatcaatttccgtgggaacaagctgagggacaagcgcctggagaagatggtcagcggctgccagaccagatccatcctggagtacctgcgcgtcggaggccgtggtggcgggaagggcaagggccgtgccgagggctcggagaaggaagagagccggaggaagaggagggagaggaagcagaggcgggaaggtggtgatggggaggagcaggacgtgggagatgccggccggctgctgctcagggtcctgcacgtctctgaaaaccccgtacctctgacagtcagagtgagccccgaggtccgggatgtgcggccctacattgtgggggccgtggtgcgaggcatggacctgcagccagggaatgcactcaagcgcttcctcacctcgcagaccaagctccacgaagatctctgtgagaagaggacggctgccacccttgccacccacgagctccgtgccgtcaaagggcccctgctgtactgcgcccggcccccacaggacctcaagattgtccccttggggcggaaagaagccaaggccaaggagctggtgcggcagctgcagctggaggccgaggagcagaggaagcagaagaagcggcagagtgtgtcgggcctgcacagataccttcacttgctggatggaaatgaaaattacccgtgtcttgtggatgcagacggtgatgtgatttccttcccaccaataaccaacagtgagaagacaaaggttaagaaaacgacttctgatttgtttttggaagtaacaagtgccaccagtctgcagatttgcaaggatgtcatggatgccctcattctgaaaatggcagaaatgaaaaagtacactttagaaaataaagaggaaggatcactctcagatactgaagccgatgcagtctctggacaacttccagatcccacaacgaatcccagtgctggaaaggacgggccctcccttctggtggtggagcaggtccgggtggtggatctggaagggagcctgaaggtggtgtacccgtccaaggccgacctggccactgcccctccccacgtgactgtcgtgcgctgacgccagggccgcctgtccgcgtttgtttggccggttttgcggaggtttctatgcggcaatgctgaattatccgttagattttcaccccagtttttttgttggtttttttttttggagatggagtctcgctctgtcgccaggctggagtgcagtggcgtgatctcgagtcactgcagcctgtgtctcctgggttcaagcgattctcctgcctcagcctcccaagtagctgggactacaggtgtgtgccactaagctcagctaatttttgtatttttagtagagacggggtttcaccattttgaccaggatggtcttgatctcttgacctcatgatctgtccacctctgcccctcaaagtgctgggattacgtgatccacccgcctcagcctcccaaagtgctgggattacaggcgtgagctgtgcctggcccaccccagcattttttaagatgtatgtattcgttgttctgtttttccagatgattctgtcgtaaagtgatgctatgttgtcgttacaacatcaaagtgattttacggtttttgatgggattattcaagtgtcagaattaactgttcaaaatgttctgaatcatgtagatacatggcaggtaactgtttatgggagaaaagtacagtgctgttacgtggcactgtacagtcatgtgccacgtaacagcgtctgggtcagtgacggacacttacctgacagcggatccacaatattctcgtgcagtgtgtttggaatcctggtctgggctctcgtcgttggccttgtagatcaagtaggggaagtgagtgatgttcagtcatgctgctgggacacttggttttccagatgaaaacacataaataaaactacatgcaccatcaaaaaaaaaaaaaaaaaaaaaaaaaaaaaaaaaaaaaaaaaaaaagggggggcggccgggggggagtcaaaagaaattcgccgggaagctcgggagcaaggagggggattctacggggcggaaaaaaaagagggcgattaacacgagaggcgagcggaagattgagtaacacgagggggcccacaagggtggcccccaggagaaacttctgaggagcggggaaaacaagaagagagagaccacctaggagagatggaaagaagggcatgag

SEQ ID NO: 310444 - DNA, 376 bp, Homo sapiens
tccaggttaaaaaggtattttttatttgcagaaaatggcagaaatgaaaaagtacactttagaaaataaagaggaaggatcactctcagatactgaagccgatgcagtctctggacaacttccagatcccacaacgaatcccagtgctggaaaggacgggccctcccttctggtggtggagcaggtccgggtggtggatctggaagggagcctgaaggtggtgtacccgtccaaggccgacctggccactgcccctccccacgtgactgtcgtgcgctgacgccagggccgcctgtccgcgtttgtttggccggttttgcggaggtttctatgcggcaatgctgaattatccgttagattttcaccccagtttttt

SEQ ID NO: 310445 - DNA, 489 bp, Homo sapiens
tttaagatgtggtcgcgccatgttgcccaggctggagtgaggtggctaatcataggcgcagtcccactactgatcagcaccggagctttttgtcctgctctgtttctgacctgggctggttcactcctctttaggcagcctggtggtcctccactcccaggagctcaccatagtgatgacagacttagcgtagacactccattggcacagcacaccccagccaactcctgggcccatgcagccctcctgtctcagcctcctgagtgctgggaccacaggcacatgccaccacacccagcacagtgtttcttttataattatgcctggaatttgtatttcttcccatacagataccttcacttgctggatggaaatgaaaattacccgtgtcttgtggatgcagacggtgatgtgatttccttcccaccaataaccaacagtgagaagacaaaggtagggtggcatgtgtgtgaacatggtgtgtcttct

SEQ ID NO: 310446 - DNA, 531 bp, Homo sapiens
tttacaacttaaagctcagcctttatttacattttagttcaagatgggttctttgaaatctcaaatattatgtcagaattagagaaggaagaaagtctgctgattgataggttaagatagttttcctgatggtgattccacaaagtgagtgcctggctggccgggtggagaggagttggaggggagccctgtctcggaaaggggcgtggcgtggttgtgaagaccttggaccgggagggtttcctggcacacagcccagccaagggtgaagtgtggacacctcgctgggcttcagggcacaagagaccttgctcatcactgcttctgtgttacagaccaagctccacgaagatctctgtgagaagaggacggctgccacccttgccacccacgagctccgtgccgtcaaagggcccctgctgtactgcgcccggcccccacaggacctcaaggtgctgcagcctcctttgcagggtctgctgaagagtctccttggtgtcgaaagacgccatgctgctactgcagcccgaa

SEQ ID NO: 310447 - DNA, 443 bp, Homo sapiens
tttttttttttggagatggagtctcgctctgtcgccaggctggagtgcagtggcgtgatctcgagtcactgcagcctgtgtctcctgggttcaagcgattctcctgcctcagcctcccaagtagctgggactacaggtgtgtgccactaagctcagctaatttttgtatttttagtagagacggggtttcaccattttgaccaggatggtcttgatctcttgacctcatgatctgtccacctctgcccctcaaagtgctgggattacgtgatccacccgcctcagcctcccaaagtgctgggattacaggcgtgagctgtgcctggcccaccccagcattttttaagatgtatgtattcgttgttctgtttttccagatgattctgtcgtaaagtgatgctatgttgtcgttacaacatcaaagtgattttacggtttttgat

SEQ ID NO: 310448 - DNA, 355 bp, Homo sapiens
ctcctgcctgggtggggtgtggggctgagggaggccattggtccagcccctgtcctgtttcctgctgacttttcgccggagtcgtcccttttgctgccagtcaggccccctgctgtggcagtgatgtcctcctctgccttggctggctgggcccgccgtacctccttgctgtcgagtgtcctgggagcatgtctgtgaggcagatcctaacgtatttttcaaatacttctggagacacaagaggggattttggcccattataactggcacatttctgatgctttgggctcttcctgcctcttattttgtatttcgtatttatcttaccttttgtttgtttgtttgttttttgaga

SEQ ID NO: 310449 - DNA, 1739 bp, Homo sapiens
tccctgagacagagtttgctcttgttgcccaggctggagtttaatggcacgatcttggcttaccacaacctctgcctcctgggttcaagcaattctcctgcctcaggctcccaagtagctgggattacaggcatgtgccatcacacccggctaatttttgtatttttagtagagacagggtatctccatgttggtcaggctggtctcgaactcctgacctcaggtgatccgcccacttcagcctcccaaagtgctgggattacaggcgtgagccgtcatgcctggccgagttcagcttttattcacattttttccccgaagtgatttattcttcaaagtagacagttatgttctatagagtgttttgttttttctttaagaaaataatttacataaacagagattatggtaaacattttaaatcttaggctgttggttaaatttaatggtttaagcactgttgggttctctttaattaatatttgcagaaggagaacatatgtgtttcactgatatgtatggtccagaaaaattacttaattctcaaaaatatgttgcattctcatattgtgttagggaaaattccataagtagtctatttttttttttcttttgctgactgttaacatccaaacacctgaatgaaaactgactcatttctgtattggtgtttaaaaatattgatttgcagatgttcacagaacacttgcattttttgattcacattgctaaatcaaatgtaaaggcaaatatgtatatttaataaatgagaagtatttttttattactgaaatttattctcaaagcaaatgtattttgtagatgtttcatttgggagattttgctttgccttaaaacatacaaaataaacctgtcttgtggtctgcccacctcaaaacctctgttaacttgacatgtagaaggagttcagaattctttgataatgtgtggttttcacttttgtttggattaaacaaaaataaaattagagtccatagcactttgtaaactaatgtgaagtttcttgttgaatcataaaagctacctgtatgtactttataatttaatgttctgttagtaaaaattgtcagcattttatctttttctcttctcattacattttagtctccaatctttcccactctcagcagtcacagttttgcagagcaaaacatttttagaaactgaatatgtgtgagttctatataaaatgaatgtgttagtaacatccatctgctgatcaaggaggcattggatctggtactagaaggtgaaattgattgtagctatcaaagcattttatcaatgtaagtcaagaaaaaagaagaaaactgtgaacctctgatatttttaacataaaaactgttcccaatgagtgttctcttgctgattttgtgttaatgttattgtctatgatttttaagctaatgctaatataaaatctaaaatttcaacatgatgacaacaattcctgtagcctgtttttaccattaggatgtttttgaaaacagatgtcatcttagaaattatatttttaagtgcaaataaatcatcctgacttgaaagtcaacacattttatttttcattccgtagtatcacagaatatgctgcatttagatacaggtttaatttgccagattttctcaaaattctgtatttttatattgctacaactggtttacttaacatgcaattgaattgttatttaaataaattacatttgatggaaaaaaaaaaa

SEQ ID NO: 310450 - DNA, 783 bp, Homo sapiens
ttgggcctcctgcagttacgtgaaggtgcttcaggaaggagcatgaggtctgcactgtgctgcttaaccatcttagcttttcatacttacatctccctaatacttggtacaggagaagtgaatgttgcggacagagcgtctcctggcacccttcctccagcagtttccaaatggctcactcgtgttgttttatcatgcccgaatagagttgctgaaagggaatcttgaagaggcacaagaagtatttcaaaaatgcatttcagttcaagaagaatggaaacagtttcaccatctctgctactgggagctaatgtggattaatgttttccaacaaaactggatgcaggcatattactattcagatctgctttgcaaagagagtaaatggtccaaggcaacttatgtgttcttgaaagcagcaattttgagtatgcttccagaggaggatgtagtagcaacgaatgagaatgtggtaactttattcagacaggtggacagcttgaagcagagaattgccgggaaatctatccctactgagaagtttgctgtgaggaaggctcggcgttactccgcctccttacctgcacctgtgaagctcatcttacctgccctggtatctgcttttattttcttttcatgtactagaaataaattacctactcacagcagcagggagcatatctaaatttggttatgaagtttagctcatttaaaaaccattgtaggttttgttgtaagttgaacatttctaaataaataattaataaataaaaactgtagcta

SEQ ID NO: 310451 - DNA, 2445 bp, Homo sapiens
ttgggcctcctgcagttacgtgaaggtgcttcaggaaggagcatgaggtctgcactgtgctgcttaaccatcttagcttttcatacttacatctccctaatacttggtacaggagaagtgaatgttgcggacagagcgtctcctggcacccttcctccagcagtttccaaatggctcactcgtgttgttttatcatgcccgaatagagttgctgaaagggaatcttgaagaggcacaagaagtatttcaaaaatgcatttcagttcaagaagaatggaaacagtttcaccatctctgctactgggagctaatgtggattaatgttttccaacaaaactggatgcaggcatattactattcagatctgctttgcaaagagagtaaatggtccaaggcaacttatgtgttcttgaaagcagcaattttgagtatgcttccagaggaggatgtagtagcaacgaatgagaatgtggtaactttattcaggttcccaggtgatgctgctgctgctgctggtggtctgtgaagttcactgtgaaaaccacaggtacaaataatgtatgtgttgccatgacctttctctggggctgggctggggttcttcacagacaggtggacagcttgaagcagagaattgccgggaaatctatccctactgagaagtttgctgtgaggaaggctcggcgttactccgcctccttacctgcacctgtgaagctcatcttacctgccctggaaatgatgtatgtctggaatggtttttcaatagtgagcaaaagaaaagacctttctgaaaatctgttagtaactgttgaaaaagctgaggcagctttacaaagtcaaaattttaacagcttctctgtggatgatgagtgcttagtgaagttacttaaaggatgttgcctcaagaacttacagcggcccttgcaagctgaactatgttacaatcatgttgtggaaagtgaaaagctactgaagtatgaccactacctagtgccgttcactctatttgaattggcatctttgtataaaagccagggggaaattgacaaggccataaagttcctagaaactgcaaggaacaactacaaagattactccctggagtccagactacacttcagaattcaggcagctcttcacctctggagaaaaccttcctcagattgatcagaacttgaaggatggaatttttcctcaattagcatcggcatctgctatagattcaaccttatattaaagtggaaaaatgatcttgtgaataagagacaaaaaaacagtttttttggtcaatattttctatcatctgagagatttactgttggtctacataattttttttcctatggaatggcattctatattatctagaaaattcttatattttgcctcccccaaaagaatttcatattatttgaattagggggcgaagaagtcttttgaaagacttgcagatgcaatagtctaattagattatttatttttttaatgtgaaaattaatattgtttagcaaatagcttacaagttgagccaattttggatttgttgggtagttaaacttcagagatattttgttgcctgtatttaaatttcagaagataaataaatatcattgcatttaaaatagcttaacagtgaccttcagaagacttctgaaaaagacagtctgagaacatgaacacggatcgatataatgtacttcatgggttgaagagacctttctctataaaggatgatgcagtattcagttagtggttttttactcttcatttgattaaaggtggtgacgttttggagagactgattttgaatgtacttaagtctattataataacaaaattcaaaacccctgtgtatctaaagggaaggaagtgtcatattttaggaatttttcttaaccttagcaatgagagcctaaaatacatacatggattatttttcttctaggaagtaaatttcctgctgctttaaatgatatgtaaaatatcaataatttttacacttaagatgttggtaagacctagttttctaatctctctagcactgtgatgtctccttgtagataatctggaccttgcttagtcctttagttgggaaacagaatcagggcatagagcagaagagagcttgacactccatatggtcctggttctgctacccattagcgattagtgaggagacctttagggagtccactgtgccctgtgtgtcaccacattttcttctgtgaaatcaagattaaagaacagatgactttcaaggtctttttcagttttataactgtgagtctatgtattaggtatttattttcaacaaatgactttaaaatgtcgaatgcaaaccattcccacttggagtgttttatttttcaatcatcatcattgcccccaactccccacatgtatgtgttgtggcatccagagtgagaaaagacaatttatgag

SEQ ID NO: 310452 - DNA, 2323 bp, Homo sapiens
ttgggcctcctgcagttacgtgaaggtgcttcaggaaggagcatgaggtctgcactgtgctgcttaaccatcttagcttttcatacttacatctccctaatacttggtacaggagaagtgaatgttgcggacagagcgtctcctggcacccttcctccagcagtttccaaatggctcactcgtgttgttttatcatgcccgaatagagttgctgaaagggaatcttgaagaggcacaagaagtatttcaaaaatgcatttcagttcaagaagaatggaaacagtttcaccatctctgctactgggagctaatgtggattaatgttttccaacaaaactggatgcaggcatattactattcagatctgctttgcaaagagagtaaatggtccaaggcaacttatgtgttcttgaaagcagcaattttgagtatgcttccagaggaggatgtagtagcaacgaatgagaatgtggtaactttattcagacaggtggacagcttgaagcagagaattgccgggaaatctatccctactgagaagtttgctgtgaggaaggctcggcgttactccgcctccttacctgcacctgtgaagctcatcttacctgccctggaaatgatgtatgtctggaatggtttttcaatagtgagcaaaagaaaagacctttctgaaaatctgttagtaactgttgaaaaagctgaggcagctttacaaagtcaaaattttaacagcttctctgtggatgatgagtgcttagtgaagttacttaaaggatgttgcctcaagaacttacagcggcccttgcaagctgaactatgttacaatcatgttgtggaaagtgaaaagctactgaagtatgaccactacctagtgccgttcactctatttgaattggcatctttgtataaaagccagggggaaattgacaaggccataaagttcctagaaactgcaaggaacaactacaaagattactccctggagtccagactacacttcagaattcaggcagctcttcacctctggagaaaaccttcctcagattgatcagaacttgaaggatggaatttttcctcaattagcatcggcatctgctatagattcaaccttatattaaagtggaaaaatgatcttgtgaataagagacaaaaaaacagtttttttggtcaatattttctatcatctgagagatttactgttggtctacataattttttttcctatggaatggcattctatattatctagaaaattcttatattttgcctcccccaaaagaatttcatattatttgaattagggggcgaagaagtcttttgaaagacttgcagatgcaatagtctaattagattatttatttttttaatgtgaaaattaatattgtttagcaaatagcttacaagttgagccaattttggatttgttgggtagttaaacttcagagatattttgttgcctgtatttaaatttcagaagataaataaatatcattgcatttaaaatagcttaacagtgaccttcagaagacttctgaaaaagacagtctgagaacatgaacacggatcgatataatgtacttcatgggttgaagagacctttctctataaaggatgatgcagtattcagttagtggttttttactcttcatttgattaaaggtggtgacgttttggagagactgattttgaatgtacttaagtctattataataacaaaattcaaaacccctgtgtatctaaagggaaggaagtgtcatattttaggaatttttcttaaccttagcaatgagagcctaaaatacatacatggattatttttcttctaggaagtaaatttcctgctgctttaaatgatatgtaaaatatcaataatttttacacttaagatgttggtaagacctagttttctaatctctctagcactgtgatgtctccttgtagataatctggaccttgcttagtcctttagttgggaaacagaatcagggcatagagcagaagagagcttgacactccatatggtcctggttctgctacccattagcgattagtgaggagacctttagggagtccactgtgccctgtgtgtcaccacattttcttctgtgaaatcaagattaaagaacagatgactttcaaggtctttttcagttttataactgtgagtctatgtattaggtatttattttcaacaaatgactttaaaatgtcgaatgcaaaccattcccacttggagtgttttatttttcaatcatcatcattgcccccaactccccacatgtatgtgttgtggcatccagagtgagaaaagacaatttatgag

SEQ ID NO: 310453 - DNA, 694 bp, Homo sapiens
ttccagtgccctgatgcccaggcttttcatgataatgaaaattaattctgatccacttatgagaagttggagggcaatgagataattttttcttgttcattctgtccactttctcacctatgaatgctgtagttgtataataggaaaatggtttaaattatgggtaattgaaaagagttgttgtcattttgaacagggaatataagatttcatttcctctgatttctttaatgcctctaattttatatctggaagacttgttggtcattcctgatttgaaaggtagaaatgtcatttacctagggatgttctgtaataagctccttctttttctcaaggcaacttatgtgttcttgaaagcagcaattttgagtatgcttccagaggaggatgtagtagcaacgaatgagaatgtggtaactttattcaggtatgtgagacactattcctataacaaaggctctgagggtataaaggggcaaaatctcatctctactgaaaatacaaaaaattagctgggcctggtggcatgtgcttgtagtcccagctacttgggaagcttaggtgggaggattgcttaagcctgggaggtggaggttgcaagtgagctgaaataatgccattgcactgcagcctgggtgacagacagagtgagactctgtctccaaaaaaaaaccatgtatattaactgtag

SEQ ID NO: 310454 - DNA, 3327 bp, Homo sapiens
taaatctagcttgccactctgtgccttttaagtggggcatttgcccatttacattcaaggctagtatcgatttgtgtagatttgatcttgtcattgtgctgttggctggttattatgttggcttttttgtgtggttgctttatagtgtcaccggtctgtgtgtttaagtatgtttttgcattagcgtgtagtggtctttcctttctatatttagtcctcctttctaaaatctcttgtaaggcagatgtggtggtaatgaattacctcagaatttgcttgtctgtaaatgatctcatttctccttcatttagaaagcttagtttagctgtatatgaaattcttggttgaagattttctttaataatgttaaatatagtcccccaatcccttctggcttgtaggatttcagctgagagatctgctgttagcctaatggggttccctttgtagatggcctgccctttctctctggctgcctttaacatattttccctcatttcgaccttggaaaacctgatgtttatgtgtcttgaggatggtcttgtgtagaatcttgtaggagttctttgtatctcctgaatttgactgttggcctttctagcaaggttagggaagctttcaaagatgatatcctgaactacgttttccaagttgtttgatttctccacctccctttcagagatgccagtgatttgtagaattggcctctttatataatcccatcctccttgaaggttttgttcattcttttttatttttgtccatcttattttagagaaccaatcttcaagttctgagattcgttcctcagatttttttttctgctgttaatacttgtgattgcattgtggaattcttgtattgtgttcttcggcgctttcagatcggttaggttcttttttattataccagctactttatccttcagctcctgtaacactttactgttattcttattttcctcggattgggttttgccattctcctgagtcttgatgattttttttcctatccatattctgaattatatttatgtaattccagacagttcatccaggttaagaactcttgttggagaactggtgtggttgttagaaggacatatgacacagaggccatttgagttactggagttcttgcattggtttcttctcatttccacctatgggttttcctttaattgcagtgtagattgagtacagtccgtagacttattttcggatgttttcaccaggctgaggctttgtgcagggtctttatttgaagctgacttctcatttctggtttcagaggggagtatattagtaaggtatttttgatgctgaagctttgggatgtgatccagtaggtggcacttgggcttactggtcagttggtagactcttgcttggtcatgtggctcccctatgtttccttacagttgcagccatgttccctctcaatgatctgaaaatgtgcttctctcccccttgagtgctggctgtaggtcatggcttggcactcctaggctgcccactgcagctctggggcaatctcagtgtttatatttctttcctaactttgaggcagaagaggaagggacattagtagtggttgtagccaagggtcttttgtttgtctcctcagagttccaccacccctggagaatacagcaactgtttactgcaatcagcaatcaggatggagaattcgtgctgtgggggccaatccaggggttccctgtcatgagcagtggggagtgtgtagaacccatgagagatgggctttggtcaattaaagcttgttgaaggtgtagataagggtgttagctccttcatcagtctgagggtagcaaggacagttccactgcagaagcagtggcagagaggctttcagttgcccctggaggctctctccagggagtggctgagttgctactggctcaacagttctggtagggggggttaggtagaggtccaggcctgcaagacttgcctagtgagaagatataggaatgggaacccaggtaacagtctggccacttttccatagggctgctgcagtatgcccagggcccgctccagtctctagtagcctcagattttccagtacctggagttatcatcagtgaagcctgtgaaacagcaaagatggcagcctaccgctccctttggaagctttgccctagggaggtatgaatgaacttgttgctggcccaaacacacctgtaggaggtggctggagaccccagtttggaggttttgcccagtgaggaggaatggcattgggaaagtgcttaaaaacgcagtctggcctcatttttatagagcagctgtggtatgctgagggtccacatcaccccctggtctccttggacactccaaagactgaaggttgaagtggctaagttgcaaaaacagcaaagatggtggcctgcccctccatcagggagctccagcccagaaaaaattgaaatcactgtcagcaggagaacaccagtgggggtggttggaggccccagcttggaagttgcaaacttatcgaggaagtcatgattggagaagacaaactcattcacttttctggggttgcccttggtgaggcttgtaccattgttttgcgtggtgccactcaacaaattttagatgaagcagaaagatcattgcatgatgctctttgtgttcttgcgcaaactgtaaaggactctagaacagtttatggaggaggctgttctgagatgttgatggctcatgctgtgacacagcttgccaatagaacaccaggcaaagaagctgttgcaatggagtcttatgctaaagcactgagaatgttgccaaccatcatagctgacaatgcaggctatgacagtgcagacctggtggcacagctcagggctgctcacagtgaaggcaataccactgctggattggatatgagggaaggcaccattggagatatggctatcctgggtataacagaaagttttcaagtgaagcgacaggttcttctgagtgcagctgaagcagcagaggtgattctgcgtgtggacaacatcatcaaagcggcacccaggaaacgtgtccctgatcaccacccctgttaagcattcccacgtgctgtcgatctttggaccagtttctagcaaagttgtgtttgaaagatactctattaaagaagactgtggaatctgtttatcggtgcccattatatccttaagtttggatatttagctgaccttcgctttaacataggtctaatttatttgccgtgtcattttccatacaaatcagttgatttaaaaaagttcatttctcatactgtgcattaaaataaaaatttgaacaatta

SEQ ID NO: 310455 - DNA, 927 bp, Homo sapiens
cgaagtagggcgtgtggcgtcacttccggcttccttcagtccgctggtcccgagcacgagctgtgaggggattcacttgtgtgcggaactcctcggaaccatggcgtccctttcccttgcacctgttaacatctttaaggcaggagctgatgaagagagagcagagacagctcgtctgacttcttttattggtgccatcgccattggagacttggtaaagagcaccttgggacccaaaggcatggacaaaattcttctaagcagtggacgagatgcctctcttatggtaaccaatgatggtgccactattctaaaaaacattggtgttgacaatccagcagctaaagttttagttgatatgtcaagggttcaagatgatgaagttggtgatggcactacctctgttaccgttttagcagcagaattattaagggaagcagaatctttaattgcaaaaaagattcatccacagaccatcatagcgggttggagagaagccacgaaggctgcaagagaggcgctgttgagttctgcagttgatcatggttccgatgaagttaaattccgtcaagatttaatgaatattgcgggcacaacattatcctcaaaacttcttactcatcacaaagaccactttacaaagttagctgtagaagcagttctcagactgaaaggctctggcaacctggaggcaattcatattatcaagaagctaggaggaagtttggcagattcctatttagatgaagggttcctgttgggataaaacaaaattggggtaaatcaacccaaaaacgaacttgaaaaatggctaaaaattccttaattgcaaaatacccgggcatggcatacagaccaacctcaccgacattggagacgccgcgtcacaagttgaactctccccccaacgtcgcacaaccacacgcg

SEQ ID NO: 310456 - DNA, 707 bp, Homo sapiens
acggggtttcaccatgtttgccaggctggtctccaactcctgaccttaggtgatctacctgcctcagcctcccaaagtgctgggagtacagatgtgagccgctgcacccggccccttttaatttttttaaaggctttctttgagctcgtttgtaggcttatctacctactgagtaaagtagttgggtgtcctaattttattaataggattaatttttattataaatcattagagatgttttgatactttagttaaaactgctttttagtaaatttgtttttctttgcagatatgagggaaggcaccattggagatatggctatcctgggtataacagaaagttttcaagtgaagcgacaggttcttctgagtgcagctgaagcagcagaggtgattctgcgtgtggacaacatcatcaaagcggcacccaggaaacgtgtccctgatcaccacccctgttaagcattcccacgtgctgtcgatctttggaccagtttctagcaaagttgtgtttgaaagatactctattaaagaagactgtggaatctgtttatcggtgcccattatatccttaagtttggatatttagctgaccttcgctttaacataggtctaatttatttgccgtgtcattttccatacaaatcagttgatttaaaaaagttcatttctcatactgtgcattaaaataaaaatttgaacaatta

SEQ ID NO: 310457 - DNA, 903 bp, Homo sapiens
ggggtttcaccatgttgctcaggctggtcttgaactgacctcaagtgatccatcctcctcagtctcccaaagtgctaggattacaggcgtgagccactgtgcccggccatttctcacattcttgccaacattagacttttgcatgcttgtgtggcccccacccctcttttttttggcattttgcagtttggtggggaaaataacatctttaatttgtgtttcttgattactgctgaggtttaattcttttcatatagcttacagacttgatcagttagggtaaaattatctattgacatgaatatctagataaattttgaaaagtaaagtagggttaatatgtatatttggttggttttatttagttccgatgaagttaaattccgtcaagatttaatgaatattgcgggcacaacattatcctcaaaacttcttactcatcacaaagaccactttacaaagttagctgtagaagcagttctcagactgaaaggctctggcaacctggaggcaattcatattatcaagaagctaggaggaagtttggcagattcctatttagatgaaggcttcctgttggataaaaaaattggagtaaatcaaccaaaacgaattgaaaatgctaaaattcttattgcaaatactggtatggatacagacaaaataaagatatttggttcccgggtaagagttgactctacagcaaaggttgcagaaatagaacatgcggaaaaggaaaaaatgaaggagaaagttgaacgtattcttaagcatggaataaattgctttattaacaggcatttattttttatttttctcaacacgctctttggcgcttgtgggacaggtttatagacccacaatttttcggcggggggagaccactttcttttacaaagggtg

SEQ ID NO: 310458 - DNA, 1162 bp, Homo sapiens
gtggcacgacttcggctgactgcaacctctgcctcccgggttcaagcgattctcttgcctcagcctcccaagtagcagggactacagttccgatgaagttaaattccgtcaagatttaatgaatattgcgggcacaacattatcctcaaaacttcttactcatcacaaagaccactttacaaagttagctgtagaagcagttctcagactgaaaggctctggcaacctggaggcaattcatattatcaagaagctaggaggaagtttggcagattcctatttagatgaaggtatgtatgaatgtcagatacaagaagctttgattagatgctgagggctgaatactgagtgaattctgttttgagaccagtgaccctttacaaagccagtgaacttgaatttaaggacatatcatatgtgcaaccatttttgtcattttattgacagtgtactcctcttcccgcgctattccagcattgttgatgatctctagagtttacttaactaccatgaagttatttgcagtctctgataaagaggaaatgttttcttttactagaaatcatctattctcaaatggtacttttaccaggattatatgtattctccaggaagggtctgggtcagtcaaatcattgtgttagctggttgttgaggatgtacagttgaccattgaacaacatgggtttgaattatgtaggttcacaatgcaggttttttcaataaatatagtcagccctttgtgtccgtggtttgcacatgtgcaaccgaacgtggatggaaaatgcagtatttgcaggatttgaaacccatgtatatagtgggccaacttttcaaatctgctggttccagtcagcctggaacttaagtatgtggggattttggtgtatgtgggcgtcttggaaccagtccccttcgtatactgggggatgactagttttttttagaaaagaattaaaaaaaatttctttaacaaataattatgtatgtttatagggcaagaggatctagttcttaaagagtgataaatgagacataataagtactgctttcttagtagtacatttttgtttagagtgaagttttccagatcatcttcacattatatttacttcacaaaatggcctgtcaaaaagtataggcattcttatatagagaagga

SEQ ID NO: 310459 - DNA, 991 bp, Homo sapiens
  misc_feature (19)..(19): n is a, c, g, or t
aggggttttacaaggttgnaataaaggtttcaaagaattatcttaagtgatctaacttccttaatctaaaaaaaaatagtattaaatattataaaaaaaataaataaagtaaaaatgttctcaatctaatagaatatttaagtaaaaattaggggatttttctactgagtaaagtagttgggtgtcctaattttattaataggattaatttttattataaatcattagagatgttttgatactttagttaaaactgctttttagtaaatttgtttttctttgcagatatgagggaaggcaccattggagatatggctatcctgggtataacagaaagttttcaagtgaagcgacaggttcttctgagtgcagctgaagcagcagaggtgattctgcgtgtggacaacatcatcaaagcggcacccaggtaccctaacacttttctcagaaaaaattactaacagcaaaacaaaatagggagctgtatttattttataattagagttaatgaaaagcagagacagttttgcctggataaaagtatgtaagttatttaaaatatcacaactcttaacacttaagccagaaaaacttaaggggaaagagggatgggcagctgaggtagctcttaggattgaaaaggcacagaaagagccatgcttggaaaggtcaagtactgaggacagtagatgctgtgatgctttctattgtctttaaacagaatgatagcaaaaggaaactgagttctgtaactaaagtgttctagggcaaggtcatatagccacacctactcccagaaatcttcacaagaagtcagtgccctcacccacagttgaaataacgcttaaaaaatgtataataccttgtttggtctgatactgttttagagatcaggtatcttttattagcaaattctgagtaatttgcaataaagaaactgaattttaactcagccttccagacctaccagaccatgggcttctttttcata

SEQ ID NO: 310460 - DNA, 916 bp, Homo sapiens
gtgccgctttgatgatgttgtccacacgcagaatcacctctgctgcttcagctgcacccaggaaacgtgtccctgatcaccacccctgttaagcattcccacgtgctgtcgatctttggaccagtttctagcaaagttgtgtttgaaagatactctattaaagaagactgtggaatctgtttatcggtgcccattatatccttaagtttggatatttagctgaccttcgctttaacataggtctaatttatttgccgtgtcattttccatacaaatcagttgatttaaaaaagttcatttctcatactgtgcattaaaataaaaatttgaacaattaaaaaaaaaaaaggagaaaaaaaaaaaaaaaaaaaaaaaaaaaaaaaaaaaaaaaaaaaaaaaaaaaaaaaaaaggggggggggccgccacaaaaatcccccccgggggggccaccaatacaagcaccccccaccaccatcgtctttagtaaacaaagggggcacccacataaggagggcagcatataataaacaccaccgcacacaggacgccgcgggcataaaaaacaagaagcactgggacaaaaccgcggcgacaccggcgagaactcttctgggacgaggcaacaccacaaacatacgaggcgggcggagcaccacacaataagtcgaagacccagccgcacgcagcaaaaggtattaaaacagaccgccaaaggagcgggaagaatactaaacaaactgccgcgccgcacgagacaacaggcgcgcaacaacccccccacagcacaatacacctacgccgccccgccgcatcaagacaacttgtcagcggccacacacaagcgacagagacatttacccagaaggagaatattatatatccaccgggagcgcgcagaacaccaatcaaacccgg

SEQ ID NO: 310461 - DNA, 616 bp, Homo sapiens
ggatgttgttactgtgatttttttgtgtaatgtcctgagggccattaagcctttaaaatgtggcacagctctcaccagccttgtgtttatctctgctcttgcaggactgtcatagcccagattctcaaccatccctgatcccctacaatgagttctctagttgtgttttgcttccaaaattattctactggacatgcctgcatccaatgccaattgacttaatcaacattgtccatttgtgtgttgcattctgatctcacctcgtgccgaattcggcacgagcctggaggcaattcatattatcaagaagctaggaggaagtttggcagattcctatttagatgaaggcttcctgttggataaaaaaattggagtaaatcaaccaaaacgaattgaaaatgctaaaattcttattgcaaatactggtatggatacagacaaaataaagatatttggttcccgggtaagagttgactctacagcaaaggttgcagaaatagaacatgcggaaaagggagcaattaattatattatcctgacagtttttgggctgctgtgtatggctattgacatgcatatttgcagggtggaacccctactctggcacaagtgtgaa

SEQ ID NO: 310462 - DNA, 506 bp, Homo sapiens
tgtttctttttttttgcggtaaaacccccacctgcagaggctgtgactggccccagagactatacgctattggctgctgcgggtctgggcgggcctggagccagaaggcgacttatgatgtctctcctatgccaccccaggggggcagggacattgtagacttggaaagagcaccttgggacccaaaggcatggacaaaattcttctaagcagtggacgagatgcctctcttatggtaaccaatgatggtgccactattctaaaaaacattggtgttgacaatccagcagctaaagttttagttgatatgtcaagggttcaagatgatgaagttggtgatggcactacctctgttaccgttttagcagcagaattattaaggcacgcagacttttaattgccgattccaccccaggccatcatgcgggttggagagccccaccaagcttgcagcgagcccctgtagtcctcccccccccatcgtcccacggtccctctcgtcattg

SEQ ID NO: 310463 - DNA, 153 bp, Homo sapiens
ttaattattttataatttaattatggctgtattgatagtttctttccattgtttttgcagttacggtgttgaaacaaaaactagtgtctacctgtgcttctagtgtttctaggggtagatacatggtttggttacgtggtgtatgtattgaaa

SEQ ID NO: 310464 - DNA, 1953 bp, Homo sapiens
cgaagtagggcgtgtggcgtcacttccggcttccttcagtccgctggtcccgagcacgagctgtgaggggattcacttgtgtgcggaactcctcggaaccatggcgtccctttcccttgcacctgttaacatctttaaggcaggagctgatgaagagagagcagagacagctcgtctgacttcttttattggtgccatcgccattggagacttggtaaagagcaccttgggacccaaaggcatggacaaaattcttctaagcagtggacgagatgcctctcttatggtaaccaatgatggtgccactattctaaaaaacattggtgttgacaatccagcagctaaagttttagttgatatgtcaagggttcaagatgatgaagttggtgatggcactacctctgttaccgttttagcagcagaattattaagggaagcagaatctttaattgcaaaaaagattcatccacagaccatcatagcgggttggagagaagccacgaaggctgcaagagaggcgctgttgagttctgcagttgatcatggttccgatgaagttaaattccgtcaagatttaatgaatattgcgggcacaacattatcctcaaaacttcttactcatcacaaagaccactttacaaagttagctgtagaagcagttctcagactgaaaggctctggcaacctggaggcaattcatattatcaagaagctaggaggaagtttggcagattcctatttagatgaaggcttcctgttggataaaaaaattggagtaaatcaaccaaaacgaattgaaaatgctaaaattcttattgcaaatactggtatggatacagacaaaataaagatatttggttcccgggtaagagttgactctacagcaaaggttgcagaaatagaacatgcggaaaaggaaaaaatgaaggagaaagttgaacgtattcttaagcatggaataaattgctttattaacaggcaattaatttataattatcctgaacagctctttggtgctgctggtgtcatggctattgagcatgcagattttgcaggtgtggaacgcctagctcttgtcacaggtggtgaaattgcctctacctttgatcacccagaactggtgaagcttggaagttgcaaacttatcgaggaagtcatgattggagaagacaaactcattcacttttctggggttgcccttggtgaggcttgtaccattgttttgcgtggtgccactcaacaaattttagatgaagcagaaagatcattgcatgatgctctttgtgttcttgcgcaaactgtaaaggactctagaacagtttatggaggaggctgttctgagatgttgatggctcatgctgtgacacagcttgccaatagaacaccaggcaaagaagctgttgcaatggagtcttatgctaaagcactgagaatgttgccaaccatcatagctgacaatgcaggctatgacagtgcagacctggtggcacagctcagggctgctcacagtgaaggcaataccactgctggattggatatgagggaaggcaccattggagatatggctatcctgggtataacagaaagttttcaagtgaagcgacaggttcttctgagtgcagctgaagcagcagaggtgattctgcgtgtggacaacatcatcaaagcggcacccaggaaacgtgtccctgatcaccacccctgttaagcattcccacgtgctgtcgatctttggaccagtttctagcaaagttgtgtttgaaagatactctattaaagaagactgtggaatctgtttatcggtgcccattatatccttaagtttggatatttagctgaccttcgctttaacataggtctaatttatttgccgtgtcattttccatacaaatcagttgatttaaaaaagttcatttctcatactgtgcattaaaataaaaatttgaacaatta

SEQ ID NO: 310465 - DNA, 2532 bp, Homo sapiens
cgaagtagggcgtgtggcgtcacttccggcttccttcagtccgctggtcccgagcacgagctgtgaggggattcacttgtgtgcggaactcctcggaaccatggcgtccctttcccttgcacctgttaacatctttaaggcaggagctgatgaagagagagcagagacagctcgtctgacttcttttattggtgccatcgccattggagacttggtaaagagcaccttgggacccaaaggcatggacaaaattcttctaagcagtggacgagatgcctctcttatggtaaccaatgatggtgccactattctaaaaaacattggtgttgacaatccagcagctaaagttttagttgatatgtcaagggttcaagatgatgaagttggtgatggcactacctctgttaccgttttagcagcagaattattaagggaagcagaatctttaattgcaaaaaagattcatccacagaccatcatagcgggttggagagaagccacgaaggctgcaagagaggcgctgttgagttctgcagttgatcatggttccgatgaagttaaattccgtcaagatttaatgaatattgcgggcacaacattatcctcaaaacttcttactcatcacaaagaccactttacaaagttagctgtagaagcagttctcagactgaaaggctctggcaacctggaggcaattcatattatcaagaagctaggaggaagtttggcagattcctatttagatgaaggcttcctgttggataaaaaaattggagtaaatcaaccaaaacgaattgaaaatgctaaaattcttattgcaaatactggtatggatacagacaaaataaagatatttggttcccgggtaagagttgactctacagcaaaggttgcagaaatagaacatgcggaaaaggaaaaaatgaaggagaaagttgaacgtattcttaagcatggaataaattgctttattaacaggcaattaatttataattatcctgaacagctctttggtgctgctggtgtcatggctattgagcatgcagattttgcaggtgtggaacgcctagctcttgtcacaggtggtgaaattgcctctacctttgatcacccagaactggtgaagcttggaagttgcaaacttatcgaggaagtcatgattggagaagacaaactcattcacttttctggggttgcccttggtgaggcttgtaccattgttttgcgtggtgccactcaacaaattttagatgaagcagaaagatcattgcatgatgctctttgtgttcttgcgcaaactgtaaaggactctagaacagtttatggaggaggctgttctgagatgttgatggctcatgctgtgacacagcttgccaatagaacaccaggcaaagaagctgttgcaatggagtcttatgctaaagcactgagaatgttgccaaccatcatagctgacaatgcaggctatgacagtgcagacctggtggcacagctcagggctgctcacagtgaaggcaataccactgctggattggatatgagggaaggcaccattggagatatggctatcctgggtataacagaaagttttcaagtgaagcgacaggttcttctgagtgcagctgaagcagcagaggtgattctgcgtgtggacaacatcatcaaagcggcacccaggaaacgtgtccctgatcaccacccctgttaagcattcccacgtgctgtcgatctttggaccagtttctagcaaagttgtgtttgaaagatactctattaaagaagactgtggaatctgtttatcggtgcccattatatccttaagtttggatatttagctgaccttcgctttaacataggtctaatttatttgccgtgtcattttccatacaaatcagttgatttaaaaaagttcatttctcatactgtgcattaaaataaaaatttgaacaattaaaaaaaaaaaaggagaaaaaaaaaaaaaaaaaaaaaaaaaaaaaaaaaaaaaaaaaaaaaaaaaaaaaaaaaaggggggggggccgccacaaaaatcccccccgggggggccaccaatacaagcaccccccaccaccatcgtctttagtaaacaaagggggcacccacataaggagggcagcatataataaacaccaccgcacacaggacgccgcgggcataaaaaacaagaagcactgggacaaaaccgcggcgacaccggcgagaactcttctgggacgaggcaacaccacaaacatacgaggcgggcggagcaccacacaataagtcgaagacccagccgcacgcagcaaaaggtattaaaacagaccgccaaaggagcgggaagaatactaaacaaactgccgcgccgcacgagacaacaggcgcgcaacaacccccccacagcacaatacacctacgccgccccgccgcatcaagacaacttgtcagcggccacacacaagcgacagagacatttacccagaaggagaatattatatatccaccgggagcgcgcagaacaccaatcaaacccgg

SEQ ID NO: 310466 - DNA, 2195 bp, Homo sapiens
ggcgtgcggcctgcgccaggccagccggtggagctcaccacgagggggaggggtggaccgcaaagccagcgtctccttgtgcctaggtctttgcatagtcccggcagcccaggtccgcgcctcacccggagcgaagaaatttctagtgtgggacccgctccgccctccttctaggggcggagcctggagcgacggggtctgagccatcagagggtggaggggccgcagccttccgagggtggaagatggaggccgcgttccctcgcccgcccggcaggcgtcaccttgatggcctgcaacccctccctgcctcattcttagttcaagatcgtctttagtctcgctgcgtccctttcccttgcacctgttaacatctttaaggcaggagctgatgaagagagagcagagacagctcgtctgacttcttttattggtgccatcgccattggagacttggtaaagagcaccttgggacccaaaggcatggacaaaattcttctaagcagtggacgagatgcctctcttatggtaaccaatgatggtgccactattctaaaaaacattggtgttgacaatccagcagctaaagttttagttgatatgtcaagggttcaagatgatgaagttggtgatggcactacctctgttaccgttttagcagcagaattattaagggaagcagaatctttaattgcaaaaaagattcatccacagaccatcatagcgggttggagagaagccacgaaggctgcaagagaggcgctgttgagttctgcagttgatcatggttccgatgaagttaaattccgtcaagatttaatgaatattgcgggcacaacattatcctcaaaacttcttactcatcacaaagaccactttacaaagttagctgtagaagcagttctcagactgaaaggctctggcaacctggaggcaattcatattatcaagaagctaggaggaagtttggcagattcctatttagatgaaggcttcctgttggataaaaaaattggagtaaatcaaccaaaacgaattgaaaatgctaaaattcttattgcaaatactggtatggatacagacaaaataaagatatttggttcccgggtaagagttgactctacagcaaaggttgcagaaatagaacatgcggaaaaggaaaaaatgaaggagaaagttgaacgtattcttaagcatggaataaattgctttattaacaggcaattaatttataattatcctgaacagctctttggtgctgctggtgtcatggctattgagcatgcagattttgcaggtgtggaacgcctagctcttgtcacaggtggtgaaattgcctctacctttgatcacccagaactggtgaagcttggaagttgcaaacttatcgaggaagtcatgattggagaagacaaactcattcacttttctggggttgcccttggtgaggcttgtaccattgttttgcgtggtgccactcaacaaattttagatgaagcagaaagatcattgcatgatgctctttgtgttcttgcgcaaactgtaaaggactctagaacagtttatggaggaggctgttctgagatgttgatggctcatgctgtgacacagcttgccaatagaacaccaggcaaagaagctgttgcaatggagtcttatgctaaagcactgagaatgttgccaaccatcatagctgacaatgcaggctatgacagtgcagacctggtggcacagctcagggctgctcacagtgaaggcaataccactgctggattggatatgagggaaggcaccattggagatatggctatcctgggtataacagaaagttttcaagtgaagcgacaggttcttctgagtgcagctgaagcagcagaggtgattctgcgtgtggacaacatcatcaaagcggcacccaggaaacgtgtccctgatcaccacccctgttaagcattcccacgtgctgtcgatctttggaccagtttctagcaaagttgtgtttgaaagatactctattaaagaagactgtggaatctgtttatcggtgcccattatatccttaagtttggatatttagctgaccttcgctttaacataggtctaatttatttgccgtgtcattttccatacaaatcagttgatttaaaaaagttcatttctcatactgtgcattaaaataaaaatttgaacaatta

SEQ ID NO: 310467 - DNA, 2212 bp, Homo sapiens
cgaagtagggcgtgtggcgtcacttccggcttccttcagtccgctggtcccgagcacgagctgtgaggggattcacttgtgtgcggaactcctcggaaccatggtctttgcatagtcccggcagcccaggtccgcgcctcacccggagcgaagaaatttctagtgtgggacccgctccgccctccttctaggggcggagcctggagcgacggggtctgagccatcagagggtggaggggccgcagccttccgagggtggaagatggaggccgcgttccctcgcccgcccggcaggcgtcaccttgatggcctgcaacccctccctgcctcattcttagttcaagatcgtctttagtctcgctgcgtccctttcccttgcacctgttaacatctttaaggcaggagctgatgaagagagagcagagacagctcgtctgacttcttttattggtgccatcgccattggagacttggtaaagagcaccttgggacccaaaggcatggacaaaattcttctaagcagtggacgagatgcctctcttatggtaaccaatgatggtgccactattctaaaaaacattggtgttgacaatccagcagctaaagttttagttgatatgtcaagggttcaagatgatgaagttggtgatggcactacctctgttaccgttttagcagcagaattattaagggaagcagaatctttaattgcaaaaaagattcatccacagaccatcatagcgggttggagagaagccacgaaggctgcaagagaggcgctgttgagttctgcagttgatcatggttccgatgaagttaaattccgtcaagatttaatgaatattgcgggcacaacattatcctcaaaacttcttactcatcacaaagaccactttacaaagttagctgtagaagcagttctcagactgaaaggctctggcaacctggaggcaattcatattatcaagaagctaggaggaagtttggcagattcctatttagatgaaggcttcctgttggataaaaaaattggagtaaatcaaccaaaacgaattgaaaatgctaaaattcttattgcaaatactggtatggatacagacaaaataaagatatttggttcccgggtaagagttgactctacagcaaaggttgcagaaatagaacatgcggaaaaggaaaaaatgaaggagaaagttgaacgtattcttaagcatggaataaattgctttattaacaggcaattaatttataattatcctgaacagctctttggtgctgctggtgtcatggctattgagcatgcagattttgcaggtgtggaacgcctagctcttgtcacaggtggtgaaattgcctctacctttgatcacccagaactggtgaagcttggaagttgcaaacttatcgaggaagtcatgattggagaagacaaactcattcacttttctggggttgcccttggtgaggcttgtaccattgttttgcgtggtgccactcaacaaattttagatgaagcagaaagatcattgcatgatgctctttgtgttcttgcgcaaactgtaaaggactctagaacagtttatggaggaggctgttctgagatgttgatggctcatgctgtgacacagcttgccaatagaacaccaggcaaagaagctgttgcaatggagtcttatgctaaagcactgagaatgttgccaaccatcatagctgacaatgcaggctatgacagtgcagacctggtggcacagctcagggctgctcacagtgaaggcaataccactgctggattggatatgagggaaggcaccattggagatatggctatcctgggtataacagaaagttttcaagtgaagcgacaggttcttctgagtgcagctgaagcagcagaggtgattctgcgtgtggacaacatcatcaaagcggcacccaggaaacgtgtccctgatcaccacccctgttaagcattcccacgtgctgtcgatctttggaccagtttctagcaaagttgtgtttgaaagatactctattaaagaagactgtggaatctgtttatcggtgcccattatatccttaagtttggatatttagctgaccttcgctttaacataggtctaatttatttgccgtgtcattttccatacaaatcagttgatttaaaaaagttcatttctcatactgtgcattaaaataaaaatttgaacaatta

SEQ ID NO: 310468 - DNA, 2241 bp, Homo sapiens
cgaagtagggcgtgtggcgtcacttccggcttccttcagtccgctggtcccgagcacgagctgtgaggggattcacttgtgtgcggaactcctcggaaccatggcgtccctttcccttgcacctgttaacatctttaaggcaggagctgatgaagagagagcagagacagctcgtctgacttcttttattggtgccatcgccattggagacttggtaaagagcaccttgggacccaaaggcatggacaaaattcttctaagcagtggacgagatgcctctcttatggtaaccaatgatggtgccactattctaaaaaacattggtgttgacaatccagcagctaaagttttagttgatatgtcaagggttcaagatgatgaagttggtgatggcactacctctgttaccgttttagcagcagaattattaagggaagcagaatctttaattgcaaaaaagattcatccacagaccatcatagcgggttggagagaagccacgaaggctgcaagagaggcgctgttgagttctgcagttgatcatggttccgatgaagttaaattccgtcaagatttaatgaatattgcgggcacaacattatcctcaaaacttcttactcatcacaaagaccactttacaaagttagctgtagaagcagttctcagactgaaaggctctggcaacctggaggcaattcatattatcaagaagctaggaggaagtttggcagattcctatttagatgaaggcttcctgttggataaaaaaattggagtaaatcaaccaaaacgaattgaaaatgctaaaattcttattgcaaatactggtatggatacagacaaaataaagatatttggttcccgggtaagagttgactctacagcaaaggttgcagaaatagaacatgcggaaaaggaaaaaatgaaggagaaagttgaacgtattcttaagcatggaataaattgctttattaacaggcaattaatttataattatcctgaacagctctttggtgctgctggtgtcatggctattgagcatgcagattttgcaggtgtggaacgcctagctcttgtcacaggtggtgaaattgcctctacctttgatcacccagaactggtgaagcttggaagttgcaaacttatcgaggaagtcatgattggagaagacaaactcattcacttttctggggttgcccttggtgaggcttgtaccattgttttgcgtggtgccactcaacaaattttagatgaagcagaaagatcattgcatgatgctctttgtgttcttgcgcaaactgtaaaggactctagaacagtttatggaggaggctgttctgagatgttgatggctcatgctgtgacacagcttgccaatagaacaccaggcaaagaagctgttgcaatggagtcttatgctaaagcactgagaatgttgccaaccatcatagctgacaatgcaggctatgacagtgcagacctggtggcacagctcagggctgctcacagtgaaggcaataccactgctggattggatatgagggaaggcaccattggagatatggctatcctgggtataacagaaagttttcaagtgaagcgacaggttcttctgagtgcagctgaagcagcagaggtgattctgcgtgtggacaacatcatcaaagcggcacccaggtaccctaacacttttctcagaaaaaattactaacagcaaaacaaaatagggagctgtatttattttataattagagttaatgaaaagcagagacagttttgcctggataaaagtatgtaagttatttaaaatatcacaactcttaacacttaagccagaaaaacttaaggggaaagagggatgggcagctgaggtagctcttaggattgaaaaggcacagaaagagccatgcttggaaaggtcaagtactgaggacagtagatgctgtgatgctttctattgtctttaaacagaatgatagcaaaaggaaactgagttctgtaactaaagtgttctagggcaaggtcatatagccacacctactcccagaaatcttcacaagaagtcagtgccctcacccacagttgaaataacgcttaaaaaatgtataataccttgtttggtctgatactgttttagagatcaggtatcttttattagcaaattctgagtaatttgcaataaagaaactgaattttaactcagccttccagacctaccagaccatgggcttctttttcata

SEQ ID NO: 310469 - DNA, 1772 bp, Homo sapiens
ggggtttcaccatgttgctcaggctggtcttgaactgacctcaagtgatccatcctcctcagtctcccaaagtgctaggattacaggcgtgagccactgtgcccggccatttctcacattcttgccaacattagacttttgcatgcttgtgtggcccccacccctcttttttttggcattttgcagtttggtggggaaaataacatctttaatttgtgtttcttgattactgctgaggtttaattcttttcatatagcttacagacttgatcagttagggtaaaattatctattgacatgaatatctagataaattttgaaaagtaaagtagggttaatatgtatatttggttggttttatttagttccgatgaagttaaattccgtcaagatttaatgaatattgcgggcacaacattatcctcaaaacttcttactcatcacaaagaccactttacaaagttagctgtagaagcagttctcagactgaaaggctctggcaacctggaggcaattcatattatcaagaagctaggaggaagtttggcagattcctatttagatgaaggcttcctgttggataaaaaaattggagtaaatcaaccaaaacgaattgaaaatgctaaaattcttattgcaaatactggtatggatacagacaaaataaagatatttggttcccgggtaagagttgactctacagcaaaggttgcagaaatagaacatgcggaaaaggaaaaaatgaaggagaaagttgaacgtattcttaagcatggaataaattgctttattaacaggcaattaatttataattatcctgaacagctctttggtgctgctggtgtcatggctattgagcatgcagattttgcaggtgtggaacgcctagctcttgtcacaggtggtgaaattgcctctacctttgatcacccagaactggtgaagcttggaagttgcaaacttatcgaggaagtcatgattggagaagacaaactcattcacttttctggggttgcccttggtgaggcttgtaccattgttttgcgtggtgccactcaacaaattttagatgaagcagaaagatcattgcatgatgctctttgtgttcttgcgcaaactgtaaaggactctagaacagtttatggaggaggctgttctgagatgttgatggctcatgctgtgacacagcttgccaatagaacaccaggcaaagaagctgttgcaatggagtcttatgctaaagcactgagaatgttgccaaccatcatagctgacaatgcaggctatgacagtgcagacctggtggcacagctcagggctgctcacagtgaaggcaataccactgctggattggatatgagggaaggcaccattggagatatggctatcctgggtataacagaaagttttcaagtgaagcgacaggttcttctgagtgcagctgaagcagcagaggtgattctgcgtgtggacaacatcatcaaagcggcacccaggaaacgtgtccctgatcaccacccctgttaagcattcccacgtgctgtcgatctttggaccagtttctagcaaagttgtgtttgaaagatactctattaaagaagactgtggaatctgtttatcggtgcccattatatccttaagtttggatatttagctgaccttcgctttaacataggtctaatttatttgccgtgtcattttccatacaaatcagttgatttaaaaaagttcatttctcatactgtgcattaaaataaaaatttgaacaatta

SEQ ID NO: 310470 - DNA, 1495 bp, Homo sapiens
acggtgatctgcgtgtggacaacatcatcaaagcggcacccaggaaacgtgtccctgatcacctgttgagttctgcagttgatcatggttccgatgaagttaaattccgtcaagatttaatgaatattgcgggcacaacattatcctcaaaacttcttactcatcacaaagaccactttacaaagttagctgtagaagcagttctcagactgaaaggctctggcaacctggaggcaattcatattatcaagaagctaggaggaagtttggcagattcctatttagatgaaggcttcctgttggataaaaaaattggagtaaatcaaccaaaacgaattgaaaatgctaaaattcttattgcaaatactggtatggatacagacaaaataaagatatttggttcccgggtaagagttgactctacagcaaaggttgcagaaatagaacatgcggaaaaggaaaaaatgaaggagaaagttgaacgtattcttaagcatggaataaattgctttattaacaggcaattaatttataattatcctgaacagctctttggtgctgctggtgtcatggctattgagcatgcagattttgcaggtgtggaacgcctagctcttgtcacaggtggtgaaattgcctctacctttgatcacccagaactggtgaagcttggaagttgcaaacttatcgaggaagtcatgattggagaagacaaactcattcacttttctggggttgcccttggtgaggcttgtaccattgttttgcgtggtgccactcaacaaattttagatgaagcagaaagatcattgcatgatgctctttgtgttcttgcgcaaactgtaaaggactctagaacagtttatggaggaggctgttctgagatgttgatggctcatgctgtgacacagcttgccaatagaacaccaggcaaagaagctgttgcaatggagtcttatgctaaagcactgagaatgttgccaaccatcatagctgacaatgcaggctatgacagtgcagacctggtggcacagctcagggctgctcacagtgaaggcaataccactgctggattggatatgagggaaggcaccattggagatatggctatcctgggtataacagaaagttttcaagtgaagcgacaggttcttctgagtgcagctgaagcagcagaggtgattctgcgtgtggacaacatcatcaaagcggcacccaggaaacgtgtccctgatcaccacccctgttaagcattcccacgtgctgtcgatctttggaccagtttctagcaaagttgtgtttgaaagatactctattaaagaagactgtggaatctgtttatcggtgcccattatatccttaagtttggatatttagctgaccttcgctttaacataggtctaatttatttgccgtgtcattttccatacaaatcagttgatttaaaaaagttcatttctcatactgtgcattaaaataaaaatttgaacaatta

SEQ ID NO: 310471 - DNA, 1254 bp, Homo sapiens
cgaagtagggcgtgtggcgtcacttccggcttccttcagtccgctggtcccgagcacgagctgtgaggggattcacttgtgtgcggaactcctcggaaccatggcgtccctttcccttgcacctgttaacatctttaaggcaggagctgatgaagagagagcagagacagctcgtctgacttcttttattggtgccatcgccattggagacttggtaaagagcaccttgggacccaaaggcatggacaaaattcttctaagcagtggacgagatgcctctcttatggtaaccaatgatggtgccactattctaaaaaacattggtgtcatggctattgagcatgcagattttgcaggtgtggaacgcctagctcttgtcacaggtggtgaaattgcctctacctttgatcacccagaactggtgaagcttggaagttgcaaacttatcgaggaagtcatgattggagaagacaaactcattcacttttctggggttgcccttggtgaggcttgtaccattgttttgcgtggtgccactcaacaaattttagatgaagcagaaagatcattgcatgatgctctttgtgttcttgcgcaaactgtaaaggactctagaacagtttatggaggaggctgttctgagatgttgatggctcatgctgtgacacagcttgccaatagaacaccaggcaaagaagctgttgcaatggagtcttatgctaaagcactgagaatgttgccaaccatcatagctgacaatgcaggctatgacagtgcagacctggtggcacagctcagggctgctcacagtgaaggcaataccactgctggattggatatgagggaaggcaccattggagatatggctatcctgggtataacagaaagttttcaagtgaagcgacaggttcttctgagtgcagctgaagcagcagaggtgattctgcgtgtggacaacatcatcaaagcggcacccaggaaacgtgtccctgatcaccacccctgttaagcattcccacgtgctgtcgatctttggaccagtttctagcaaagttgtgtttgaaagatactctattaaagaagactgtggaatctgtttatcggtgcccattatatccttaagtttggatatttagctgaccttcgctttaacataggtctaatttatttgccgtgtcattttccatacaaatcagttgatttaaaaaagttcatttctcatactgtgcattaaaataaaaatttgaacaatta

SEQ ID NO: 310472 - DNA, 1183 bp, Homo sapiens
cgaagtagggcgtgtggcgtcacttccggcttccttcagtccgctggtcccgagcacgagctgtgaggggattcacttgtgtgcggaactcctcggaaccatggcgtccctttcccttgcacctgttaacatctttaaggcaggagctgatgaagagagagcagagacagctcgtctgacttcttttattggtgccatcgccattggagacttggtaaagagcaccttgggacccaaaggcatggacaaaattcttctaagcagtggacgagatgcctctcttatggtaaccaatgatggtgccactattctaaaaaacattggtgttgacaatccagcagctaaagttttagttgatatgtcaagggttcaagatgatgaagttggtgatggcactacctctgttaccgttttagcagcagaattattaagggaagcagaatctttaattgcaaaaaagattcatccacagaccatcatagcgggttggagagaagccacgaaggctgcaagagaggcgctgttgagttctgcagttgatcatggttccgatgaagttaaattccgtcaagatttaatgaatattgcgggcacaacattatcctcaaaacttcttactcatcacaaagaccactttacaaagttagctgtagaagcagttctcagactgaaaggctctggcaacctggaggcaattcatattatcaagaagctaggaggaagtttggcagattcctatttagatgaaggcttcctgttggataaaaaaattggagtaaatcaaccaaaacgaattgaaaatgctaaaattcttattgcaaatactggtatggatacagacaaaataaaggtatgtaactctactttttaaaaattaaaattactgcccaggcagagtggctcatgcctgtaatcctagcaatttgggaggccaaggtggtggatcatctgagatcagaagtttgagaccagcctgaccaacatggagaaaccctgtctctactaaaaaaaaaaaaatacaaaattagctgggcatggtggcgcatgcctgtaatcccagctattcgggaggctgaggcaggagaatcacttgaacccaggaggcggaggttgcactgagccgagattgtgctactgcactcgagcctgggcaacaagagtgaaactccgtctcaaaagtctc

SEQ ID NO: 310473 - DNA, 1621 bp, Homo sapiens
cgaagtagggcgtgtggcgtcacttccggcttccttcagtccgctggtcccgagcacgagctgtgaggggattcacttgtgtgcggaactcctcggaaccatggcgtccctttcccttgcacctgttaacatctttaaggcaggagctgatgaagagagagcagagacagctcgtctgacttcttttattggtgccatcgccattggagacttggtaaagagcaccttgggacccaaaggcatggacaaaattcttctaagcagtggacgagatgcctctcttatggtaaccaatgatggtgccactattctaaaaaacattggtgttgacaatccagcagctaaagttttagttgatatgtcaagggttcaagatgatgaagttggtgatggcactacctctgttaccgttttagcagcagaattattaagggaagcagaatctttaattgcaaaaaagattcatccacagaccatcatagcgggttggagagaagccacgaaggctgcaagagaggcgctgttgagttctgcagttgatcatggttccgatgaagttaaattccgtcaagatttaatgaatattgcgggcacaacattatcctcaaaacttcttactcatcacaaagaccactttacaaagttagctgtagaagcagttctcagactgaaaggctctggcaacctggaggcaattcatattatcaagaagctaggaggaagtttggcagattcctatttagatgaaggtatgtatgaatgtcagatacaagaagctttgattagatgctgagggctgaatactgagtgaattctgttttgagaccagtgaccctttacaaagccagtgaacttgaatttaaggacatatcatatgtgcaaccatttttgtcattttattgacagtgtactcctcttcccgcgctattccagcattgttgatgatctctagagtttacttaactaccatgaagttatttgcagtctctgataaagaggaaatgttttcttttactagaaatcatctattctcaaatggtacttttaccaggattatatgtattctccaggaagggtctgggtcagtcaaatcattgtgttagctggttgttgaggatgtacagttgaccattgaacaacatgggtttgaattatgtaggttcacaatgcaggttttttcaataaatatagtcagccctttgtgtccgtggtttgcacatgtgcaaccgaacgtggatggaaaatgcagtatttgcaggatttgaaacccatgtatatagtgggccaacttttcaaatctgctggttccagtcagcctggaacttaagtatgtggggattttggtgtatgtgggcgtcttggaaccagtccccttcgtatactgggggatgactagttttttttagaaaagaattaaaaaaaatttctttaacaaataattatgtatgtttatagggcaagaggatctagttcttaaagagtgataaatgagacataataagtactgctttcttagtagtacatttttgtttagagtgaagttttccagatcatcttcacattatatttacttcacaaaatggcctgtcaaaaagtataggcattcttatatagagaagga

SEQ ID NO: 310474 - DNA, 948 bp, Homo sapiens
gtaactcttttcactaagctttttttttcttttggaacataaagagttacaataaccgtataaaagactcttttggactttgtcctcataatcattacatgtgctgggaaaatgtgtgtgactttatatgctcagcatttcccaaactttgttattccataagacatgtaaaactggttagaagatttgtaactatttggtatataacgactataggatttaaatgtaaacaatacttacattctgaaaaataacataaactattatgttgtttatacaatcagtattaacttctaatttcatagtaaacttactgcaagataatcttgagtacagatcacagatctctagtccatagataaaagtggccaatgaggcagatttaattcatattgaaaaactttctgacaagctgtgctggacattatagagtagtcttaagaaggtagataatcctgtcattgaacaagagggagcaccagttaatctgtgagaaaatgaagcaggattctcacaagaagagaagttggatatgagggaaggcaccattggagatatggctatcctgggtataacagaaagttttcaagtgaagcgacaggttcttctgagtgcagctgaagcagcagaggtgattctgcgtgtggacaacatcatcaaagcggcacccaggaaacgtgtccctgatcaccacccctgttaagcattcccacgtgctgtcgatctttggaccagtttctagcaaagttgtgtttgaaagatactctattaaagaagactgtggaatctgtttatcggtgcccattatatccttaagtttggatatttagctgaccttcgctttaacataggtctaatttatttgccgtgtcattttccatacaaatcagttgatttaaaaaagttcatttctcatactgtgcattaaaataaaaatttgaacaatta

SEQ ID NO: 310475 - DNA, 653 bp, Homo sapiens
acggggtttcaccatgtttgccaggctggtctccaactcctgaccttaggtgatctacctgcctcagcctcccaaagtgctgggagtacagatgtgagccgctgcacccggccccttttaatttttttaaaggctttctttgagctcgtttgtaggcttatctacctactgagtaaagtagttgggtgtcctaattttattaataggattaatttttattataaatcattagagatgttttgatactttagttttggagatatggctatcctgggtataacagaaagttttcaagtgaagcgacaggttcttctgagtgcagctgaagcagcagaggtgattctgcgtgtggacaacatcatcaaagcggcacccaggaaacgtgtccctgatcaccacccctgttaagcattcccacgtgctgtcgatctttggaccagtttctagcaaagttgtgtttgaaagatactctattaaagaagactgtggaatctgtttatcggtgcccattatatccttaagtttggatatttagctgaccttcgctttaacataggtctaatttatttgccgtgtcattttccatacaaatcagttgatttaaaaaagttcatttctcatactgtgcattaaaataaaaatttgaacaatta

SEQ ID NO: 310476 - DNA, 1383 bp, Homo sapiens
  misc_feature (1015)..(1015): n is a, c, g, or t
  misc_feature (1017)..(1017): n is a, c, g, or t
  misc_feature (1021)..(1021): n is a, c, g, or t
  misc_feature (1170)..(1170): n is a, c, g, or t
  misc_feature (1383)..(1383): n is a, c, g, or t
ggcgtgcggcctgcgccaggccagccggtggagctcaccacgagggggaggggtggaccgcaaagccagcgtctccttgtgcctaggtctttgcatagtcccggcagcccaggtccgcgcctcacccggagcgaagaaatttctagtgtgggacccgctccgccctccttctaggggcggagcctggagcgacggggtctgagccatcagagggtggaggggccgcagccttccgagggtggaagatggaggccgcgttccctcgcccgcccggcaggcgtcaccttgatggcctgcaacccctccctgcctcattcttagttcaagatcgtctttagtctcgctgcgtccctttcccttgcacctgttaacatctttaaggcaggagctgatgaagagagagcagagacagctcgtctgacttcttttattggtgccatcgccattggagacttggtaaagagcaccttgggacccaaaggcatggacaaaattcttctaagcagtggacgagatgcctctcttatggtaaccaatgatggtgccactattctaaaaaacattggtgttgacaatccagcagctaaagttttagttgatatgtcaagggttcaagatgatgaagttggtgatggcactacctctgttaccgttttagcagcagaattattaagggaagcagaatctttaattgcaaaaaagattcatccacagaccatcatagcgggttggagagaagccacgaaggctgcaagagaggcgctgttgagttctgcagttgatcatggttccgatgaagttaaattccgtcaagatttaatgaatattgcgggcacaacattatcctcaaaacttcttactcatcacaaagaccactttacaaagttagctgtagaagcagttctcagactgaaaggctctggcaacctggaggcaattcatattatcaagaagctaggaggaagtttggcagattcctatttagatgaagggttcctgttgggataaaactggngnaaancaccccaccgtcttccactgctccccaccctcgtttgcgccactcgcggctggtccccgcgccccaaacgcatctcgtggtccccggcgaggaagatgactcctcaacccaacgggtggcgacaacaacagtgggcgacggcaatcagntgatggagacgcaaacgacagtcatgtccagcaaacagatttttatagcacgcgagaattatcccacacacagtagcgttggtgtcgcatgcccaccaatgcatggcaaccacatcgcagtaagatagtaccacacagcacgtagccgcagactaatacctatatgcatgtgctgctatctttatctctacttctttattccatcctgctcgn

SEQ ID NO: 310477 - DNA, 905 bp, Homo sapiens
taagctaccaagggtgaaaagtttatctctctatatgatccctgtataatgctgtactctttgatctgttcttaagcttcttcagcttctcgtaactgttgtgtttgcctctaaaagcagtgtttctcaagctttagatccttgaacaagcattaagtacaaatttactagtacccttatcccatctttccaaaagattgttctatgcccccttattgtatggtcatcaaagaataaaagatgagaatagaaggtgcttcttgttggtgggggtgtctgcagagtcccaaggcagaacagtcctgatgtggtgcagggcatcacacagaggagggggctgagtggctagctcaggtctgtcttcctcctcacctaaagccagcagtcccatcctatataacccattagtccatgacataacttggtcacctcttaaaagcccaacttccaatactgccacattggggattcagtttcaatgtgagtgttataggggacacacatgcaaaccattgcagagttataacagttttaatacaggattctagttgtgtttgtatttagtataatactttggataaaatcatgctcttcatttttcactattgacttttttcttactctcataggaaacgtgtccctgatcaccacccctgttaagcattcccacgtgctgtcgatctttggaccagtttctagcaaagttgtgtttgaaagatactctattaaagaagactgtggaatctgtttatcggtgcccattatatccttaagtttggatatttagctgaccttcgctttaacataggtctaatttatttgccgtgtcattttccatacaaatcagttgatttaaaaaagttcatttctcatactgtgcattaaaataaaaatttgaacaatta

SEQ ID NO: 310478 - DNA, 844 bp, Homo sapiens
atgtgagtcttatagtgcacacacatgcaaaccattgcagacttataacagtcttaatacacgattctacttgtgtttgtaaacactataacacttaggatcaatcatgctcactcagttctcactacccacttcgttcctactctcccccttattgtatggtcatcaaagaataaaagatgagaatagaaggtgcttcttgttggtgggggtgtctgcagagtcccaaggcagaacagtcctgatgtggtgcagggcatcacacagaggagggggctgagtggctagctcaggtctgtcttcctcctcacctaaagccagcagtcccatcctatataacccattagtccatgacataacttggtcacctcttaaaagcccaacttccaatactgccacattggggattcagtttcaatgtgagtgttataggggacacacatgcaaaccattgcagagttataacagttttaatacaggattctagttgtgtttgtatttagtataatactttggataaaatcatgctcttcatttttcactattgacttttttcttactctcataggaaacgtgtccctgatcaccacccctgttaagcattcccacgtgctgtcgatctttggaccagtttctagcaaagttgtgtttgaaagatactctattaaagaagactgtggaatctgtttatcggtgcccattatatccttaagtttggatatttagctgaccttcgctttaacataggtctaatttatttgccgtgtcattttccatacaaatcagttgatttaaaaaagttcatttctcatactgtgcattaaaataaaaatttgaacaatta

SEQ ID NO: 310479 - DNA, 250 bp, Homo sapiens
aaactagtgtctacctgtgcttctagtgtttctaggggtagatacatggtttggttacgtggtgtatgtattgaaaacatttgatgaatggataccacaaaatagctatccagagtgtttatacactagcactgtgtgagaatactgattgatccatgcattcttcaagatgtgcttatgtcttaacttgaaccaattatgttccctttaggacaaaattcttctaagcagtggacgagatgcctctctt

SEQ ID NO: 310480 - DNA, 313 bp, Homo sapiens
tttttttttgttgttgttgttgttgttgagagggagtctagctctgttgccaggctggagtgcagtggtgccatctcaacttactgcaacctccacctcccgggttcaagtgattctcctgcctcagcctcctgagtagctgggattacaggaacacaccaccacacccagctaatatttgaatttttagtatagatggggtttcgccttgttggccaggatggtctcaatctcctgagcttgtgatctgcccgcctcctctctttactcttaattttagcttgaaactcccctgttgccatttttcaccagg

SEQ ID NO: 310481 - DNA, 2733 bp, Homo sapiens
ggcatcccgagtgcaccgctcccgccccgccccgccttgccccaacccacgatggtctgggagctgcgcccagggcttggcgctggcggccccgcaacagcaccgagcgtttcggtcggcgggcggcggtagcgccccctctcagagccccgctcactcccacctgggctcgctccgagtcggcctgtctgtcgggcccgccctccccgctcactccctccgccctcgtgctcctcccggggtgcttggcacagcctcggattcctccctctcgctgctcgagtcagtttccctatcggcggcagcgggcaaggcggcggcggcggcggcggcagccgcggtggcggcgtggggaacatctcggcagccaccgcgcttctcccgctggagcgggcgtccagcttggctgccctcggtccttccctgccacgtttcgggtcgccctgcaccccccacccaggctcgcttctcttcgaagcgggaagggcgccttgcaggatcctgccgcccctccaaccggatcctgggtctagagctccccagagcgaggcgctcgccaggactcctgccccgccaaccctgaccgccggggggtgcccccgggacgtagcgccgcggagaggaagcggcaaaggggaccatgcggcgcctgactcgtcggctggttctgccagtcttcggggtgctctggatcacggtgctgctgttcttctgggtaaccaagaggaagttggaggtgccgacgggacctgaagtgcagacccctaagccttcggacgctgactgggacgacctgtgggaccagtttgatgagcggcggtatctgaatgccaaaaagtggcgcgttggtgacgacccctataagctgtatgctttcaaccagcgggagagtgagcggatctccagcaatcgggccatcccggacactcgccatctgagatgcacactgctggtgtattgcacggaccttccacccactagcatcatcatcaccttccacaacgaggcccgctccacgctgctcaggaccatccgcagtgtattaaaccgcacccctacgcatctgatccgggaaatcatattagtggatgacttcagcaatgaccctgatgactgtaaacagctcatcaaattgcccaaggtgaaatgcttgcgcaataatgaacggcaaggtctggtccggtcccggattcggggcgctgacatcgcccagggcaccactctgactttcctcgacagccactgtgaggtgaacagggactggctccagcctctgttgcacagggtcaaagaggactacacgcgggtggtgtgccctgtgatcgatatcattaacctggacaccttcacctacatcgagtctgcctcggagctcagaggggggtttgactggagcctccacttccagtgggagcagctctccccagagcagaaggctcggcgcctggaccccacggagcccatcaggactcctatcatagctggagggctcttcgtgatcgacaaagcttggtttgattacctggggaaatatgatatggacatggacatctggggtggggagaactttgaaatctccttccgagtgtggatgtgcgggggcagcctagagatcgtcccctgcagccgagtggggcacgtcttccggaagaagcacccctacgttttccctgatggaaatgccaacacgtatataaagaacaccaagcggacagctgaagtgtggatggatgaatacaagcaatactattacgctgcccggccattcgccctggagaggcccttcgggaatgttgagagcagattggacctgaggaagaatctgcgctgccagagcttcaagtggtacctggagaatatctaccctgaactcagcatccccaaggagtcctccatccagaagggcaatatccgacagagacagaagtgcctggaatctcaaaggcagaacaaccaagaaaccccaaacctaaagttgagcccctgtgccaaggtcaaaggcgaagatgcaaagtcccaggtatgggccttcacatacacccagcagatcctccaggaggagctgtgcctgtcagtcatcaccttgttccctggcgccccagtggttcttgtcctttgcaagaatggagatgaccgacagcaatggaccaaaactggttcccacatcgagcacatagcatcccacctctgcctcgatacagatatgttcggtgatggcaccgagaacggcaaggaaatcgtcgtcaacccatgtgagtcctcactcatgagccagcactgggacatggtgagctcttgaggacccctgccagaagcagcaagggccatggggtggtgcttccctggaccagaacagactggaaactgggcagcaagcagcctgcaaccacctcagacatcctggactgggaggtggaggcagagccccccaggacaggagcaactgtctcagggaggacagaggaaaacatcacaagccaatggggctcaaagacaaatcccacatgttctcaaggccgttaagttccagtcctggccagtcattccctgattggtatctggagacagaaacctaatgggaagtgtttattgttccttttcctacaaaggaagcagtctctggaggccagaaagaaaagccttctttttcactaggccaggactacattgagagatgaagaatggaggttgtttccaaaagaaataaagagaaacttagaagttgtctctgga

SEQ ID NO: 310482 - DNA, 2748 bp, Homo sapiens
ggcatcccgagtgcaccgctcccgccccgccccgccttgccccaacccacgatggtctgggagctgcgcccagggcttggcgctggcggccccgcaacagcaccgagcgtttcggtcggcgggcggcggtagcgccccctctcagagccccgctcactcccacctgggctcgctccgagtcggcctgtctgtcgggcccgccctccccgctcactccctccgccctcgtgctcctcccggggtgcttggcacagcctcggattcctccctctcgctgctcgagtcagtttccctatcggcggcagcgggcaaggcggcggcggcggcggcggcagccgcggtggcggcgtggggaacatctcggcagccaccgcgcttctcccgctggagcgggcgtccagcttggctgccctcggtccttccctgccacgtttcgggtcgccctgcaccccccacccaggctcgcttctcttcgaagcgggaagggcgccttgcaggatcctgccgcccctccaaccggatcctgggtctagagctccccagagcgaggcgctcgccaggactcctgccccgccaaccctgaccgccggggggtgcccccgggacgtagcgccgcggagaggaagcggcaaaggggaccatgcggcgcctgactcgtcggctggttctgccagtcttcggggtgctctggatcacggtgctgctgttcttctgggtaaccaagaggaagttggaggtgccgacgggacctgaagtgcagacccctaaggtttggtccttgtttttcaaggtggctgggatgagcccttgggcgcctcaggtgcctgtatcacccactcctccctaccaaagagggcatcttcctacaggaggacaccttgctgtatgtcatttcccatgtctcttgcaagaagctcagttccatttgcagactcaggtctttcttcaagtcagatgcacactgctggtgtattgcacggaccttccacccactagcatcatcatcaccttccacaacgaggcccgctccacgctgctcaggaccatccgcagtgtattaaaccgcacccctacgcatctgatccgggaaatcatattagtggatgacttcagcaatgaccctgatgactgtaaacagctcatcaaattgcccaaggtgaaatgcttgcgcaataatgaacggcaaggtctggtccggtcccggattcggggcgctgacatcgcccagggcaccactctgactttcctcgacagccactgtgaggtgaacagggactggctccagcctctgttgcacagggtcaaagaggactacacgcgggtggtgtgccctgtgatcgatatcattaacctggacaccttcacctacatcgagtctgcctcggagctcagaggggggtttgactggagcctccacttccagtgggagcagctctccccagagcagaaggctcggcgcctggaccccacggagcccatcaggactcctatcatagctggagggctcttcgtgatcgacaaagcttggtttgattacctggggaaatatgatatggacatggacatctggggtggggagaactttgaaatctccttccgagtgtggatgtgcgggggcagcctagagatcgtcccctgcagccgagtggggcacgtcttccggaagaagcacccctacgttttccctgatggaaatgccaacacgtatataaagaacaccaagcggacagctgaagtgtggatggatgaatacaagcaatactattacgctgcccggccattcgccctggagaggcccttcgggaatgttgagagcagattggacctgaggaagaatctgcgctgccagagcttcaagtggtacctggagaatatctaccctgaactcagcatccccaaggagtcctccatccagaagggcaatatccgacagagacagaagtgcctggaatctcaaaggcagaacaaccaagaaaccccaaacctaaagttgagcccctgtgccaaggtcaaaggcgaagatgcaaagtcccaggtatgggccttcacatacacccagcagatcctccaggaggagctgtgcctgtcagtcatcaccttgttccctggcgccccagtggttcttgtcctttgcaagaatggagatgaccgacagcaatggaccaaaactggttcccacatcgagcacatagcatcccacctctgcctcgatacagatatgttcggtgatggcaccgagaacggcaaggaaatcgtcgtcaacccatgtgagtcctcactcatgagccagcactgggacatggtgagctcttgaggacccctgccagaagcagcaagggccatggggtggtgcttccctggaccagaacagactggaaactgggcagcaagcagcctgcaaccacctcagacatcctggactgggaggtggaggcagagccccccaggacaggagcaactgtctcagggaggacagaggaaaacatcacaagccaatggggctcaaagacaaatcccacatgttctcaaggccgttaagttccagtcctggccagtcattccctgattggtatctggagacagaaacctaatgggaagtgtttattgttccttttcctacaaaggaagcagtctctggaggccagaaagaaaagccttctttttcactaggccaggactacattgagagatgaagaatggaggttgtttccaaaagaaataaagagaaacttagaagttgtctctgga

SEQ ID NO: 310483 - DNA, 2731 bp, Homo sapiens
  misc_feature (329)..(329): n is a, c, g, or t
ttctatgtcgatgcttgtggttaatctggacgagtcccacctgggctcgctccgagtcggcctgtctgtcgggcccgccctccccgctcactccctccgccctcgtgctcctcccggggtgcttggcacagcctcggattcctccctctcgctgctcgagtcagtttccctatctgtgctgtgcatgctgtggcaatggctggctgtgctgtgctgtgctgtgctgtgcatgcctgctgtgttgtgctgtgctgttggtgtgacacatctctgtgcatgccagcctgctgcgttctccctgtctgtgatgctgtgtgctgtccatgctntgtgcttgccctctgtgatccttcccttgccactgtttctgtgtgtctgcccttgcaccctcccagcccatgtgctctgctatcttcttctgagctgctggtgacatgtgtgctgccttgcatgtgatcctgcctgccccgtccaagcctgtgatccttgtggtctagatgctccccagaggctgatgtgctgctctgccaattgaactccctggcccctgccaagcccttgacctgcctgtggtgtgtgtgccccccgtgtgacgttagctgcctgctggatgatgtgaatgctggcaatgggggaccatgcggcgcctgactcgtcggctggttctgccagtcttcggggtgctctggatcacggtgctgctgttcttctgggtaaccaagaggaagttggaggtgccgacgggacctgaagtgcagacccctaagccttcggacgctgactgggacgacctgtgggaccagtttgatgagcggcggtatctgaatgccaaaaagtggcgcgttggtgacgacccctataagctgtatgctttcaaccagcgggagagtgagcggatctccagcaatcgggccatcccggacactcgccatctgagatgcacactgctggtgtattgcacggaccttccacccactagcatcatcatcaccttccacaacgaggcccgctccacgctgctcaggaccatccgcagtgtattaaaccgcacccctacgcatctgatccgggaaatcatattagtggatgacttcagcaatgaccctgatgactgtaaacagctcatcaaattgcccaaggtgaaatgcttgcgcaataatgaacggcaaggtctggtccggtcccggattcggggcgctgacatcgcccagggcaccactctgactttcctcgacagccactgtgaggtgaacagggactggctccagcctctgttgcacagggtcaaagaggactacacgcgggtggtgtgccctgtgatcgatatcattaacctggacaccttcacctacatcgagtctgcctcggagctcagaggggggtttgactggagcctccacttccagtgggagcagctctccccagagcagaaggctcggcgcctggaccccacggagcccatcaggactcctatcatagctggagggctcttcgtgatcgacaaagcttggtttgattacctggggaaatatgatatggacatggacatctggggtggggagaactttgaaatctccttccgagtgtggatgtgcgggggcagcctagagatcgtcccctgcagccgagtggggcacgtcttccggaagaagcacccctacgttttccctgatggaaatgccaacacgtatataaagaacaccaagcggacagctgaagtgtggatggatgaatacaagcaatactattacgctgcccggccattcgccctggagaggcccttcgggaatgttgagagcagattggacctgaggaagaatctgcgctgccagagcttcaagtggtacctggagaatatctaccctgaactcagcatccccaaggagtcctccatccagaagggcaatatccgacagagacagaagtgcctggaatctcaaaggcagaacaaccaagaaaccccaaacctaaagttgagcccctgtgccaaggtcaaaggcgaagatgcaaagtcccaggtatgggccttcacatacacccagcagatcctccaggaggagctgtgcctgtcagtcatcaccttgttccctggcgccccagtggttcttgtcctttgcaagaatggagatgaccgacagcaatggaccaaaactggttcccacatcgagcacatagcatcccacctctgcctcgatacagatatgttcggtgatggcaccgagaacggcaaggaaatcgtcgtcaacccatgtgagtcctcactcatgagccagcactgggacatggtgagctcttgaggacccctgccagaagcagcaagggccatggggtggtgcttccctggaccagaacagactggaaactgggcagcaagcagcctgcaaccacctcagacatcctggactgggaggtggaggcagagccccccaggacaggagcaactgtctcagggaggacagaggaaaacatcacaagccaatggggctcaaagacaaatcccacatgttctcaaggccgttaagttccagtcctggccagtcattccctgattggtatctggagacagaaacctaatgggaagtgtttattgttccttttcctacaaaggaagcagtctctggaggccagaaagaaaagccttctttttcactaggccaggactacattgagagatgaagaatggaggttgtttccaaaagaaataaagagaaacttagaagttgtctctgga

SEQ ID NO: 310484 - DNA, 2855 bp, Homo sapiens
  misc_feature (815)..(815): n is a, c, g, or t
ggcatcccgagtgcaccgctcccgccccgccccgccttgccccaacccacgatggtctgggagctgcgcccagggcttggcgctggcggccccgcaacagcaccgagcgtttcggtcggcgggcggcggtagcgccccctctcagagccccgctcactcccacctgggctcgctccgagtcggcctgtctgtcgggcccgccctccccgctcactccctccgccctcgtgctcctcccggggtgcttggcacagcctcggattcctccctctcgctgctcgagtcagtttccctatcggcggcagcgggcaaggcggcggcggcggcggcggcagccgcggtggcggcgtggggaacatctcggcagccaccgcgcttctcccgctggagcgggcgtccagcttggctgccctcggtccttccctgccacgtttcgggtcgccctgcaccccccacccaggctcgcttctcttcgaagcgggaagggcgccttgcaggatcctgccgcccctccaaccggatcctgggtctagagctccccagagcgaggcgctcgccaggactcctgccccgccaaccctgaccgccggggggtgcccccgggacgtagcgccgcggagaggaagcggcaaaggggaccatgcggcgcctgactcgtcggctggttctgccagtcttcggggtgctctggatcacggtgctgctgttcttctgggtaaccaagaggaagttggaggtgccgacgggacctgaagtgcagacccctaagttaggtacctatagttttctcaatggctgtgcatggtcatgagccncttggcgcgcctctaggctgcgcttgtatcacgctcacgtccttccctaccaatatgagggctatcttcctacgagccttcggacgctgactgggacgacctgtgggaccagtttgatgagcggcggtatctgaatgccaaaaagtggcgcgttggtgacgacccctataagctgtatgctttcaaccagcgggagagtgagcggatctccagcaatcgggccatcccggacactcgccatctgagatgcacactgctggtgtattgcacggaccttccacccactagcatcatcatcaccttccacaacgaggcccgctccacgctgctcaggaccatccgcagtgtattaaaccgcacccctacgcatctgatccgggaaatcatattagtggatgacttcagcaatgaccctgatgactgtaaacagctcatcaaattgcccaaggtgaaatgcttgcgcaataatgaacggcaaggtctggtccggtcccggattcggggcgctgacatcgcccagggcaccactctgactttcctcgacagccactgtgaggtgaacagggactggctccagcctctgttgcacagggtcaaagaggactacacgcgggtggtgtgccctgtgatcgatatcattaacctggacaccttcacctacatcgagtctgcctcggagctcagaggggggtttgactggagcctccacttccagtgggagcagctctccccagagcagaaggctcggcgcctggaccccacggagcccatcaggactcctatcatagctggagggctcttcgtgatcgacaaagcttggtttgattacctggggaaatatgatatggacatggacatctggggtggggagaactttgaaatctccttccgagtgtggatgtgcgggggcagcctagagatcgtcccctgcagccgagtggggcacgtcttccggaagaagcacccctacgttttccctgatggaaatgccaacacgtatataaagaacaccaagcggacagctgaagtgtggatggatgaatacaagcaatactattacgctgcccggccattcgccctggagaggcccttcgggaatgttgagagcagattggacctgaggaagaatctgcgctgccagagcttcaagtggtacctggagaatatctaccctgaactcagcatccccaaggagtcctccatccagaagggcaatatccgacagagacagaagtgcctggaatctcaaaggcagaacaaccaagaaaccccaaacctaaagttgagcccctgtgccaaggtcaaaggcgaagatgcaaagtcccaggtatgggccttcacatacacccagcagatcctccaggaggagctgtgcctgtcagtcatcaccttgttccctggcgccccagtggttcttgtcctttgcaagaatggagatgaccgacagcaatggaccaaaactggttcccacatcgagcacatagcatcccacctctgcctcgatacagatatgttcggtgatggcaccgagaacggcaaggaaatcgtcgtcaacccatgtgagtcctcactcatgagccagcactgggacatggtgagctcttgaggacccctgccagaagcagcaagggccatggggtggtgcttccctggaccagaacagactggaaactgggcagcaagcagcctgcaaccacctcagacatcctggactgggaggtggaggcagagccccccaggacaggagcaactgtctcagggaggacagaggaaaacatcacaagccaatggggctcaaagacaaatcccacatgttctcaaggccgttaagttccagtcctggccagtcattccctgattggtatctggagacagaaacctaatgggaagtgtttattgttccttttcctacaaaggaagcagtctctggaggccagaaagaaaagccttctttttcactaggccaggactacattgagagatgaagaatggaggttgtttccaaaagaaataaagagaaacttagaagttgtctctgga

SEQ ID NO: 310485 - DNA, 2634 bp, Homo sapiens
ggcatcccgagtgcaccgctcccgccccgccccgccttgccccaacccacgatggtctgggagctgcgcccagggcttggcgctggcggccccgcaacagcaccgagcgtttcggtcggcgggcggcggtagcgccccctctcagagccccgctcactcccacctgggctcgctccgagtcggcctgtctgtcgggcccgccctccccgctcactccctccgccctcgtgctcctcccggggtgcttggcacagcctcggattcctccctctcgctgctcgagtcagtttccctatcggcggcagcgggcaaggcggcggcggcggcggcggcagccgcggtggcggcgtggggaacatctcggcagccaccgcgcttctcccgctggagcgggcgtccagcttggctgccctcggtccttccctgccacgtttcgggtcgccctgcaccccccacccaggctcgcttctcttcgaagcgggaagggcgccttgcaggatcctgccgcccctccaaccggatcctgggtctagagctccccagagcgaggcgctcgccaggactcctgccccgccaaccctgaccgccggggggtgcccccgggacgtagcgccgcggagaggaagcggcaaaggggaccatgcggcgcctgactcgtcggctggttctgccagtcttcggggtgctctggatcacggtgctgctgttcttctgggtaaccaagaggaagttggaggtgccgacgggacctgaagtgcagacccctaagccttcggacgctgactgggacgacctgtgggaccagtttgatgagcggcggtatctgaatgccaaaaagtggcgcgttggtgacgacccctataagctgtatgctttcaaccagcgggagagtgagcggatctccagcaatcgggccatcccggacactcgccatctgagtgtattaaaccgcacccctacgcatctgatccgggaaatcatattagtggatgacttcagcaatgaccctgatgactgtaaacagctcatcaaattgcccaaggtgaaatgcttgcgcaataatgaacggcaaggtctggtccggtcccggattcggggcgctgacatcgcccagggcaccactctgactttcctcgacagccactgtgaggtgaacagggactggctccagcctctgttgcacagggtcaaagaggactacacgcgggtggtgtgccctgtgatcgatatcattaacctggacaccttcacctacatcgagtctgcctcggagctcagaggggggtttgactggagcctccacttccagtgggagcagctctccccagagcagaaggctcggcgcctggaccccacggagcccatcaggactcctatcatagctggagggctcttcgtgatcgacaaagcttggtttgattacctggggaaatatgatatggacatggacatctggggtggggagaactttgaaatctccttccgagtgtggatgtgcgggggcagcctagagatcgtcccctgcagccgagtggggcacgtcttccggaagaagcacccctacgttttccctgatggaaatgccaacacgtatataaagaacaccaagcggacagctgaagtgtggatggatgaatacaagcaatactattacgctgcccggccattcgccctggagaggcccttcgggaatgttgagagcagattggacctgaggaagaatctgcgctgccagagcttcaagtggtacctggagaatatctaccctgaactcagcatccccaaggagtcctccatccagaagggcaatatccgacagagacagaagtgcctggaatctcaaaggcagaacaaccaagaaaccccaaacctaaagttgagcccctgtgccaaggtcaaaggcgaagatgcaaagtcccaggtatgggccttcacatacacccagcagatcctccaggaggagctgtgcctgtcagtcatcaccttgttccctggcgccccagtggttcttgtcctttgcaagaatggagatgaccgacagcaatggaccaaaactggttcccacatcgagcacatagcatcccacctctgcctcgatacagatatgttcggtgatggcaccgagaacggcaaggaaatcgtcgtcaacccatgtgagtcctcactcatgagccagcactgggacatggtgagctcttgaggacccctgccagaagcagcaagggccatggggtggtgcttccctggaccagaacagactggaaactgggcagcaagcagcctgcaaccacctcagacatcctggactgggaggtggaggcagagccccccaggacaggagcaactgtctcagggaggacagaggaaaacatcacaagccaatggggctcaaagacaaatcccacatgttctcaaggccgttaagttccagtcctggccagtcattccctgattggtatctggagacagaaacctaatgggaagtgtttattgttccttttcctacaaaggaagcagtctctggaggccagaaagaaaagccttctttttcactaggccaggactacattgagagatgaagaatggaggttgtttccaaaagaaataaagagaaacttagaagttgtctctgga

SEQ ID NO: 310486 - DNA, 2162 bp, Homo sapiens
gtacggcaagtagaggcccggttaatcggccgaggggatcacggtgctgctgttcttctgggtaaccaagaggaagttggaggtgccgacgggacctgaagtgcagacccctaagggttcttcccaaagttagtgcagcctacacccaggattgaacaaagacagcttggaagttagaagcaagatggagtctgttagccttcggacgctgactgggacgacctgtgggaccagtttgatgagcggcggtatctgaatgccaaaaagtggcgcgttggtgacgacccctataagctgtatgctttcaaccagcgggagagtgagcggatctccagcaatcgggccatcccggacactcgccatctgagatgcacactgctggtgtattgcacggaccttccacccactagcatcatcatcaccttccacaacgaggcccgctccacgctgctcaggaccatccgcagtgtattaaaccgcacccctacgcatctgatccgggaaatcatattagtggatgacttcagcaatgaccctgatgactgtaaacagctcatcaaattgcccaaggtgaaatgcttgcgcaataatgaacggcaaggtctggtccggtcccggattcggggcgctgacatcgcccagggcaccactctgactttcctcgacagccactgtgaggtgaacagggactggctccagcctctgttgcacagggtcaaagaggactacacgcgggtggtgtgccctgtgatcgatatcattaacctggacaccttcacctacatcgagtctgcctcggagctcagaggggggtttgactggagcctccacttccagtgggagcagctctccccagagcagaaggctcggcgcctggaccccacggagcccatcaggactcctatcatagctggagggctcttcgtgatcgacaaagcttggtttgattacctggggaaatatgatatggacatggacatctggggtggggagaactttgaaatctccttccgagtgtggatgtgcgggggcagcctagagatcgtcccctgcagccgagtggggcacgtcttccggaagaagcacccctacgttttccctgatggaaatgccaacacgtatataaagaacaccaagcggacagctgaagtgtggatggatgaatacaagcaatactattacgctgcccggccattcgccctggagaggcccttcgggaatgttgagagcagattggacctgaggaagaatctgcgctgccagagcttcaagtggtacctggagaatatctaccctgaactcagcatccccaaggagtcctccatccagaagggcaatatccgacagagacagaagtgcctggaatctcaaaggcagaacaaccaagaaaccccaaacctaaagttgagcccctgtgccaaggtcaaaggcgaagatgcaaagtcccaggtatgggccttcacatacacccagcagatcctccaggaggagctgtgcctgtcagtcatcaccttgttccctggcgccccagtggttcttgtcctttgcaagaatggagatgaccgacagcaatggaccaaaactggttcccacatcgagcacatagcatcccacctctgcctcgatacagatatgttcggtgatggcaccgagaacggcaaggaaatcgtcgtcaacccatgtgagtcctcactcatgagccagcactgggacatggtgagctcttgaggacccctgccagaagcagcaagggccatggggtggtgcttccctggaccagaacagactggaaactgggcagcaagcagcctgcaaccacctcagacatcctggactgggaggtggaggcagagccccccaggacaggagcaactgtctcagggaggacagaggaaaacatcacaagccaatggggctcaaagacaaatcccacatgttctcaaggccgttaagttccagtcctggccagtcattccctgattggtatctggagacagaaacctaatgggaagtgtttattgttccttttcctacaaaggaagcagtctctggaggccagaaagaaaagccttctttttcactaggccaggactacattgagagatgaagaatggaggttgtttccaaaagaaataaagagaaacttagaagttgtctctgga

SEQ ID NO: 310487 - DNA, 2504 bp, Homo sapiens
ggcatcccgagtgcaccgctcccgccccgccccgccttgccccaacccacgatggtctgggagctgcgcccagggcttggcgctggcggccccgcaacagcaccgagcgtttcggtcggcgggcggcggtagcgccccctctcagagccccgctcactcccacctgggctcgctccgagtcggcctgtctgtcgggcccgccctccccgctcactccctccgccctcgtgctcctcccggggtgcttggcacagcctcggattcctccctctcgctgctcgagtcagtttccctatcggcggcagcgggcaaggcggcggcggcggcggcggcagccgcggtggcggcgtggggaacatctcggcagccaccgcgcttctcccgctggagcgggcgtccagcttggctgccctcggtccttccctgccacgtttcgggtcgccctgcaccccccacccaggctcgcttctcttcgaagcgggaagggcgccttgcaggatcctgccgcccctccaaccggatcctgggtctagagctccccagagcgaggcgctcgccaggactcctgccccgccaaccctgaccgccggggggtgcccccgggacgtagcgccgcggagaggaagcggcaaaggggaccatgcggcgcctgactcgtcggctggttctgccagtcttcggggtgctctggatcacggtgctgctgttcttctgggtaaccaagaggaagttggaggtgccgacgggacctgaagtgcagacccctaagccttcggacgctgactgggacgacctgtgggaccagtttgatgagcggcggtatctgaatgccaaaaagtggcgcgttggtgacgacccctataagctgtatgctttcaaccagcgggagagtgagcggatctccagcaatcgggccatcccggacactcgccatctgagatgcacactgctggtgtattgcacggaccttccacccactagcatcatcatcaccttccacaacgaggcccgctccacgctgctcaggaccatccgcagtgtattaaaccgcacccctacgcatctgatccgggaaatcatattagtggatgacttcagcaatgaccctgatgactgtaaacagctcatcaaattgcccaaggtgaaatgcttgcgcaataatgaacggcaaggtctggtccggtcccggattcggggcgctgacatcgcccagggcaccactctgactttcctcgacagccactgtgaggtgaacagggactggctccagcctctgttgcacagggtcaaagaggactacacgcgggtggtgtgccctgtgatcgatatcattaacctggacaccttcacctacatcgagtctgcctcggagctcagaggggggtttgactggagcctccacttccagtgggagcagctctccccagagcagaaggctcggcgcctggaccccacggagcccatcaggactcctatcatagctggagggctcttcgtgatcgacaaagcttggtttgattacctggggaaatatgatatggacatggacatctggggtggggagaactttgaaatctccttccgagtgtggatgtgcgggggcagcctagagatcgtcccctgcagccgagtggggcacgtcttccggaagaagcacccctacgttttccctgatggaaatgccaacacgtatataaagaacaccaagcggacagctgaagtgtggatggatgaatacaagcaatactattacgctgcccggccattcgccctggagaggcccttcgggaagtatgggccttcacatacacccagcagatcctccaggaggagctgtgcctgtcagtcatcaccttgttccctggcgccccagtggttcttgtcctttgcaagaatggagatgaccgacagcaatggaccaaaactggttcccacatcgagcacatagcatcccacctctgcctcgatacagatatgttcggtgatggcaccgagaacggcaaggaaatcgtcgtcaacccatgtgagtcctcactcatgagccagcactgggacatggtgagctcttgaggacccctgccagaagcagcaagggccatggggtggtgcttccctggaccagaacagactggaaactgggcagcaagcagcctgcaaccacctcagacatcctggactgggaggtggaggcagagccccccaggacaggagcaactgtctcagggaggacagaggaaaacatcacaagccaatggggctcaaagacaaatcccacatgttctcaaggccgttaagttccagtcctggccagtcattccctgattggtatctggagacagaaacctaatgggaagtgtttattgttccttttcctacaaaggaagcagtctctggaggccagaaagaaaagccttctttttcactaggccaggactacattgagagatgaagaatggaggttgtttccaaaagaaataaagagaaacttagaagttgtctctgga

SEQ ID NO: 310488 - DNA, 2767 bp, Homo sapiens
ggcatcccgagtgcaccgctcccgccccgccccgccttgccccaacccacgatggtctgggagctgcgcccagggcttggcgctggcggccccgcaacagcaccgagcgtttcggtcggcgggcggcggtagcgccccctctcagagccccgctcactcccacctgggctcgctccgagtcggcctgtctgtcgggcccgccctccccgctcactccctccgccctcgtgctcctcccggggtgcttggcacagcctcggattcctccctctcgctgctcgagtcagtttccctatcggcggcagcgggcaaggcggcggcggcggcggcggcagccgcggtggcggcgtggggaacatctcggcagccaccgcgcttctcccgctggagcgggcgtccagcttggctgccctcggtccttccctgccacgtttcgggtcgccctgcaccccccacccaggctcgcttctcttcgaagcgggaagggcgccttgcaggatcctgccgcccctccaaccggatcctgggtctagagctccccagagcgaggcgctcgccaggactcctgccccgccaaccctgaccgccggggggtgcccccgggacgtagcgccgcggagaggaagcggcaaaggggaccatgcggcgcctgactcgtcggctggttctgccagtcttcggggtgctctggatcacggtgctgctgttcttctgggtaaccaagaggaagttggaggtgccgacgggacctgaagtgcagacccctaagccttcggacgctgactgggacgacctgtgggaccagtttgatgagcggcggtatctgaatgccaaaaagtggcgcgttggtgacgacccctataagctgtatgctttcaaccagcgggagagtgagcggatctccagcaatcgggccatcccggacactcgccatctgagatgcacactgctggtgtattgcacggaccttccacccactagcatcatcatcaccttccacaacgaggcccgctccacgctgctcaggaccatccgcagtgtattaaaccgcacccctacgcatctgatccgggaaatcatattagtggatgacttcagcaatgaccctgatgactgtaaacagctcatcaaattgcccaaggtgaaatgcttgcgcaataatgaacggcaaggtctggtccggtcccggattcggggcgctgacatcgcccagggcaccactctgactttcctcgacagccactgtgaggtgaacagggactggctccagcctctgttgcacagggtcaaagaggactacacgcgggtggtgtgccctgtgatcgatatcattaacctggacaccttcacctacatcgagtctgcctcggagctcagaggggggtttgactggagcctccacttccagtgggagcagctctccccagagcagaaggctcggcgcctggaccccacggagcccatcaggactcctatcatagctggagggctcttcgtgatcgacaaagcttggtttgattacctggggaaatatgatatggacatggacatctggggtggggagaactttgaaatctccttccgagtgtggatgtgcgggggcagcctagagatcgtcccctgcagccgagtggggcacgtcttccggaagaagcacccctacgttttccctgatggaaatgccaacacgtatataaagaacaccaagcggacagctgaagtgtggatggatgaatacaagcaatactattacgctgcccggccattcgccctggagaggcccttcgggaatgttgagagcagattggacctgaggaagaatctgcgctgccagagcttcaagtggtacctggagaatatctaccctgaactcagtggactctcctctctccctgtgactctcctccagcatccccaaggagtcctccatccagaagggcaatatccgacagagacagaagtgcctggaatctcaaaggcagaacaaccaagaaaccccaaacctaaagttgagcccctgtgccaaggtcaaaggcgaagatgcaaagtcccaggtatgggccttcacatacacccagcagatcctccaggaggagctgtgcctgtcagtcatcaccttgttccctggcgccccagtggttcttgtcctttgcaagaatggagatgaccgacagcaatggaccaaaactggttcccacatcgagcacatagcatcccacctctgcctcgatacagatatgttcggtgatggcaccgagaacggcaaggaaatcgtcgtcaacccatgtgagtcctcactcatgagccagcactgggacatggtgagctcttgaggacccctgccagaagcagcaagggccatggggtggtgcttccctggaccagaacagactggaaactgggcagcaagcagcctgcaaccacctcagacatcctggactgggaggtggaggcagagccccccaggacaggagcaactgtctcagggaggacagaggaaaacatcacaagccaatggggctcaaagacaaatcccacatgttctcaaggccgttaagttccagtcctggccagtcattccctgattggtatctggagacagaaacctaatgggaagtgtttattgttccttttcctacaaaggaagcagtctctggaggccagaaagaaaagccttctttttcactaggccaggactacattgagagatgaagaatggaggttgtttccaaaagaaataaagagaaacttagaagttgtctctgga

SEQ ID NO: 310489 - DNA, 2802 bp, Homo sapiens
  misc_feature (2802)..(2802): n is a, c, g, or t
ggcatcccgagtgcaccgctcccgccccgccccgccttgccccaacccacgatggtctgggagctgcgcccagggcttggcgctggcggccccgcaacagcaccgagcgtttcggtcggcgggcggcggtagcgccccctctcagagccccgctcactcccacctgggctcgctccgagtcggcctgtctgtcgggcccgccctccccgctcactccctccgccctcgtgctcctcccggggtgcttggcacagcctcggattcctccctctcgctgctcgagtcagtttccctatcggcggcagcgggcaaggcggcggcggcggcggcggcagccgcggtggcggcgtggggaacatctcggcagccaccgcgcttctcccgctggagcgggcgtccagcttggctgccctcggtccttccctgccacgtttcgggtcgccctgcaccccccacccaggctcgcttctcttcgaagcgggaagggcgccttgcaggatcctgccgcccctccaaccggatcctgggtctagagctccccagagcgaggcgctcgccaggactcctgccccgccaaccctgaccgccggggggtgcccccgggacgtagcgccgcggagaggaagcggcaaaggggaccatgcggcgcctgactcgtcggctggttctgccagtcttcggggtgctctggatcacggtgctgctgttcttctgggtaaccaagaggaagttggaggtgccgacgggacctgaagtgcagacccctaagccttcggacgctgactgggacgacctgtgggaccagtttgatgagcggcggtatctgaatgccaaaaagtggcgcgttggtgacgacccctataagctgtatgctttcaaccagcgggagagtgagcggatctccagcaatcgggccatcccggacactcgccatctgagatgcacactgctggtgtattgcacggaccttccacccactagcatcatcatcaccttccacaacgaggcccgctccacgctgctcaggaccatccgcagtgtattaaaccgcacccctacgcatctgatccgggaaatcatattagtggatgacttcagcaatgaccctgatgactgtaaacagctcatcaaattgcccaaggtgaaatgcttgcgcaataatgaacggcaaggtctggtccggtcccggattcggggcgctgacatcgcccagggcaccactctgactttcctcgacagccactgtgaggtgaacagggactggctccagcctctgttgcacagggtcaaagaggactacacgcgggtggtgtgccctgtgatcgatatcattaacctggacaccttcacctacatcgagtctgcctcggagctcagaggggggtttgactggagcctccacttccagtgggagcagctctccccagagcagaaggctcggcgcctggaccccacggagcccatcaggactcctatcatagctggagggctcttcgtgatcgacaaagcttggtttgattacctggggaaatatgatatggacatggacatctggggtggggagaactttgaaatctccttccgagtgtggatgtgcgggggcagcctagagatcgtcccctgcagccgagtggggcacgtcttccggaagaagcacccctacgttttccctgatggaaatgccaacacgtatataaagaacaccaagcggacagctgaagtgtggatggatgaatacaagcaatactattacgctgcccggccattcgccctggagaggcccttcgggaatgttgagagcagattggacctgaggaagaatctgcgctgccagagcttcaagtggtacctggagaatatctaccctgaactcagcatccccaaggagtcctccatccagaagggcaatatccgacagagacagaagtgcctggaatctcaaaggcagaacaaccaagaaaccccaaacctaaagttgagcccctgtgccaaggtcaaaggcgaagatgcaaagtcccaggtatgggccttcacatacacccagcagatcctccaggaggagctgtgcctgtcagtcatcaccttgttccctggcgccccagtggttcttgtcctttgcaagaatggagatgaccgacagcaatggaccaaaactggttcccacatcgagcacatagcatcccacctctgcctcgatacagatatgttcggtgatggcaccgagaacggcaaggaaatcgtcgtcaacccatgtgagtcctcactcatgagccagcactgggacatggtgagctcttgaggacccctgccagaagcagcaagggccatggggtggtgcttccctggaccagaacagactggaaactgggcagcaagcagcctgcaaccacctcagacatcctggactgggaggtggaggcagagccccccaggacaggagcaactgtctcagggaggacagaggaaaacatcacaagccaatggggctcaaagacaaatcccacatgttctcaaggccgttaagttccagtcctggccagtcattccctgattggtatctggagacagaaacctaatgggaagtgtttattgttccttttcctacaaaggaagcagtctctggaggccagaaagaaaagccttctttttcactaggccaggactacattgagagatgaagaatggaggttgtttccaaaagaaataaagagaaacttagaagttgtctctggaaaaaaataatcggtcctcgttggcttagaggaagaagctctgacagccccttcatttaataaaggatan

SEQ ID NO: 310490 - DNA, 2446 bp, Homo sapiens
ggcatcccgagtgcaccgctcccgccccgccccgccttgccccaacccacgatggtctgggagctgcgcccagggcttggcgctggcggccccgcaacagcaccgagcgtttcggtcggcgggcggcggtagcgccccctctcagagccccgctcactcccacctgggctcgctccgagtcggcctgtctgtcgggcccgccctccccgctcactccctccgccctcgtgctcctcccggggtgcttggcacagcctcggattcctccctctcgctgctcgagtcagtttccctatcggcggcagcgggcaaggcggcggcggcggcggcggcagccgcggtggcggcgtggggaacatctcggcagccaccgcgcttctcccgctggagcgggcgtccagcttggctgccctcggtccttccctgccacgtttcgggtcgccctgcaccccccacccaggctcgcttctcttcgaagcgggaagggcgccttgcaggatcctgccgcccctccaaccggatcctgggtctagagctccccagagcgaggcgctcgccaggactcctgccccgccaaccctgaccgccggggggtgcccccgggacgtagcgccgcggagaggaagcggcaaaggggaccatgcggcgcctgactcgtcggctggttctgccagtcttcggggtgctctggatcacggtgctgctgttcttctgggtaaccaagaggaagttggaggtgccgacgggacctgaagtgcagacccctaagccttcggacgctgactgggacgacctgtgggaccagtttgatgagcggcggtatctgaatgccaaaaagtggcgcgttggtgacgacccctataagctgtatgctttcaaccagcgggagagtgagcggatctccagcaatcgggccatcccggacactcgccatctgagtgtattaaaccgcacccctacgcatctgatccgggaaatcatattagtggatgacttcagcaatgaccctgatgactgtaaacagctcatcaaattgcccaaggtgaaatgcttgcgcaataatgaacggcaaggtctggtccggtcccggattcggggcgctgacatcgcccagggcaccactctgactttcctcgacagccactgtgaggtgaacagggactggctccagcctctgttgcacagggtcaaagaggactacacgcgggtggtgtgccctgtgatcgatatcattaacctggacaccttcacctacatcgagtctgcctcggagctcagaggggggtttgactggagcctccacttccagtgggagcagctctccccagagcagaaggctcggcgcctggaccccacggagcccatcaggactcctatcatagctggagggctcttcgtgatcgacaaagcttggtttgattacctggggaaatatgatatggacatggacatctggggtggggagaactttgaaatctccttccgagtgtggatgtgcgggggcagcctagagatcgtcccctgcagccgagtggggcacgtcttccggaagaagcacccctacgttttccctgatggaaatgccaacacgtatataaagaacaccaagcggacagctgaagtgtggatggatgaatacaagcaatactattacgctgcccggccattcgccctggagaggcccttcgggaatgttgagagcagattggacctgaggaagaatctgcgctgccagagcttcaagtggtacctggagaatatctaccctgaactcagcatccccaaggagtcctccatccagaagggcaatatccgacagagacagaagtgcctggaatctcaggccaacgggactacgggaagcagcgggcagcggcccgcgggaggcacctcggagatctgggtgcaaaagcccagggttaggaaccgtaggcatgctgcgccccaaggctttgacccaggtgctaagccaagccaacactggaggcgtccagagcaccctgctgctgaataacgagggatcactgctggcctactctggttacggggacactgacgcccgggtcaccgctgccatagccagtaacatctgggccgcctacgaccggaacgggaaccaagcgtttaatgaagacaatctcaaattcatcctcatggactgcatggagggccgtgtagccatcacccgagtggccaaccttctgctgtgtatgtatgccaaggagaccgtgggctttggaatgctcaaggccaaggcccaggctttggtgcagtacctggaggagcccctcacccaagtggcggcatcttaacggcattggtggaagctggggtcagaaaagagaaatgaccatttggaggggcggggcctcctagaagaaccttcttagacaatggggggaggatgggactttgttttttccaagaataaacttcaactcctgtc

SEQ ID NO: 310491 - DNA, 321 bp, Homo sapiens
ccaggcccaggccccttcatggggtggatggagatttccatggagatatgacctccgagtctctggcacttgagtagcattttccaaggtaaccttgatgatcattgcctactgggacccttggtgcttcttaccagcctgtgctaatcacacccgtaagtgtggttgtatcccacgagtggtggcttcctggatcctgaacaaaccttcctggtctctttctccccaggtatgggccttcacatacacccagcagatcctccaggaggagctgtgcctgtcagtcatcaccttgttccctggcgccccagtggttcttgt

SEQ ID NO: 310492 - DNA, 1672 bp, Homo sapiens
cccaactggcagcgacacgtagggacgggctgaaccagctttgttcccagggtggcgcctgctctccatccaggccccattccggctcccacccgacgctgcttttgttcccacgtttcggggggcagctggcactgtgattcctgccccatgagtgcctagaggcacggagccaccagggatcaccccacgtgggacacagggcttggggaggatggggcaggaccagaccaagcagcagatcgagaaggggctccagctgtaccagtccaaccagacagagaaggcattgcaggtgtggacaaaggtgctggagaagagctcggacctcatggggcgcttccgcgtgctgggctgcctggtcacagcccactcggagatgggccgctacaaggagatgctgaagttcgctgtggtccagatcgacacggcccgggagctggaggatgccgacttcctcctggagagctacctgaacctggcacgcagcaacgagaagctgtgcgagtttcacaagaccatctcctactgcaagacctgccttgggctgcctggtaccagggcaggtgcccagctcggaggccaggtcagcctgagcatgggcaatgccttcctgggcctcagcgtcttccagaaggccctggagagcttcgagaaggccctgcgctatgcccacaacaatgatgacgccatgctcgagtgccgcgtgtgctgcagcctgggcagcttctatgcccaggtcaaggactacgagaaagccctgttcttcccctgcaaggcggcagagcttgtcaacaactatggcaaaggctggagcctgaagtaccgggccatgagccagtaccacatggccgtggcctatcgcctgctgggccgcctgggcagtgccatggagtgttgtgaggagtctatgaagatcgcgctgcagcacggggaccggccactgcaggcgctctgcctgctctgcttcgctgacatccaccggagccgtggggacctggagacagccttccccaggtacgactccgccatgagcatcatgaccgagatcggaaaccgcctggggcaggtgcaggcgctgctgggtgtggccaagtgctgggtggccaggaaggcgctggacaaggctctggatgccatcgagagagcccaggatctggccgaggaggtggggaacaagctgagccagctcaagctgcactgtctgagcgagagcatttaccgcagcaaagggctgcagcgggaactgcgggcgcacgttgtgaggttccacgagtgcgtggaggagacggagctctactgcggcctgtgcggcgagtccataggcgagaagaacagccggctgcaggccctaccttgctcccacatcttccacctcaggtgcctgcagaacaacgggacccggagctgtcccaactgccgccgctcatccatgaagcctggctttgtatgactcctggcagcaggcgtgggcttcctcctcgccactcctgctctttctccactgcacgccagaggcccatttactcctggggcagctgccaggtcgtcctcaccatagccaaggccttggggcctgcccagggctgctcccctgggcccagctcccctccctgcctctttgtactttgctctttatagaaaaataaactgtttgtacctggaaaaaaaa

SEQ ID NO: 310493 - DNA, 1495 bp, Homo sapiens
cccaactggcagcgacacgtagggacgggctgaaccagctttgttcccagggtggcgcctgctctccatccaggccccattccggctcccacccgacgctgcttttgttcccacgtttcggggggcagctggcactgtgattcctgccccatgagtgcctagaggcacggagccaccagggatcaccccacgtgggacacagggcttggggaggatggggcaggaccagaccaagcagcagatcgagaaggggctccagctgtaccagtccaaccagacagagaaggcattgcaggtgtggacaaaggtgctggagaagagctcggacctcatggggcgcttccgcgtgctgggctgcctggtcacagcccactcggagatgggccgctacaaggagatgctgaagttcgctgtggtccagatcgacacggcccgggagctggaggatgccgacttcctcctggagagctacctgaacctggcacgcagcaacgagaagctgtgcgagtttcacaagaccatctcctactgcaagacctgccttgggctgcctggtaccagggcaggtgcccagctcggaggccaggtcagcctgagcatgggcaatgccttcctgggcctcagcgtcttccagaaggccctggagagcttcgagaaggccctgcgctatgcccacaacaatgatgacgccatgctcgagtgccgcgtgtgctgcagcctgggcagcttctatgcccaggtcaaggactacgagaaagccctgttcttcccctgcaaggcggcagagcttgtcaacaactatggcaaaggctggagcctgaagtaccgggccatgagccagtaccacatggccgtggcctatcgcctgctgggccgcctgggcagtgccatggagtgttgtgaggagtctatgaagatcgcgctgcagcacggggaccggccactgcaggcgctctgcctgctctgcttcgctgacatccaccggagccgtggggacctggagctgagccagctcaagctgcactgtctgagcgagagcatttaccgcagcaaagggctgcagcgggaactgcgggcgcacgttgtgaggttccacgagtgcgtggaggagacggagctctactgcggcctgtgcggcgagtccataggcgagaagaacagccggctgcaggccctaccttgctcccacatcttccacctcaggtgcctgcagaacaacgggacccggagctgtcccaactgccgccgctcatccatgaagcctggctttgtatgactcctggcagcaggcgtgggcttcctcctcgccactcctgctctttctccactgcacgccagaggcccatttactcctggggcagctgccaggtcgtcctcaccatagccaaggccttggggcctgcccagggctgctcccctgggcccagctcccctccctgcctctttgtactttgctctttatagaaaaataaactgtttgtacctggaaaaaaaa

SEQ ID NO: 310494 - DNA, 1507 bp, Homo sapiens
cccaactggcagcgacacgtagggacgggctgaaccagctttgttcccagggtggcgcctgctctccatccaggccccattccggctcccacccgacgctgcttttgttcccacgtttcggggggcagctggcactgtgattcctgccccatgagtgcctagaggcacggagccaccagggatcaccccacgtgggacacagggcttggggaggatggggcaggaccagaccaagcagcagatcgagaaggggctccagctgtaccagtccaaccagacagagaaggcattgcaggtgtggacaaaggtgctggagaagagctcggacctcatggggcgcttccgcgtgctgggctgcctggtcacagcccactcggagatgggccgctacaaggagatgctgaagttcgctgtggtccagatcgacacggcccgggagctggaggatgccgacttcctcctggagagctacctgaacctggcacgcagcaacgagaagctgtgcgagtttcacaagaccatctcctactgcaagacctgccttgggctgcctggtaccagggcaggtgcccagctcggaggccaggtcagcctgagcatgggcaatgccttcctgggcctcagcgtcttccagaaggccctggagagcttcgagaaggccctgcgctatgcccacaacaatgatgacgccatgctcgagtgccgcgtgtgctgcagcctgggcagcttctatgcccaggtcaaggactacgagaaagccctgttcttcccctgcaaggcggcagagcttgtcaacaactatggcaaaggctggagcctgaagtaccgggccatgagccagtaccacatggccgtggcctatcgcctgctgggccgcctgggcagtgccatggagtgttgtgaggagtctatgaagatcgcgctgcagcacggggaccggccactgcaggcgctctgcctgctctgcttcgctgacatccaccggagccgtggggacctggaggtgaggtcaccgggatgcaggggctgggggcagggggcaggggcacaggcctgatacagcctgattccatcccccacctggctctgcagacagccttccccaggtacgactccgccatgagcatcatgaccgagatcggaaaccgcctggggcaggtgcaggcgctgctgggtgtggccaagtgctgggtggccaggaaggcgctggacaaggtgcctgcagaacaacgggacccggagctgtcccaactgccgccgctcatccatgaagcctggctttgtatgactcctggcagcaggcgtgggcttcctcctcgccactcctgctctttctccactgcacgccagaggcccatttactcctggggcagctgccaggtcgtcctcaccatagccaaggccttggggcctgcccagggctgctcccctgggcccagctcccctccctgcctctttgtactttgctctttatagaaaaataaactgtttgtacctggaaaaaaaa

SEQ ID NO: 310495 - DNA, 659 bp, Homo sapiens
ggcactccagtggtggtggcagaggagtaggcctgagccactggcctccctcgcaggagtctatgaagatcgcgctgcagcacggggaccggccactgcaggcgctctgcctgctctgcttcgctgacatccaccggagccgtggggacctggaggtgaggtcaccgggatgcaggggctgggggcagggggcaggggcacaggcctgatacagcctgattccatcccccacctggctctgcagacagccttccccaggtacgactccgccatgagcatcatgaccgagatcggaaaccgcctggggcaggtgcaggcgctgctgggtgtggccaagtgctgggtggccaggaaggcgctggacaaggtgcctgcagaacaacgggacccggagctgtcccaactgccgccgctcatccatgaagcctggctttgtatgactcctggcagcaggcgtgggcttcctcctcgccactcctgctctttctccactgcacgccagaggcccatttactcctggggcagctgccaggtcgtcctcaccatagccaaggccttggggcctgcccagggctgctcccctgggcccagctcccctccctgcctctttgtactttgctctttatagaaaaataaactgtttgtacctggaaaaaaaa

SEQ ID NO: 310496 - DNA, 475 bp, Homo sapiens
tccctgtgagcaaggcctgtcagacagctctgcccgcagccctggcctatgctcaccttccaggctctggatgccatcgagagagcccaggatctggccgaggaggtggggaacaaggtcagacttgattctgtgtcctggatctggggtcaagggcccaagtggggaacttgggtctggggaagggccttcctgagcctactcacgtcatgagcccttcctgatgctgggagctgcctgcagccaaccccatactctggctctttctctgccacacacacagcacttctgagggcagggcagaagtttcatagcttggaggatagcagaattcctcagaagcttcctgatgttgattaaaacccctaacagtgggctggacatggtggctcacatctataatcctagaattttgggaggccgaggtaggaggatcacttgagcccagaagttcgagagcagcctgggctacata

SEQ ID NO: 310497 - DNA, 827 bp, Homo sapiens
  misc_feature (14)..(15): n is a, c, g, or t
aaataaggctaggnncgaggctgggtgtgaatcggccgaggtagctcttcggtggttgtcacacgtccggaggcctagccgtcgcgtacctaggatgccgcgtggaagccgaagccgcacctcccgcatggcccctccggccagccgggcccctcagatgagagctgcacccaggccagcaccagtcgctcagccaccagcagcggcacccccatctgcagttggctcttctgctgctgcgccccggcagccaggtctgatggcccagatggcaaccactgcagctggcgtggctgtgggctctgctgtggggcacacattgggtcacgccattactgggggcttcagtggaggaagtaatgctgagcctgcgaggcctgacatcacttaccaggagcctcagggaacccagccagcacagcagcagcagccttgcctctatgagatcaaacagtttctggagtgtgcccagaaccagggtgacatcaagctctgtgagggtttcaatgaggtgctgaaacagtgccgacttgcaaacggattggcctaatgaagaagttcaacctggagagatggaaaatcagctctcataactaagttaatttagtataaaaatagaattgatagtgagggtataaagtgtaaccatcagttaaacctctcctgtcattcctagcttccttgcttcagaattgaaatggaagtgggggtgtccctactctgtagaatctgggactgggcaaatgtttgtgtggcctccttaaactagctgttatgttatgattttattctttgtgagttaattagaataaagtcattttcttcca

SEQ ID NO: 310498 - DNA, 806 bp, Homo sapiens
gcaaccactgcagctgggcctagctcttcggtggttgtcacacgtccggaggcctagccgtcgcgtacctaggatgccgcgtggaagccgaagccgcacctcccgcatggcccctccggccagccgggcccctcagatgagagctgcacccaggccagcaccagtcgctcagccaccagcagcggcacccccatctgcagttggctcttctgctgctgcgccccggcagccaggtctgatggcccagatggcaaccactgcagctggcgtggctgtgggctctgctgtggggcacacattgggtcacgccattactgggggcttcagtggaggaagtaatgctgagcctgcgaggcctgacatcacttaccaggagcctcagggaacccagccagcacagcagcagcagccttgcctctatgagatcaaacagtttctggagtgtgcccagaaccagggtgacatcaagctctgtgagggtttcaatgaggtgctgaaacagtgccgacttgcaaacggattggcctaatgaagaagttcaacctggagagatggaaaatcagctctcataactaagttaatttagtataaaaatagaattgatagtgagggtataaagtgtaaccatcagttaaacctctcctgtcattcctagcttccttgcttcagaattgaaatggaagtgggggtgtccctactctgtagaatctgggactgggcaaatgtttgtgtggcctccttaaactagctgttatgttatgattttattctttgtgagttaattagaataaagtcattttcttcca

SEQ ID NO: 310499 - DNA, 1156 bp, Homo sapiens
  misc_feature (1156)..(1156): n is a, c, g, or t
gccaagttcagggcgttgaccgcgaaggacgaggcgtccccgtgacgtcctgctcttccaatgaacttcaggcctgcggagacgacggagaacggaagttctctgcctgtgtgctggttggttgcgcgttgaggccagccccgcctcccatcttccggtctcctcagaagtcgcttagctcttcggtggttgtcacacgtccggaggcctagccgtcgcgtacctaggatgccgcgtggaagccgaagccgcacctcccgcatggcccctccggccagccgggcccctcagatgagagctgcacccaggccagcaccagtcgctcagccaccagcagcggcacccccatctgcagttggctcttctgctgctgcgccccggcagccaggtctgatggcccagatggcaaccactgcagctggcgtggctgtgggctctgctgtggggcacacattgggtcacgccattactgggggcttcagtggaggaagtaatgctgagcctgcgaggcctgacatcacttaccaggagcctcagggaacccagccagcacagcagcagcagccttgcctctatgagatcaaacagtttctggagtgtgcccagaaccagggtgacatcaagctctgtgagggtttcaatgaggtgctgaaacagtgccgacttgcaaacggattggcctaatgaagaagttcaacctggagagatggaaaatcagctctcataactaagttaatttagtataaaaatagaattgatagtgagggtataaagtgtaaccatcagttaaacctctcctgtcattcctagcttccttgcttcagaattgaaatggaagtgggggtgtccctactctgtagaatctgggactgggcaaatgtttgtgtggcctccttaaactagctgttatgttatgattttattctttgtgagttaattagaataaagtcattttcttccaaaaaaaaaaaaaaccacaacaaaacacaaaaaacccacacacaaaccatacccttccaaaataaaaaaactcgagggggggccccgttcccaattcgccctataggggagcgggatacaattacactgccggtcgttttacaacgccggaattggtggttgcggattaacgaataaggcccgcaccgatcccccn

SEQ ID NO: 310500 - DNA, 764 bp, Homo sapiens
tcagtatgccagatcttactgtgattactggatgtaagtgaccttctaaccttaaggctgcgaatataagattagattctgttttcaccaaaatccaggaatagacaaaaagactgatacctggtatctgtacctcattgagtgaaaggagttaattaagttcctcaggggaactccggagattcagggtgtcttgttagttgtaggatgccttcagtagcttacaaacaaaaccataaccttcctggaacccagcactctggaaggccaaggtgggaggattgcttgagtccaggagttcgagaccagcctgggcaacatagcaagacctcatctctattttttatcaaaaaaaaacaaaaaacaaaaaacccatagccttggccttttgtcgctgctttcataatttggaaggcttctgttttattgagtatacgaagctagcattcttctaacttaatcttttctgtttgcaggattggcctaatgaagaagttcaacctggagagatggaaaatcagctctcataactaagttaatttagtataaaaatagaattgatagtgagggtataaagtgtaaccatcagttaaacctctcctgtcattcctagcttccttgcttcagaattgaaatggaagtgggggtgtccctactctgtagaatctgggactgggcaaatgtttgtgtggcctccttaaactagctgttatgttatgattttattctttgtgagttaattagaataaagtcattttcttcca

SEQ ID NO: 310501 - DNA, 344 bp, Homo sapiens
taaattcgcggccgcgtcgaccaatgaggtgctgaaacagtgccgacttcgaaacggattggcctaatgaagaagttcaacctggagagatggaaaatcagctctcataactaagttaatttagtataaaaatagaattgatagtgagggtataaagtgtaaccatcagttaaacctctcctgtcattcctagcttccttgcttcagaattgaaatggaagtgggggtgtccctactctgtagaatctgggactgggcaaatgtttgtgtggcctccttaaactagctgttatgttatgattttattctttgtgagttaattagaataaagtcattttcttcca

SEQ ID NO: 310502 - DNA, 339 bp, Homo sapiens
gcccgcagtgtgcctggattctcattgttgagcagtgccgacttgctaacggattggcctaatgaagaagttcaacctggagagatggaaaatcagctctcataactaagttaatttagtataaaaatagaattgatagtgagggtataaagtgtaaccatcagttaaacctctcctgtcattcctagcttccttgcttcagaattgaaatggaagtgggggtgtccctactctgtagaatctgggactgggcaaatgtttgtgtggcctccttaaactagctgttatgttatgattttattctttgtgagttaattagaataaagtcattttcttcca

SEQ ID NO: 310503 - DNA, 642 bp, Homo sapiens
  misc_feature (128)..(128): n is a, c, g, or t
aggcgaagggggccttccgcgtattcgatgtttgaacgcctgcagactatgttcggactccccttcggcaagtcgaagggggttcgattggtctcgagctaatgctggagataacatcactattatgnccaacgggtcatgtatgccaggagtaactcagaggtgttcttgatcgttgtcgataaagggtcggagaggttcaaaggagccacttattagtaactagtctgatagtagaatgatggctagggtgacttcataatgagatctctcttgggctactgctccgcagtgcgccgatcagggcgtagctttgacgtttgatgctcaccctgatcagaggattgagtaaacgcgctaggtctagaggtggcctagaataaataggaggcctaggattgaggttgaccagggggttgggtatggggaatagaattgatagtgagggtataaagtgtaaccatcagttaaacctctcctgtcattcctagcttccttgcttcagaattgaaatggaagtgggggtgtccctactctgtagaatctgggactgggcaaatgtttgtgtggcctccttaaactagctgttatgttatgattttattctttgtgagttaattagaataaagtcattttcttcca

SEQ ID NO: 310504 - DNA, 217 bp, Homo sapiens
gcggccgcctactactactaaattcgcggccgcgtcgaccagttaaacctctcctgtcattcctagcttccttgcttcagaattgaaatggaagtgggggtgtccctactctgtagaatctgggactgggcaaatgtttgtgtggcctccttaaactagctgttatgttatgattttattctttgtgagttaattagaataaagtcattttcttcca

SEQ ID NO: 310505 - DNA, 824 bp, Homo sapiens
aaacttaggctaggtagcgaggcctgggtgtcgctcagtagctcttcggtggttgtcacacgtccggaggcctagccgtcgcgtacctaggatgccgcgtggaagccgaagccgcacctcccgcatggcccctccggccagccgggcccctcagatgagagctgcacccaggccagcaccagtcgctcagccaccagcagcggcacccccatctgcagttggctcttctgctgctgcgccccggcagccaggtctgatggcccagatggcaaccactgcagctggcgtggctgtgggctctgctgtggggcacacattgggtcacgccattactgggggcttcagtggaggaagtaatgctgagcctgcgaggcctgacatcacttaccaggagcctcagggaacccagccagcacagcagcagcagccttgcctctatgagatcaaacagtttctggagtgtgcccagaaccagggtgacatcaagctctgtgagggtttcaatgaggtgctgaaacagtgccgacttgcaaacggattggcctaatgaagaagttcaacctggagagatggaaaatcagctctcataactaagttaatttagtataaaaatagaattgatagtgagggtataaagtgtaaccatcagttaaacctctcctgtcattcctagcttccttgcttcagaattgaaatggaagtgggggtgtccctactctgtagaatctgggactgggcaaatgtttgtgtggcctccttaaactagctgttatgttatgattttattctttgtgagttaattagaataaagtcattttcttcca

SEQ ID NO: 310506 - DNA, 1515 bp, Homo sapiens
  misc_feature (14)..(15): n is a, c, g, or t
aaataaggctaggnncgaggctgggtgtgaatcggccgaggtagctcttcggtggttgtcacacgtccggaggcctagccgtcgcgtacctaggatgccgcgtggaagccgaagccgcacctcccgcatggcccctccggccagccgggcccctcagatgagagctgcacccaggccagcaccagtcgctcagccaccagcagcggcacccccatctgcagttggctcttctgctgctgcgccccggcagccaggtctgatggcccagatggcaaccactgcagctggcgtggctgtgggctctgctgtggggcacacattgggtcacgccattactgggggcttcagtggaggaagtaatgctgagcctgcgaggcctgacatcacttaccaggagcctcagggaacccagccagcacagcagcagcagccttgcctctatgagatcaaacagtttctggagtgtgcccagaaccagggtgacatcaagctctgtgagggtttcaatgaggtgctgaaacagtgccgacttgcaaacggattggcctaatgaagaagttcaacctggagagatggaaaatcagctctcataactaagttaatttagtataaaaatagaattgatagtgagggtataaagtgtaaccatcagttaaacctctcctgtcattcctagcttccttgcttcagaattgaaatggaagtgggggtgtccctactctgtagaatctgggactgggcaaatgtttgtgtggcctccttaaactagctgttatgttatgattttattctttgtgagttaattagaataaagtcattttcttccaaggtatggttcatttagtctatagtctctggttatgaaattagcatcctcccagatctgacagctccctgaggggttatataaggagtagctcacttgcaaacataacatgctgctcaattcaaaggttctagctgctgtgggtctggagttatgtaagctgagcagtagcaggaaactctgcttaaaatattgtttaaagctgtgcgtgctggcatgtgcctgtaatcccagctacttgggagactgaggcgggagaatcacttgaacccaggaggtggaggttgcagtgaactgagaccatgccactgcactcactgacagagcaagactctgtctcaaaaaaaaaaaaaaaatacattgttttaatcaggtgaatgataaaggaaacaggaataggtctatttggggtgggttccctgtggctaggtcagcactgcgtatcactattcctctactgtttccaagcaagcttgtgcaacccaccttttgttctgttttcttttgctttaggcttttagcagcctggagttatagtttgtctctagtgataagtggaaaagagcgatgaggaaggggttttactggcctaaccataaactgtaactaaacccatgactgcattctctcccttggacgcccctgattgaagataaaaaaccattcttaatatatgcagttcccctgaa

SEQ ID NO: 310507 - DNA, 1129 bp, Homo sapiens
gccaagttcagggcgttgaccgcgaaggacgaggcgtccccgtgacgtcctgctcttccaatgaacttcaggcctgcggagacgacggagaacggaagttctctgcctgtgtgctggttggttgcgcgttgaggccagccccgcctcccatcttccggtctcctcagaagtcgcttagctcttcggtggttgtcacacgtccggaggcctagccgtcgcgtacctaggatgccgcgtggaagccgaagccgcacctcccgcatggcccctccggccagccgggcccctcagatgagagctgcacccaggccagcaccagtcgctcagccaccagcagcggcacccccatctgcagttggctcttctgctgctgcgccccggcagccaggtctgatggcccagatggcaaccactgcagctggcgtggctgtgggctctgctgtggggcacacattgggtcacgccattactgggggcttcagtggaggaagtaatgctgagcctgcgaggcctgacatcacttaccaggagcctcagggaacccagccagcacagcagcagcagccttgcctctatgagatcaaacagtttctggagtgtgcccagaaccagggtgacatcaagctctgtgagggtttcaatgaggtgctgaaacagtgccgacttgcaaacggattggcctaatgaagaagttcaacctggagagatggaaaatcagctctcataactaagttaatttagtataaaaatagaattgatagtgagggtataaagtgtaaccatcagttaaacctctcctgtcattcctagcttccttgcttcagaattgaaatggaagtgggggtgtccctactctgtagaatctgggactgggcaaatgtttgtgtggcctccttaaactagctgttatgttatgattttattctttgtgagttaattagaataaagtcattttcttccaaaaaaaaaaaaaaaaacaaaaaaaacctcgagactagttctctctctcaactcgggggggtggagaagccttgagcaggcaaagtctctcgggaacccccctgtacgaggcggggcgggaagccctgcggggaacccgcggccaagcccgcaaggtccctggaaccgg

SEQ ID NO: 310508 - DNA, 1069 bp, Homo sapiens
  misc_feature (986)..(987): n is a, c, g, or t
  misc_feature (993)..(993): n is a, c, g, or t
  misc_feature (996)..(996): n is a, c, g, or t
gccaagttcagggcgttgaccgcgaaggacgaggcgtccccgtgacgtcctgctcttccaatgaacttcaggcctgcggagacgacggagaacggaagttctctgcctgtgtgctggttggttgcgcgttgaggccagccccgcctcccatcttccggtctcctcagaagtcgcttagctcttcggtggttgtcacacgtccggaggcctagccgtcgcgtacctaggatgccgcgtggaagccgaagccgcacctcccgcatggcccctccggccagccgggcccctcagatgagagctgcacccaggccagcaccagtcgctcagccaccagcagcggcacccccatctgcagttggctcttctgctgctgcgccccggcagccaggtctgatggcccagatggcaaccactgcagctggcgtggctgtgggctctgctgtggggcacacattgggtcacgccattactgggggcttcagtggaggaagtaatgctgagcctgcgaggcctgacatcacttaccaggagcctcagggaacccagccagcacagcagcagcagccttgcctctatgagatcaaacagtttctggagtgtgcccagaaccagggtgacatcaagctctgtgagggtttcaatgaggtgctgaaacagtgccgacttgcaaacggattggcctaatgaagaagttcaacctggagagatggaaaatcagctctcataactaagttaatttagtataaaaatagaattgatagtgagggtataaagtgtaaccatcagttaaacctctcctgtcattcctagcttccttgcttcagaattgaaatggaagtgggggtgtccctactctgtagaatctgggactgggcaaatgtttgtgtggcctccttaaactagctgttatgttatgattttattctttgtgagttaattagaataaagtcattttcttccacggaaaaaaaaaaaaaagggggggnnaaaatnccnggggcaagttcgcgacccttttgtaaagggccaaagaggcgaaaaaagggcgggtaagggggaacgggctcgg

SEQ ID NO: 310509 - DNA, 1698 bp, Homo sapiens
gccaagttcagggcgttgaccgcgaaggacgaggcgtccccgtgacgtcctgctcttccaatgaacttcaggcctgcggagacgacggagaacggaagttctctgcctgtgtgctggttggttgcgcgttgaggccagccccgcctcccatcttccggtctcctcagaagtcgcttagctcttcggtggttgtcacacgtccggaggcctagccgtcgcgtacctaggatgccgcgtggaagccgaagccgcacctcccgcatggcccctccggccagccgggcccctcagatgagagctgcacccaggccagcaccagtcgctcagccaccagcagcggcacccccatctgcagttggctcttctgctgctgcgccccggcagccaggtctgatggcccagatggcaaccactgcagctggcgtggctgtgggctctgctgtggggcacacattgggtcacgccattactgggggcttcagtggaggaagtaatgctgagcctgcgaggcctgacatcacttaccaggagcctcagggaacccagccagcacagcagcagcagccttgcctctatgagatcaaacagtttctggagtgtgcccagaaccagggtgacatcaagctctgtgagggtttcaatgaggtgctgaaacagtgccgacttgcaaacggattggcctaatgaagaagttcaacctggagagatggaaaatcagctctcataactaagttaatttagtataaaaatagaattgatagtgagggtataaagtgtaaccatcagttaaacctctcctgtcattcctagcttccttgcttcagaattgaaatggaagtgggggtgtccctactctgtagaatctgggactgggcaaatgtttgtgtggcctccttaaactagctgttatgttatgattttattctttgtgagttaattagaataaagtcattttcttccaaaaaaaaaaaaaaaaaaaaaaaaaaaaaaaaaaaaaaaaaaaaaaaaaaaaaaaacaaaaaaaaaaaaaaaaaaaaaaaaaaaaaaaaaaagaacgagagagagggaacggagaaggaagaggaagacaaggaaggaggaggaccacagcggagcgagcgcgggaggggcggcagagaagggggggggggaggagggggagagaaggggagcgagcggcgagcgcgcgcggccgacgcgggagggagggacagcgagtgagcgaggaccaggacggaagagcgagagcggacaggcggggcggggggccgcggcgccggcaggacggcggcgcaggagagggggggggagcgagagcaaaggcccggcagcggcacggaagaagcggcagacaggggagagggagcgagaagaggacgggaggagcagcggagaacagagacgaggggccggagcgcgacaggggcgggtggagaggaaacaggagaggagcggggaacgggagcggagcgcagcagtaacgcagtcgggacggagcggaggggaccacgaccgcgtgagcacgacgcggaagtggcacgaccgaagaagggcgcagggacaggcgcacggcggcgggcccgagcgggggagaccggcggcggacgggcacggggaagcggaacgacgagaggcagaagagaaagaggaggcgaagcgagaagggaggagagagcagggggagacggaaggggccgg

SEQ ID NO: 310510 - DNA, 943 bp, Homo sapiens
gccaagttcagggcgttgaccgcgaaggacgaggcgtccccgtgacgtcctgctcttccaatgaacttcaggcctgcggagacgacggagaacggaagttctctgcctgtgtgctggttggttgcgcgttgaggccagccccgcctcccatcttccggtctcctcagaagtcgcttagctcttcggtggttgtcacacgtccggaggcctagccgtcgcgtacctaggatgccgcgtggaagccgaagccgcacctcccgcatggcccctccggccagccgggcccctcagatgagagctgcacccaggccagcaccagtcgctcagccaccagcagcggcacccccatctgcagttggctcttctgctgctgcgccccggcagccaggtctgatggcccagatggcaaccactgcagctggcgtggctgtgggctctgctgtggggcacacattgggtcacgccattactgggggcttcagtggaggaagtaatgctgagcctgcgaggcctgacatcacttaccaggagcctcagggaacccagccagcacagcagcagcagccttgcctctatgagatcaaacagtttctggagtgtgcccagaaccagggtgacatcaagctctgtgagggtttcaatgaggtgctgaaacagtgccgacttgcaaacggattggcctaatgaagaagttcaacctggagagatggaaaatcagctctcataactaagttaatttagtataaaaatagaattgatagtgagggtataaagtgtaaccatcagttaaacctctcctgtcattcctagcttccttgcttcagaattgaaatggaagtgggggtgtccctactctgtagaatctgggactgggcaaatgtttgtgtggcctccttaaactagctggggcactgtttggactctgggcactgtttggactctg

SEQ ID NO: 310511 - DNA, 786 bp, Homo sapiens
cgactcttgaggatccaccgacacgccgaagctccaaccgtcgcgtacctaggatgccgcgtggaagccgaagccgcacctcccgcatggcccctccggccagccgggcccctcagatgagagctgcacccaggccagcaccagtcgctcagccaccagcagcggcacccccatctgcagttggctcttctgctgctgcgccccggcagccaggtctgatggcccagatggcaaccactgcagctggcgtggctgtgggctctgctgtggggcacacattgggtcacgccattactgggggcttcagtggaggaagtaatgctgagcctgcgaggcctgacatcacttaccaggagcctcagggaacccagccagcacagcagcagcagccttgcctctatgagatcaaacagtttctggagtgtgcccagaaccagggtgacatcaagctctgtgagggtttcaatgaggtgctgaaacagtgccgacttgcaaacggattggcctaatgaagaagttcaacctggagagatggaaaatcagctctcataactaagttaatttagtataaaaatagaattgatagtgagggtataaagtgtaaccatcagttaaacctctcctgtcattcctagcttccttgcttcagaattgaaatggaagtgggggtgtccctactctgtagaatctgggactgggcaaatgtttgtgtggcctccttaaactagctgttatgttatgattttattctttgtgagttaattagaataaagtcattttcttcca

SEQ ID NO: 310512 - DNA, 823 bp, Homo sapiens
gtcttttacttccttagttaaatttatttctaggtttttaattgttttggtagctattgtaaatgggattgtgatatagttcagatatttgtcccctccaaagctcatgttgaaatgttatcccgcatggcccctcgtccccgggcccctcagatgagagctgcacccaggccagcaccagtcgctcagccaccagcagcggcacccccatctgcagttggctcttctgctgctgcgccccggcagccaggtctgatggcccagatggcaaccactgcagctggcgtggctgtgggctctgctgtggggcacacattgggtcacgccattactgggggcttcagtggaggaagtaatgctgagcctgcgaggcctgacatcacttaccaggagcctcagggaacccagccagcacagcagcagcagccttgcctctatgagatcaaacagtttctggagtgtgcccagaaccagggtgacatcaagctctgtgagggtttcaatgaggtgctgaaacagtgccgacttgcaaacggattggcctaatgaagaagttcaacctggagagatggaaaatcagctctcataactaagttaatttagtataaaaatagaattgatagtgagggtataaagtgtaaccatcagttaaacctctcctgtcattcctagcttccttgcttcagaattgaaatggaagtgggggtgtccctactctgtagaatctgggactgggcaaatgtttgtgtggcctccttaaactagctgttatgttatgattttattctttgtgagttaattagaataaagtcattttcttcca

SEQ ID NO: 310513 - DNA, 1001 bp, Homo sapiens
gccaagttcagggcgttgaccgcgaaggacgaggcgtccccgtgacgtcctgctcttccaatgaacttcaggcctgcggagacgacggagaacggaagttctctgcctgtgtgctggttggttgcgcgttgaggccagccccgcctcccatcttccggtctcctcagaagtcgcttagctcttcggtggttgtcacacgtccggaggcctagccgtcgcgtacctaggatgccgcgtggaagccgaagccgcacctcccgcatggcccctccggccagccgggcccctcagatgagagctgcacccaggccagcaccagtcgctcagccaccagcagcggcacccccatctgcagttggctcttctgctgctgcgccccggcagccaggtctgatggcccagatggcaaccactgcagctggcgtggctgtgggctctgctgtggggcacacattgggtcacgccattactgggggcttcagtggaggaagtaatgctgagcctgcgaggcctgacatcacttaccaggagcctcagggaacccagccagcacagcagcagcagccttgcctctatgagatcaaacagtttctggagtgtgcccagaaccagggtgacatcaagctctgtgagggtttcaatgaggtgctgaaacagtgccgacttgcaaacggattggcctaatgaagaagttcaacctggagagatggaaaatcagctctcataactaagttaatttagtataaaaatagaattgatagtgagggtataaagtgtaaccatcagttaaacctctcctgtcattcctagcttccttgcttcagaattgaaatggaagtgggggtgtccctactctgtagaatctgggaggtggctgtgtgcgttatctccctgtggcatgccaggaggcgtgtgtgtgcgcacgagtgtgtgtgtgcaagcatgtgcatgtgtgtctttgtgtgtgtgcatagtatttgtggtgtgttgaatcaactacg

SEQ ID NO: 310514 - DNA, 770 bp, Homo sapiens
  misc_feature (14)..(15): n is a, c, g, or t
aaataaggctaggnncgaggctgggtgtgaatcggccgaggtagctcttcggtggttgtcacacgtccggaggcctagccgtcgcgtacctaggatgccgcgtggaagccgaagccgcacctcccgcatggcccctccggccagccgggcccctcagatgagagctgcacccaggccagcaccagtcgctcagccaggtctgatggcccagatggcaaccactgcagctggcgtggctgtgggctctgctgtggggcacacattgggtcacgccattactgggggcttcagtggaggaagtaatgctgagcctgcgaggcctgacatcacttaccaggagcctcagggaacccagccagcacagcagcagcagccttgcctctatgagatcaaacagtttctggagtgtgcccagaaccagggtgacatcaagctctgtgagggtttcaatgaggtgctgaaacagtgccgacttgcaaacggattggcctaatgaagaagttcaacctggagagatggaaaatcagctctcataactaagttaatttagtataaaaatagaattgatagtgagggtataaagtgtaaccatcagttaaacctctcctgtcattcctagcttccttgcttcagaattgaaatggaagtgggggtgtccctactctgtagaatctgggactgggcaaatgtttgtgtggcctccttaaactagctgttatgttatgattttattctttgtgagttaattagaataaagtcattttcttcca

SEQ ID NO: 310515 - DNA, 664 bp, Homo sapiens
tgtaagcgacggggtttcaccattttgcccaggctgatcttaatgtcctgacctcaacccaccttggcctcccaaagtgctgggactacaggtctgatggcccagatggcaaccactgcagctggcgtggctgtgggctctgctgtggggcacacattgggtcacgccattactgggggcttcagtggaggaagtaatgctgagcctgcgaggcctgacatcacttaccaggagcctcagggaacccagccagcacagcagcagcagccttgcctctatgagatcaaacagtttctggagtgtgcccagaaccagggtgacatcaagctctgtgagggtttcaatgaggtgctgaaacagtgccgacttgcaaacggattggcctaatgaagaagttcaacctggagagatggaaaatcagctctcataactaagttaatttagtataaaaatagaattgatagtgagggtataaagtgtaaccatcagttaaacctctcctgtcattcctagcttccttgcttcagaattgaaatggaagtgggggtgtccctactctgtagaatctgggactgggcaaatgtttgtgtggcctccttaaactagctgttatgttatgattttattctttgtgagttaattagaataaagtcattttcttcca

SEQ ID NO: 310516 - DNA, 834 bp, Homo sapiens
gccaagttcagggcgttgaccgcgaaggacgaggcgtccccgtgacgtcctgctcttccaatgaacttcaggcctgcggagacgacggagaacggaagttctctgcctgtgtgctggttggttgcgcgttgaggccagccccgcctcccatcttccggtctcctcagaagtcgcttagctcttcggtggttgtcacacgtccggaggcctagccgtcgcgtacctaggatgccgcgtggaagccgaagccgcacctcccgcatggcccctccggccagccgggcccctcagatgagagctgcacccaggccagcaccagtcgctcagccaccagcagcggcacccccatcttcagtggaggaagtaatgctgagcctgcgaggcctgacatcacttaccaggagcctcagggaacccagccagcacagcagcagcagccttgcctctatgagatcaaacagtttctggagtgtgcccagaaccagggtgacatcaagctctgtgagggtttcaatgaggtgctgaaacagtgccgacttgcaaacggattggcctaatgaagaagttcaacctggagagatggaaaatcagctctcataactaagttaatttagtataaaaatagaattgatagtgagggtataaagtgtaaccatcagttaaacctctcctgtcattcctagcttccttgcttcagaattgaaatggaagtgggggtgtccctactctgtagaatctgggactgggcaaatgtttgtgtggcctccttaaactagctgttatgttatgattttattctttgtgagttaattagaataaagtcattttcttcca

SEQ ID NO: 310517 - DNA, 1507 bp, Homo sapiens
  misc_feature (14)..(15): n is a, c, g, or t
aaataaggctaggnncgaggctgggtgtgaatcggccgaggtagctcttcggtggttgtcacacgtccggaggcctagccgtcgcgtacctaggatgccgcgtggaagccgaagccgcacctcccgcatggcccctccggccagccgggcccctcagatgagagctgcacccaggccagcaccagtcgctcagccaggtctgatggcccagatggcaaccactgcagctggcgtggctgtgggctctgctgtggggcacacattgggtcacgccattactgggggcttcagtggaggaagtaatgctgagcctgcgaggcctgacatcacttaccaggagcctcagggaacccagccagcacagcagcagcagccttgcctctatgagatcaaacagtttctggagtgtgcccagaaccagggtgacatcaagctctgtgagggtttcaatgaggtgctgaaacagtgccgacttgcaaacggattggcctaatgaagaagttcaacctggagagatggaaaatcagctctcataactaagttaatttagtataaaaatagaattgatagtgagggtataaagtgtaaccatcagttaaacctctcctgtcattcctagcttccttgcttcagaattgaaatggaagtgggggtgtccctactctgtagaatctgggactgggcaaatgtttgtgtggcctccttaaactagctgttatgttatgattttattctttgtgagttaattagaataaagtcattttcttccaaaaaaaaaaaaaaaaaaaaaaaaaaaaaaaaaaaaaaaaaaaaaaaaaaaaaaaacaaaaaaaaaaaaaaaaaaaaaaaaaaaaaaaaaaagaacgagagagagggaacggagaaggaagaggaagacaaggaaggaggaggaccacagcggagcgagcgcgggaggggcggcagagaagggggggggggaggagggggagagaaggggagcgagcggcgagcgcgcgcggccgacgcgggagggagggacagcgagtgagcgaggaccaggacggaagagcgagagcggacaggcggggcggggggccgcggcgccggcaggacggcggcgcaggagagggggggggagcgagagcaaaggcccggcagcggcacggaagaagcggcagacaggggagagggagcgagaagaggacgggaggagcagcggagaacagagacgaggggccggagcgcgacaggggcgggtggagaggaaacaggagaggagcggggaacgggagcggagcgcagcagtaacgcagtcgggacggagcggaggggaccacgaccgcgtgagcacgacgcggaagtggcacgaccgaagaagggcgcagggacaggcgcacggcggcgggcccgagcgggggagaccggcggcggacgggcacggggaagcggaacgacgagaggcagaagagaaagaggaggcgaagcgagaagggaggagagagcagggggagacggaaggggccgg

SEQ ID NO: 310518 - DNA, 582 bp, Homo sapiens
  misc_feature (14)..(15): n is a, c, g, or t
aaataaggctaggnncgaggctgggtgtgaatcggccgaggtagctcttcggtggttgtcacacgtccggaggcctagccgtcgcgtacctaggatgccgcgtggaagccgaagccgcacctcccgcatggcccctccggccagccgggcccctcagatgagagctgcacccagagcagcagcagccttgcctctatgagatcaaacagtttctggagtgtgcccagaaccagggtgacatcaagctctgtgagggtttcaatgaggtgctgaaacagtgccgacttgcaaacggattggcctaatgaagaagttcaacctggagagatggaaaatcagctctcataactaagttaatttagtataaaaatagaattgatagtgagggtataaagtgtaaccatcagttaaacctctcctgtcattcctagcttccttgcttcagaattgaaatggaagtgggggtgtccctactctgtagaatctgggactgggcaaatgtttgtgtggcctccttaaactagctgttatgttatgattttattctttgtgagttaattagaataaagtcattttcttcca

SEQ ID NO: 310519 - DNA, 757 bp, Homo sapiens
gccaagttcagggcgttgaccgcgaaggacgaggcgtccccgtgacgtcctgctcttccaatgaacttcaggcctgcggagacgacggagaacggaagttctctgcctgtgtgctggttggttgcgcgttgaggccagccccgcctcccatcttccggtctcctcagaagtcgcttagctcttcggtggttgtcacacgtccggaggcctagccgtcgcgtacctaggatgccgcgtggaagccgaagccgcacctcccgcatggcccctccggccagccgggcccctcagatgagagctgcacccaggccagcaccagtcgctcagccaccagcagcggcacccccatagcagcagcagccttgcctctatgagatcaaacagtttctggagtgtgcccagaaccagggtgacatcaagctctgtgagggtttcaatgaggtgctgaaacagtgccgacttgcaaacggattggcctaatgaagaagttcaacctggagagatggaaaatcagctctcataactaagttaatttagtataaaaatagaattgatagtgagggtataaagtgtaaccatcagttaaacctctcctgtcattcctagcttccttgcttcagaattgaaatggaagtgggggtgtccctactctgtagaatctgggactgggcaaatgtttgtgtggcctccttaaactagctgttatgttatgattttattctttgtgagttaattagaataaagtcattttcttcca

SEQ ID NO: 310520 - DNA, 835 bp, Homo sapiens
  misc_feature (14)..(15): n is a, c, g, or t
  misc_feature (610)..(610): n is a, c, g, or t
  misc_feature (614)..(614): n is a, c, g, or t
aaataaggctaggnncgaggctgggtgtgaatcggccgaggtagctcttcggtggttgtcacacgtccggaggcctagccgtcgcgtacctaggatgccgcgtggaagccgaagccgcacctcccgcatggcccctccggccagccgggcccctcagatgagagctgcacccagagcagcagcagccttgcctctatgagatcaaacagtttctggagtgtgcccagaaccagggtgacatcaagctctgtgagggtttcaatgaggtgctgaaacagtgccgacttgcaaacggattggcctaatgaagaagttcaacctggagagatggaaaatcagctctcataactaagttaatttagtataaaaatagaattgatagtgagggtataaagtgtaaccatcagttaaacctctcctgtcattcctagcttccttgcttcagaattgaaatggaagtgggggtgtccctactctgtagaatctgggactgggcaaatgtttgtgtggcctccttaaactagctgttatgttatgattttattctttgtgagttaattagaataaagtcattttcttccaaaaaaaaaaaaaaaaacaaaaaaaaaanaaanaaacaaaaaagagaggaagaacaccaaaacaagaagaacaacacgagaaagaaccgacaaaagaaaaagaagaacgaaacaaaaaaaaaggagagagaagaggggcgggcgccaacaacgaagcatcgataaacgacggagactaaagaagaggcggggggccccacaaaaaaggcgggccgaagcgcgagtggctcacaaggagaggccggagcgctact

SEQ ID NO: 310521 - DNA, 919 bp, Homo sapiens
  misc_feature (14)..(15): n is a, c, g, or t
aaataaggctaggnncgaggctgggtgtgaatcggccgaggtagctcttcggtggttgtcacacgtccggaggcctagccgtcgcgtacctaggatgccgcgtggaagccgaagccgcacctcccgcatggcccctccggccaggtgagaccatcgcagggtttgagaccaaagcgcggccgtccggactctactggggcaatgacgcagagggaggccgcgggcgggggtgaactaaggtcggctgcggcgtgggctcgcctctgccaggcgggggtagattgaacgtaaagcctatgttaggggagtgtggggagggaattcacttacggaaaaagcttcctatccaaacaacgggaaaggcataacgttatggccaggtggcaggaaggcataaattttgacctagcttgatttcggggaaaagagcacccaaggaaataatccggaaatggtcagagggagcgtgatacatatgaagatttttaaatacgtgcaggacataattagtcttttgttatttgagaaggggtctcgaaattgttgaaagcatctgaacgttgaacagatgaggaatagttgaagttgcttttggtataatagttcagacgagtcactttggccagtcttgttttgtaatgtgtaaaatgaaggaattggactagattatttccccagttgaccatctttaagtcctaattagaatgtttatctatttatattttgagtcagagtctaactcaggctgtagtgcagtgacgtaattatggctaactgcagccttgacttcctgggctcaagctattctaccacgtcagcctccagagtaactgggactacaggcatgcgccacctgtgcaccacacttggcgactttattctattttatattttagcagagacagggtctcattatgtg

SEQ ID NO: 310522 - DNA, 335 bp, Homo sapiens
ttctttctcagcaatgttgaatgttttgcctttgcaggagcctcagggaacccagccagcacagcagcagcagccttgcctctatgagatcaaacagtttctggagtgtgcccagaaccagggtgacatcaagctctgtgagggtttcaatgaggtgctgaaacagtgccgacttgcaaacggtaggtaatttgtccaatttacatctgcttaattcacagtggaattcctggatcctgtagaacttagggtaatctgtgtttaataaattagagaagactttgttgaaatttctctagaattaactcctaacaactgggccggaggtttctagt

SEQ ID NO: 310523 - DNA, 961 bp, Homo sapiens
gccaagttcagggcgttgaccgcgaaggacgaggcgtccccgtgacgtcctgctcttccaatgaacttcaggcctgcggagacgacggagaacggaagttctctgcctgtgtgctggttggttgcgcgttgaggccagccccgcctcccatcttccggtctcctcagaagtcgcttagctcttcggtggttgtcacacgtccggaggcctagccgtcgcgtacctaggatgccgcgtggaagccgaagccgcacctcccgcatggcccctccggccagccgggcccctcagatgagagctgcacccaggccagcaccagtcgctcagccaccagcagcggcacccccatctgcagttggctcttctgctgctgcgccccggcagccaggtctgatggcccagatggcaaccactgcagctggcgtggctgtgggctctgctgtggggcacacattgggtcacgccattactgggggcttcagtggaggaagtaatgctgagcctgcgaggcctgacatcacttaccaggagcctcagggaacccagccagcacagcagcagcagccttgcctctatgagatcaaacagtttctggagtgtgcccagaaccagggtgacatcaagctctgtgagggtttcaatgaggtgctgaaacagtgccgacttgcaaacggattggcctaatgaagaagttcaacctggagagatggaaaatcagctctcataactaagttaatttagtataaaaatagaattgatagtgagggtataaagtgtaaccatcagttaaacctctcctgtcattcctagcttccttgcttcagaattgaaatggaagtgggggtgtccctactctgtagaatctgggactgggcaaatgtttgtgtggcctccttaaactagctgttatgttatgattttattctttgtgagttaattagaataaagtcattttcttcca

SEQ ID NO: 310524 - DNA, 1102 bp, Homo sapiens
  misc_feature (936)..(936): n is a, c, g, or t
gccaagttcagggcgttgaccgcgaaggacgaggcgtccccgtgacgtcctgctcttccaatgaacttcaggcctgcggagacgacggagaacggaagttctctgcctgtgtgctggttggttgcgcgttgaggccagccccgcctcccatcttccggtctcctcagaagtcgcttagctcttcggtggttgtcacacgtccggaggcctagccgtcgcgtacctaggatgccgcgtggaagccgaagccgcacctcccgcatggcccctccggccagccgggcccctcagatgagagctgcacccaggccagcaccagtcgctcagccaccagcagcggcacccccatctgcagttggctcttctgctgctgcgccccggcagccaggtctgatggcccagatggcaaccactgcagctggcgtggctgtgggctctgctgtggggcacacattgggtcacgccattactgggggcttcagtggaggaagtaatgctgagcctgcgaggcctgacatcacttaccaggagcctcagggaacccagccagcacagcagcagcagccttgcctctatgagatcaaacagtttctggagtgtgcccagaaccagggtgacatcaagctctgtgagggtttcaatgaggtgctgaaacagtgccgacttgcaaacggattggcctaatgaagaagttcaacctggagagatggaaaatcagctctcataactaagttaatttagtataaaaatagaattgatagtgagggtataaagtgtaaccatcagttaaacctctcctgtcattcctagcttccttgcttcagaattgaaatggaagtgggggtgtccctactctgtagaatctgggactgggcaaatgtttgtgtggcctccttaaactagctgaatctgtggagtatagataagcattcttcnaaaaaaaaaaaaagcggggtttaggtgggcggggaaagggttggaaggcaggcatagggtcggccggtttgaaggagatggggccaaggggataataagagtgagatatgaagaaggtgagagtatggggagagggagggagaaatgaaaagttgagagaagagaa

SEQ ID NO: 310525 - DNA, 1649 bp, Homo sapiens
gccaagttcagggcgttgaccgcgaaggacgaggcgtccccgtgacgtcctgctcttccaatgaacttcaggcctgcggagacgacggagaacggaagttctctgcctgtgtgctggttggttgcgcgttgaggccagccccgcctcccatcttccggtctcctcagaagtcgcttagctcttcggtggttgtcacacgtccggaggcctagccgtcgcgtacctaggatgccgcgtggaagccgaagccgcacctcccgcatggcccctccggccagccgggcccctcagatgagagctgcacccaggccagcaccagtcgctcagccaccagcagcggcacccccatctgcagttggctcttctgctgctgcgccccggcagccaggtctgatggcccagatggcaaccactgcagctggcgtggctgtgggctctgctgtggggcacacattgggtcacgccattactgggggcttcagtggaggaagtaatgctgagcctgcgaggcctgacatcacttaccaggagcctcagggaacccagccagcacagcagcagcagccttgcctctatgagatcaaacagtttctggagtgtgcccagaaccagggtgacatcaagctctgtgagggtttcaatgaggtgctgaaacagtgccgacttgcaaacggattggcctaatgaagaagttcaacctggagagatggaaaatcagctctcataactaagttaatttagtataaaaatagaattgatagtgagggtataaagtgtaaccatcagttaaacctctcctgtcattcctagcttccttgcttcagaattgaaatggaagtgggggtgtccctactctgtagaatctgggactgggcaaatgtttgtgtggcctccttaaactagctgttatgttatgattttattctttgtgagttaattagaataaagtcattttcttccaaggtatggttcatttagtctatagtctctggttatgaaattagcatcctcccagatctgacagctccctgaggggttatataaggagtagctcacttgcaaacataacatgctgctcaattcaaaggttctagctgctgtgggtctggagttatgtaagctgagcagtagcaggaaactctgcttaaaatattgtttaaagctgtgcgtgctggcatgtgcctgtaatcccagctacttgggagactgaggcgggagaatcacttgaacccaggaggtggaggttgcagtgaactgagaccatgccactgcactcactgacagagcaagactctgtctcaaaaaaaaaaaaaaaatacattgttttaatcaggtgaatgataaaggaaacaggaataggtctatttggggtgggttccctgtggctaggtcagcactgcgtatcactattcctctactgtttccaagcaagcttgtgcaacccaccttttgttctgttttcttttgctttaggcttttagcagcctggagttatagtttgtctctagtgataagtggaaaagagcgatgaggaaggggttttactggcctaaccataaactgtaactaaacccatgactgcattctctcccttggacgcccctgattgaagataaaaaaccattcttaatatatgcagttcccctgaa

SEQ ID NO: 310526 - DNA, 1214 bp, Homo sapiens
  misc_feature (989)..(989): n is a, c, g, or t
  misc_feature (993)..(993): n is a, c, g, or t
gccaagttcagggcgttgaccgcgaaggacgaggcgtccccgtgacgtcctgctcttccaatgaacttcaggcctgcggagacgacggagaacggaagttctctgcctgtgtgctggttggttgcgcgttgaggccagccccgcctcccatcttccggtctcctcagaagtcgcttagctcttcggtggttgtcacacgtccggaggcctagccgtcgcgtacctaggatgccgcgtggaagccgaagccgcacctcccgcatggcccctccggccagccgggcccctcagatgagagctgcacccaggccagcaccagtcgctcagccaccagcagcggcacccccatctgcagttggctcttctgctgctgcgccccggcagccaggtctgatggcccagatggcaaccactgcagctggcgtggctgtgggctctgctgtggggcacacattgggtcacgccattactgggggcttcagtggaggaagtaatgctgagcctgcgaggcctgacatcacttaccaggagcctcagggaacccagccagcacagcagcagcagccttgcctctatgagatcaaacagtttctggagtgtgcccagaaccagggtgacatcaagctctgtgagggtttcaatgaggtgctgaaacagtgccgacttgcaaacggattggcctaatgaagaagttcaacctggagagatggaaaatcagctctcataactaagttaatttagtataaaaatagaattgatagtgagggtataaagtgtaaccatcagttaaacctctcctgtcattcctagcttccttgcttcagaattgaaatggaagtgggggtgtccctactctgtagaatctgggactgggcaaatgtttgtgtggcctccttaaactagctgttatgttatgattttattctttgtgagttaattagaataaagtcattttcttccaaaaaaaaaaaaaaaaacaaaaaaaaaanaaanaaacaaaaaagagaggaagaacaccaaaacaagaagaacaacacgagaaagaaccgacaaaagaaaaagaagaacgaaacaaaaaaaaaggagagagaagaggggcgggcgccaacaacgaagcatcgataaacgacggagactaaagaagaggcggggggccccacaaaaaaggcgggccgaagcgcgagtggctcacaaggagaggccggagcgctact

SEQ ID NO: 310527 - DNA, 1379 bp, Homo sapiens
gccaagttcagggcgttgaccgcgaaggacgaggcgtccccgtgacgtcctgctcttccaatgaacttcaggcctgcggagacgacggagaacggaagttctctgcctgtgtgctggttggttgcgcgttgaggccagccccgcctcccatcttccggtctcctcagaagtcgcttagctcttcggtggttgtcacacgtccggaggcctagccgtcgcgtacctaggatgccgcgtggaagccgaagccgcacctcccgcatggcccctccggccagccgggcccctcagatgagagctgcacccaggccagcaccagtcgctcagccaccagcagcggcacccccatctgcagttggctcttctgctgctgcgccccggcagccaggtctgatggcccagatggcaaccactgcagctggcgtggctgtgggctctgctgtggggcacacattgggtcacgccattactgggggcttcagtggaggaagtaatgctgagcctgcgaggcctgacatcacttaccaggagcctcagggaacccagccagcacagcagcagcagccttgcctctatgagatcaaacagtttctggagtgtgcccagaaccagggtgacatcaagctctgtgagggtttcaatgaggtgctgaaacagtgccgacttgcaaacggattggcctaatgaagaagttcaacctggagagatggaaaatcagctctcataactaagttaatttagtataaaaatagaattgatagtgagggtataaagtgtaaccatcagttaaacctctcctgtcattcctagcttccttgcttcagaattgaaatggaagtgggggtgtccctactctgtagaatctgggactgggcaaatgtttgtgtggcctccttaaactagctgttatgttatgattttattctttgtgagttaattagaataaagtcattttcttccaaaaaaaaaaaaaaaaaaaaaaaaaaaaaaaaaaaaaaaattggggggggggtgagcggcctctgagaaaagcgttgttcataacaccaatctccggtggggcgcgcggcgggcgccaagtgaaggggatagagggaggaccatgggcgccaataagcgcgtggtccactataggagaaagactcgggggccaaaggagagaaagggggcggggggatttttctaacaaaatataaaaaaaagcggcgcggggggggacaacgagaggcgcgtttcttggagaacaatatctctcaaagagagggagagttctcggaggggggtaatataaggggggggagttcataattaaagcgggggagggtccaaagggagaggcttgagaaatattaataatttaagcgcccgcggtctggtgc

SEQ ID NO: 310528 - DNA, 781 bp, Homo sapiens
gctagtacgaggctggttcaaattcggcagagccgtcgcgtacctaggatgccgcgtggaagccgaagccgcacctcccgcatggcccctccggccagccgggcccctcagatgagagctgcacccaggccagcaccagtcgctcagccaccagcagcggcacccccatctgcagttggctcttctgctgctgcgccccggcagccaggtctgatggcccagatggcaaccactgcagctggcgtggctgtgggctctgctgtggggcacacattgggtcacgccattactgggggcttcagtggaggaagtaatgctgagcctgcgaggcctgacatcacttaccaggagcctcagggaacccagccagcacagcagcagcagccttgcctctatgagatcaaacagtttctggagtgtgcccagaaccagggtgacatcaagctctgtgagggtttcaatgaggtgctgaaacagtgccgacttgcaaacggattggcctaatgaagaagttcaacctggagagatggaaaatcagctctcataactaagttaatttagtataaaaatagaattgatagtgagggtataaagtgtaaccatcagttaaacctctcctgtcattcctagcttccttgcttcagaattgaaatggaagtgggggtgtccctactctgtagaatctgggactgggcaaatgtttgtgtggcctccttaaactagctgttatgttatgattttattctttgtgagttaattagaataaagtcattttcttcca

SEQ ID NO: 310529 - DNA, 922 bp, Homo sapiens
  misc_feature (14)..(15): n is a, c, g, or t
aaataaggctaggnncgaggctgggtgtgaatcggccgaggtagctcttcggtggttgtcacacgtccggaggcctagccgtcgcgtacctaggatgccgcgtggaagccgaagccgcacctcccgcatggcccctccggccaggtgagaccatcgcagggtttgagaccaaagcgcggccgtccggactctactggggcaatgacgcagagggaggccgcgggcgggggtgaactaagccgggcccctcagatgagagctgcacccaggccagcaccagtcgctcagccaccagcagcggcacccccatctgcagttggctcttctgctgctgcgccccggcagccaggtctgatggcccagatggcaaccactgcagctggcgtggctgtgggctctgctgtggggcacacattgggtcacgccattactgggggcttcagtggaggaagtaatgctgagcctgcgaggcctgacatcacttaccaggagcctcagggaacccagccagcacagcagcagcagccttgcctctatgagatcaaacagtttctggagtgtgcccagaaccagggtgacatcaagctctgtgagggtttcaatgaggtgctgaaacagtgccgacttgcaaacggattggcctaatgaagaagttcaacctggagagatggaaaatcagctctcataactaagttaatttagtataaaaatagaattgatagtgagggtataaagtgtaaccatcagttaaacctctcctgtcattcctagcttccttgcttcagaattgaaatggaagtgggggtgtccctactctgtagaatctgggactgggcaaatgtttgtgtggcctccttaaactagctgttatgttatgattttattctttgtgagttaattagaataaagtcattttcttcca

SEQ ID NO: 310530 - DNA, 1034 bp, Homo sapiens
  misc_feature (809)..(809): n is a, c, g, or t
  misc_feature (813)..(813): n is a, c, g, or t
gctagtacgaggctggttcaaattcggcagagccgtcgcgtacctaggatgccgcgtggaagccgaagccgcacctcccgcatggcccctccggccagccgggcccctcagatgagagctgcacccaggccagcaccagtcgctcagccaccagcagcggcacccccatctgcagttggctcttctgctgctgcgccccggcagccaggtctgatggcccagatggcaaccactgcagctggcgtggctgtgggctctgctgtggggcacacattgggtcacgccattactgggggcttcagtggaggaagtaatgctgagcctgcgaggcctgacatcacttaccaggagcctcagggaacccagccagcacagcagcagcagccttgcctctatgagatcaaacagtttctggagtgtgcccagaaccagggtgacatcaagctctgtgagggtttcaatgaggtgctgaaacagtgccgacttgcaaacggattggcctaatgaagaagttcaacctggagagatggaaaatcagctctcataactaagttaatttagtataaaaatagaattgatagtgagggtataaagtgtaaccatcagttaaacctctcctgtcattcctagcttccttgcttcagaattgaaatggaagtgggggtgtccctactctgtagaatctgggactgggcaaatgtttgtgtggcctccttaaactagctgttatgttatgattttattctttgtgagttaattagaataaagtcattttcttccaaaaaaaaaaaaaaaaacaaaaaaaaaanaaanaaacaaaaaagagaggaagaacaccaaaacaagaagaacaacacgagaaagaaccgacaaaagaaaaagaagaacgaaacaaaaaaaaaggagagagaagaggggcgggcgccaacaacgaagcatcgataaacgacggagactaaagaagaggcggggggccccacaaaaaaggcgggccgaagcgcgagtggctcacaaggagaggccggagcgctact

SEQ ID NO: 310531 - DNA, 679 bp, Homo sapiens
ggattgaggcagtgggaattcggcacgagatacatggcggtattgagcggagtccgctggctgacccgagcgctggtctccgccgggaaccctggggcatggagaggtctgatggcccagatggcaaccactgcagctggcgtggctgtgggctctgctgtggggcacacattgggtcacgccattactgggggcttcagtggaggaagtaatgctgagcctgcgaggcctgacatcacttaccaggagcctcagggaacccagccagcacagcagcagcagccttgcctctatgagatcaaacagtttctggagtgtgcccagaaccagggtgacatcaagctctgtgagggtttcaatgaggtgctgaaacagtgccgacttgcaaacggattggcctaatgaagaagttcaacctggagagatggaaaatcagctctcataactaagttaatttagtataaaaatagaattgatagtgagggtataaagtgtaaccatcagttaaacctctcctgtcattcctagcttccttgcttcagaattgaaatggaagtgggggtgtccctactctgtagaatctgggactgggcaaatgtttgtgtggcctccttaaactagctgttatgttatgattttattctttgtgagttaattagaataaagtcattttcttcca

SEQ ID NO: 310532 - DNA, 1597 bp, Homo sapiens
gccaagttcagggcgttgaccgcgaaggacgaggcgtccccgtgacgtcctgctcttccaatgaacttcaggcctgcggagacgacggagaacggaagttctctgcctgtgtgctggttggttgcgcgttgaggccagccccgcctcccatcttccggtctcctcagaagtcgcttagctcttcggtggttgtcacacgtccggaggcctagccgtcgcgtacctaggatgccgcgtggaagccgaagccgcacctcccgcatggcccctccggccagccgggcccctcagatgagagctgcacccaggccagcaccagtcgctcagccaccagcagcggcacccccatctgcagttggctcttctgctgctgcgccccggcagccaggtctgatggcccagatggcaaccactgcagctggcgtggctgtgggctctgctgtggggcacacattgggtcacgccattactgggggcttcagtggaggaagtaatgctgagcctgcgaggcctgacatcacttaccaggagcctcagggaacccagccagcacagcagcagcagccttgcctctatgagatcaaacagtttctggagtgtgcccagaaccagggtgacatcaagctctgtgagggtttcaatgaggtgctgaaacagtgccgacttgcaaacggattggcctaatgaagaagttcaacctggagagatggaaaatcagctctcataactaagttaatttagtataaagtcattcctagcttccttgcttcagaattgaaatggaagtgggggtgtccctactctgtagaatctgggactgggcaaatgtttgtgtggcctccttaaactagctgttatgttatgattttattctttgtgagttaattagaataaagtcattttcttccaaggtatggttcatttagtctatagtctctggttatgaaattagcatcctcccagatctgacagctccctgaggggttatataaggagtagctcacttgcaaacataacatgctgctcaattcaaaggttctagctgctgtgggtctggagttatgtaagctgagcagtagcaggaaactctgcttaaaatattgtttaaagctgtgcgtgctggcatgtgcctgtaatcccagctacttgggagactgaggcgggagaatcacttgaacccaggaggtggaggttgcagtgaactgagaccatgccactgcactcactgacagagcaagactctgtctcaaaaaaaaaaaaaaaatacattgttttaatcaggtgaatgataaaggaaacaggaataggtctatttggggtgggttccctgtggctaggtcagcactgcgtatcactattcctctactgtttccaagcaagcttgtgcaacccaccttttgttctgttttcttttgctttaggcttttagcagcctggagttatagtttgtctctagtgataagtggaaaagagcgatgaggaaggggttttactggcctaaccataaactgtaactaaacccatgactgcattctctcccttggacgcccctgattgaagataaaaaaccattcttaatatatgcagttcccctgaa

SEQ ID NO: 310533 - DNA, 906 bp, Homo sapiens
gccaagttcagggcgttgaccgcgaaggacgaggcgtccccgtgacgtcctgctcttccaatgaacttcaggcctgcggagacgacggagaacggaagttctctgcctgtgtgctggttggttgcgcgttgaggccagccccgcctcccatcttccggtctcctcagaagtcgcttagctcttcggtggttgtcacacgtccggaggcctagccgtcgcgtacctaggatgccgcgtggaagccgaagccgcacctcccgcatggcccctccggccagccgggcccctcagatgagagctgcacccaggccagcaccagtcgctcagccaccagcagcggcacccccatctgcagttggctcttctgctgctgcgccccggcagccaggtctgatggcccagatggcaaccactgcagctggcgtggctgtgggctctgctgtggggcacacattgggtcacgccattactgggggcttcagtggaggaagtaatgctgagcctgcgaggcctgacatcacttaccaggagcctcagggaacccagccagcacagcagcagcagccttgcctctatgagatcaaacagtttctggagtgtgcccagaaccagggtgacatcaagctctgtgagggtttcaatgaggtgctgaaacagtgccgacttgcaaacggtaggtaatttgtccaatttacatctgcttaattcacagtggaattcctggatcctgtagaacttagggtaatctgtgtttaataaattagagaagactttgttgaaatttctctagaattaactcctaacaactgggccggaggtttctagtcatttttatgagtaattttctgaattttcttcctttagaaggtataggccaggcacagtggctcacgcttgtaatcccag

SEQ ID NO: 310534 - DNA, 350 bp, Homo sapiens
ctgtttaatgtgagagaatagaaagaatgttcatggaatgtacctgccctgtaaaatgtttgatcattttcattaatgttgcagagaatccgactgctattaagagaaagtgaacaaattaagaatttaaaagacaggttcaggcatgtcataagtgaaaacaagaaggcttaatacaaacttgttgggttttgttcgtgtgtgtgtgtgtgtgtgtgtgtgtgtttaaaaatggcgctgcatatctttgcacctaccacttataacctgaatctcacctggatttatcatttaccgttgaaaaataagtcgctgtctcgtatatcttacatggaggctgtgacctgggc

SEQ ID NO: 310535 - DNA, 3848 bp, Homo sapiens
ctgtttaatgtgagagaatagaaagaatgttcatggaatgtacctgccctgtaaaatgtttgatcattttcattaatgttgcagagaatccgactgctattaagagaaagtgaacaaattaagaatttaaaagacaggttcaggcatgtcataagtgaaaacaagaaggcttaatacaaacttgttgggttttgttcgtgtgtgtgtgtgtgtgtgtgtgtgtgtttttttttggttcagcctatctagccacctacaaataatcacatttctgttacctgaatttatttctcagcctgtaaaccttagtcactgttacctgtttcttgctcagtgaatatgatcttggcactgtcatctagaaagcaagatatttgattggttttctggttccttcgaagataataattccatatccagtttgactgattttcatacccctgaatcaactagttattttcatgaaatggtttttggatatctctcctctagtttggagaagtaataatcacaaagattaatattttgcttctagtacttacagtagaagaattttaaactggtacgtctactcctgttaaatagaaaggggattcgttgtattatgtgcttgcttttttttaatcaatagaataagattcaatgcatatttatgttttatattttccactattcaggtatcatgaaatcactctagagatgatcaatcaacatcatatttatacttttggttaattatatactactcagggaaaaaatgaacaaaaataactactcatccttcaatttcattttcttgaaacagtaagagtataatttggtatgcctcagctgtcaccattttataagtggctcattctgttcttaaagtaagtatttttattggaactcagggtaattgggggaatttatttagcttctaaaatatccggcaggatagagaagatttatttggcttcaaaaatgtctggtgaccacttctcttattagccactactgcccatttgcttcaaaaatatatttattggtctccaccatgtgtgacacacacaggatttccaaacataccacttttgagaaaaatgtgcagtaaaaaggaggtttctagaaagtgacagtaactcacatttaagcactagctgacctaggaggagacctggatcttcattctggttctgcctttcatgagacttaagacttggaggagccacctgtcctgtagaccccaagttcctcagccataagcaaacgggttaatcctaagagttcaggaccagttgggtgtcgtgaacggagccattagcaaggtctgtaggattcaaggacttgggcacattcacagtccacactattgtcatggtcattgacttactacttgagctcaaagccctgacatttcaaaaggttgtcatgataacagtgaaacctctgaatcccttaaatcagaaggcatggcaacatactttttctactggcaatagctcttacaatgagtgtttcataatgaaatagtctctgctgaagaaaacatgttttccttttgctctctctgctttgttggtttctgtgctgtgtggaattggagaagatatatgctctgaaatattttatacagattactgactactggacagggtttaccactatataacatctcaaagttattcaaggatatttaaagcatatttagtttagttacaccttattttaaaccgcagaaaacaatagctttaaaatttttgccattaaaataattataaatttatacttttactcaaggactagatcacagttttaggacaaaaatctctcctatttaaagttcataccttgtaagtatttagtttgtatattcatgaacaaatctggacatttatactttttttgtttccttatcaactgttcacaattattagttaattggtcttaacagttctacattataattgaaagaaaaattacttgagaaaataattgtttcagaatagtgcctactatatctgtgtcagctaaaaatttgtccagagttttagatataagctagtattttgtggagttttatccaggcgttaatagttcttcctggctgaaatttaatataggtgcagaatcctaaataacactgtgagatgtaatcttaactgccctcaataccttataaaactgctgcatttaacccagtgtgcatttaatgagtggctggtcgttgatacactcatcttagatgctgaaatttctgttttctccagcccttgtaaaagtgggtttcttgatgaacgcgtgctcccaatgctgaagcaaaagatttgcatttaaggagagaaatacaccctgaaatttgagtttgaaagattagaacatagagggtctctacagtgtttttctgcaacaccaagtagtcaaatctatttatagaaactctgattacaacagaaattttaaaatgaaattttccacatcggtattttgtaggaaagctcttataatcaatgcttaagctgctttttgaggcttttcttgtacagaggttgcagccaattacattttaattggtaggctgctgaataatgtttttgtatgttttaaaataatatttattttaataggttttttaacattatgcaaatcccaataaagaactgacacgttccataggccattgactgggaaattttgtgaaacacagcctaaatacacagtttttacaccaactaatttgtcttgcctttaaaactgattataactcttctttaagtacaacttttataaagaaaaaatacaacactaagactgtatgttctgtaaattatagtgtgatgacccatgcagaaccgctgtctgaagcttactcagcgattcatagccatctccagccatgttttatcaaatcacacactaaaaataaatggaaatgctacagtgaaaaaccaaaagttacagagcaacataagtaaaatgactaggcagtttcttagtaacatgtttgaaatgggaaaggtgactgactgcctttcaccagagtcttagctgtttcacgttcactattttaggttaattttcttgggaaatcaatttgaatattcccccctgtccttttgcattaaaggacgaaaatatatgttgagagtttgacagactttttaaatatgcctctttcccaattttatgtatttttggttctgcgcacacagatttatcaatgaagtacatttgcctctggctttatcacaaggaaaaaggaatcaaacattgaacacaaatgtgttccaaaccagtcttgtccatcttgtcacttttatgtgactgctcctctgaaccagaaggggcacgatagaaggccataggaatgaaagtaaatcattcaggtgaagtgagaaattcttccatatacagagtgaaaatgtgtgatttcattcctgccttcctttaaacgttgtcttgatctctgcctagtagtagttgagccctcagtcgcccaaacatgaggagagacccaactccagcagccagaatttagtatttacatttgccttcccaagttgagaatagaatgtggtgttctgtgctttctgtttttattattccaaaatatttttttaaagaagtgttatttttcaacagattcataaattagttcctgatgtacggtaaattaaaactcccactgtgtcagtcaaactgagatgtgctcatttcataaccactcatttctagtctgtcagagctgcactggtggcttattgctggtttttaaaggtgtttttaacttacatgtaacatgtttaggacatgttttttttttctaatttgtgtgtctttacaactgattaaacagtagtttaaaaata

SEQ ID NO: 310536 - DNA, 3791 bp, Homo sapiens
ctgtttaatgtgagagaatagaaagaatgttcatggaatgtacctgccctgtaaaatgtttgatcattttcattaatgttgcagagaatccgactgctattaagagaaagtgaacaaattaagaatttaaaagacaggttcaggcatgtcataagtgaaaacaagaaggcttaatacaaacttgttgggttttgttcgtgtgtgtgtgtgtgtgtgtgtgtgtgtttttttttggttcagcctatctagccacctacaaataatcacatttctgttacctgaatttatttctcagcctgtaaaccttagtcactgttacctgtttcttgctcagtgaatatgatcttggcactgtcatctagaaagcaagatatttgattggttttctggttccttcgaagataataattccatatccagtttgactgattttcatacccctgaatcaactagttattttcatgaaatggtttttggatatctctcctctagtttggagaagtaataatcacaaagattaatattttgcttctagtacttacagtagaagaattttaaactggtacgtctactcctgttaaatagaaaggggattcgttgtattatgtgcttgcttttttttaatcaatagaataagattcaatgcatatttatgttttatattttccactattcaggtatcatgaaatcactctagagatgatcaatcaacatcatatttatacttttggttaattatatactactcagggaaaaaatgaacaaaaataactactcatccttcaatttcattttcttgaaacagtaagagtataatttggtatgcctcagctgtcaccattttataagtggctcattctgttcttaaagtaagtatttttattggaactcagggtaattgggggaatttatttagcttctaaaatatccggcaggatagagaagatttatttggcttcaaaaatgtctggtgaccacttctcttattagccactactgcccatttgcttcaaaaatatatttattggtctccaccatgtgtgacacacacaggatttccaaacataccacttttgagaaaaatgtgcagtaaaaaggaggtttctagaaagtgacagtaactcacatttaagcactagctgacctaggaggagacctggatcttcattctggttctgcctttcatgagacttaagacttggaggagccacctgtcctgtagaccccaagttcctcagccataagcaaacgggttaatcctaagagttcaggaccagttgggtgtcgtgaacggagccattagcaaggtctgtaggattcaaggacttgggcacattcacagtccacactattgtcatggtcattgacttactacttgagctcaaagccctgacatttcaaaaggttgtcatgataacagtgaaacctctgaatcccttaaatcagaaggcatggcaacatactttttctactggcaatagctcttacaatgagtgtttcataatgaaatagtctctgctgaagaaaacatgttttccttttgctctctctgctttgttggtttctgtgctgtgtggaattggagaagatatatgctctgaaatattttatacagattactgactactggacagggtttaccactatataacatctcaaagttattcaaggatatttaaagcatatttagtttagttacaccttattttaaaccgcagaaaacaatagctttaaaatttttgccattaaaataattataaatttatacttttactcaaggactagatcacagttttaggacaaaaatctctcctatttaaagttcataccttgtaagtatttagtttgtatattcatgaacaaatctggacatttatactttttttgtttccttatcaactgttcacaattattagttaattggtcttaacagttctacattataattgaaagaaaaattacttgagaaaataattgtttcagaatagtgcctactatatctgtgtcagctaaaaatttgtccagagttttagatataagctagtattttgtggagttttatccaggcgttaatagttcttcctggctgaaatttaatataggtgcagaatcctaaataacactgtgagatgtaatcttaactgccctcaataccttatcatcttagatgctgaaatttctgttttctccagcccttgtaaaagtgggtttcttgatgaacgcgtgctcccaatgctgaagcaaaagatttgcatttaaggagagaaatacaccctgaaatttgagtttgaaagattagaacatagagggtctctacagtgtttttctgcaacaccaagtagtcaaatctatttatagaaactctgattacaacagaaattttaaaatgaaattttccacatcggtattttgtaggaaagctcttataatcaatgcttaagctgctttttgaggcttttcttgtacagaggttgcagccaattacattttaattggtaggctgctgaataatgtttttgtatgttttaaaataatatttattttaataggttttttaacattatgcaaatcccaataaagaactgacacgttccataggccattgactgggaaattttgtgaaacacagcctaaatacacagtttttacaccaactaatttgtcttgcctttaaaactgattataactcttctttaagtacaacttttataaagaaaaaatacaacactaagactgtatgttctgtaaattatagtgtgatgacccatgcagaaccgctgtctgaagcttactcagcgattcatagccatctccagccatgttttatcaaatcacacactaaaaataaatggaaatgctacagtgaaaaaccaaaagttacagagcaacataagtaaaatgactaggcagtttcttagtaacatgtttgaaatgggaaaggtgactgactgcctttcaccagagtcttagctgtttcacgttcactattttaggttaattttcttgggaaatcaatttgaatattcccccctgtccttttgcattaaaggacgaaaatatatgttgagagtttgacagactttttaaatatgcctctttcccaattttatgtatttttggttctgcgcacacagatttatcaatgaagtacatttgcctctggctttatcacaaggaaaaaggaatcaaacattgaacacaaatgtgttccaaaccagtcttgtccatcttgtcacttttatgtgactgctcctctgaaccagaaggggcacgatagaaggccataggaatgaaagtaaatcattcaggtgaagtgagaaattcttccatatacagagtgaaaatgtgtgatttcattcctgccttcctttaaacgttgtcttgatctctgcctagtagtagttgagccctcagtcgcccaaacatgaggagagacccaactccagcagccagaatttagtatttacatttgccttcccaagttgagaatagaatgtggtgttctgtgctttctgtttttattattccaaaatatttttttaaagaagtgttatttttcaacagattcataaattagttcctgatgtacggtaaattaaaactcccactgtgtcagtcaaactgagatgtgctcatttcataaccactcatttctagtctgtcagagctgcactggtggcttattgctggtttttaaaggtgtttttaacttacatgtaacatgtttaggacatgttttttttttctaatttgtgtgtctttacaactgattaaacagtagtttaaaaata

SEQ ID NO: 310537 - DNA, 3778 bp, Homo sapiens
  misc_feature (1386)..(1386): n is a, c, g, or t
acccaggatacactgcgcagtctgggggcggggccggagttcaagcctcggaggaagtaaatgcaaatctaagcgagcgctgtggggcgcttttcaggatgtccagcaaagaatcctgtgggaaaaaagagacatctcagaggaaagacaccaccacctcatcacccaattttggtgaaaaagacaagaaagagagaaaaaccccagcaagttctactagttcgtcttctataagatcagtttcatcagaaaagagaaaactgaaatcagatcatacagatgttctgtactataatataaaaagaagacaaggactgaaaagattgagtgtagaaattgacactctcagaaggagaccaaaaatcggttcttcatcccaaagacctattaaactcaaagaagcatcatattcaaatgataatcaaattattttgcagagtccttcttcaaatggaactaaaaaagacatacataaatgtgtagactttaaacctaaagatatcaaattgacaaatgctgggagcaagcttgaccatggagttaaaagccttagtagtcctaagattgccagtgatgtgaaacctaaagccgaaggccaggcaagtgaaaataaatggtctcatttacttgttcagagagagaagatgaaagaactcaagaaaggaagaaacagtaaatttagagacaattctgaaaaatgtgtcttagagaaatggaagagaaatcaattttctcaggattataactccaacaagataattaaggaacccttgggatctagaagacagaagatcagtttcaaaatccctataaaatcccgtgacaccctccagaaacttgtagaagaaaatgtcttcaacatagattctaataattcgaagactaagcaggaagaaagagaatacctggaaagctcccaggtttcattaaatgtgactaggcagaaaactgaacatttactttcagattttacatataagcggactgttcatgagtggaaacgaaaacatcattatgaccatcaagaaagtaatgattcacattctagggaaaacctaacccagagttttgaagcaccatgttgttccgtgtcatctgaaagtatccaggatgcagatcaagagatgcagatagtagaagagcttcatgctgcacgtgtgggaaaaagtgtggatttacctggagagttaatgagtatggaaattgacttagaagatgatgtacattcctcctctgcaaataatacttcagacagaaagcttctaattgttattgacacaaatattctgatgaatcatctcaaatttgttagaattttgaagacaacagaagtaccaggttttgacaaacttgtgttaataattccctgggtcgttatgcaagagntagatcgtatgaaggaaggaaaactactaaaacgtgcccagcacaaagctatacctgcagttcatttcatcaacgacagtctcaaaaatcaagatagaaagctatggggtcagtcaatacaacttgcatcccaaaaacattatggattgagtgatgagaacaatgatgatcgagtactaaaatgctgtctccagcaccaggaattattcccttgttcttttgttattctgtgcacggatgatagaaacttaagaaacaaaggcctaataagtggtgtgaagtcactcagtaaagaagaattgagtgcagagttattacacttatctctgaacacagatgtgtgtcatcagccttgtattcctaagcaacagttgaaagcagaaacaacacccttgaaagagagctataaggaggaatctacaaattctggactgtccattctgcttgagagcattgtatctgatcttgaaaaatctcttggaacaggtttatcttcaatattagaaacagaaatgaaaattgcttttggaaacctttggatggagatcctgtacctgaaaccaccatggactctactacatttactacagtgctttaaaaaacattggttggctgtatttggattagttatggaaaagaacttgcttttaactattgagagcctatacaaaaatctccgtaaagctaataaggcagtggattttacaacagtcaaattcttgcttcaggattctagaagtttgttacatgctttcagtacaaggtcaaattatgatggtattcttccacagacctttgctcaagtaaacaacctccttcagacatttgcagaggtcaagacaaaacttaagccaaattcttcagaaaacacagtgactaaaaagcaggaaggtacttcattgaagaattctcataatcaagaaatcactgttttctcgagttctcatcttccccaacccagcaggcatcaagaaatctggtctatcctagagagtgtttggattacaatatatcagaacagcacggatgtatttcaaagattgggctcaaattcagctctgactacttcaaatatagcatcatttgaagaagcatttatatgtcttcaaaagttaatggcagctgtgagggatattcttgaaggaattcaaaggattttggccccaaacagtaattatcaagatgttgagaccctctataacttcctaatcaagtatgaggtaaataaaaatgtcaaatttactgcccaggaaatttatgattgtgtttctcagactgagtatagggaaaagttaaccattggatgccgccagctggttgagatggaatataccatgcagcagtgcaatgcatctgtttatatggaggccaaaaacaggggatggtgtgaagacatgctcaactataggatataagtactgatttgtaactttaaaggaattgcatttgtccttaagaataacagagtagttttcaatctggtcactcttttgggccaaacccaagagaattttaagaaatgtttcataggtataaaaaggtgatcgcctattactgacagtctcattgtagctctaaaaagcctaatgtatccactgtggaataaactccatagactcaactcttctggagttcacaatgcctccctacctctattcttgatagtgagccagtatctctaaggaaaggagagccgtatttttagtcatcctagggcaggagccactgtggcatctgaggaagacccagggtacagtattagcatttctttcaaccctaagtatgggcatgtgaccagagacactgccaaaccctaagaaatcattagggcatgatcatgctcaccatatttcacaaatgaaatcttaatgtgggctgttttttatgatcaaactgtcatccatgttgacctgatgaaaataacaccctccttcacctccctcagggtaatgaaagtagaaatttgactgaagctcctacttccttatacagcctttccttctgtgggcttgtcacttttcagtacatttctagtggggaagagcagggcgacccctctgctgggtttctccttaaatgtgaagcaaaataaatttatataatggaatttggtggcagtgactgatgtttgtctctagctaaaaccaactgtttagttgactttttagttataggataagttggaagtccttgtttactggaatatattatgcttttgttaacacattagattaaatagaatttggtattctattataaatgtttattttttaaagcaataaataacttatttttggtaagatttggctttttacttccaaattgtttctgatatgtacataaggtatgattataaaagtgactgtctgcaataaaagagaacttgttcagg

SEQ ID NO: 310538 - DNA, 3928 bp, Homo sapiens
  misc_feature (1536)..(1536): n is a, c, g, or t
acccaggatacactgcgcagtctgggggcggggccggagttcaagcctcggaggaagtaaatgcaaatctaagcgagcgctgtggggcggtgagtaggtagtgcggatgcgggcgcagaactacgtttcccagcaggcatacagttggtggggcggggtgtgtgtgtgtgttgggaggcgggggtccctctcctttggcttggggctccggagttgccactgccgccggcgctggtaagcttttcaggatgtccagcaaagaatcctgtgggaaaaaagagacatctcagaggaaagacaccaccacctcatcacccaattttggtgaaaaagacaagaaagagagaaaaaccccagcaagttctactagttcgtcttctataagatcagtttcatcagaaaagagaaaactgaaatcagatcatacagatgttctgtactataatataaaaagaagacaaggactgaaaagattgagtgtagaaattgacactctcagaaggagaccaaaaatcggttcttcatcccaaagacctattaaactcaaagaagcatcatattcaaatgataatcaaattattttgcagagtccttcttcaaatggaactaaaaaagacatacataaatgtgtagactttaaacctaaagatatcaaattgacaaatgctgggagcaagcttgaccatggagttaaaagccttagtagtcctaagattgccagtgatgtgaaacctaaagccgaaggccaggcaagtgaaaataaatggtctcatttacttgttcagagagagaagatgaaagaactcaagaaaggaagaaacagtaaatttagagacaattctgaaaaatgtgtcttagagaaatggaagagaaatcaattttctcaggattataactccaacaagataattaaggaacccttgggatctagaagacagaagatcagtttcaaaatccctataaaatcccgtgacaccctccagaaacttgtagaagaaaatgtcttcaacatagattctaataattcgaagactaagcaggaagaaagagaatacctggaaagctcccaggtttcattaaatgtgactaggcagaaaactgaacatttactttcagattttacatataagcggactgttcatgagtggaaacgaaaacatcattatgaccatcaagaaagtaatgattcacattctagggaaaacctaacccagagttttgaagcaccatgttgttccgtgtcatctgaaagtatccaggatgcagatcaagagatgcagatagtagaagagcttcatgctgcacgtgtgggaaaaagtgtggatttacctggagagttaatgagtatggaaattgacttagaagatgatgtacattcctcctctgcaaataatacttcagacagaaagcttctaattgttattgacacaaatattctgatgaatcatctcaaatttgttagaattttgaagacaacagaagtaccaggttttgacaaacttgtgttaataattccctgggtcgttatgcaagagntagatcgtatgaaggaaggaaaactactaaaacgtgcccagcacaaagctatacctgcagttcatttcatcaacgacagtctcaaaaatcaagatagaaagctatggggtcagtcaatacaacttgcatcccaaaaacattatggattgagtgatgagaacaatgatgatcgagtactaaaatgctgtctccagcaccaggaattattcccttgttcttttgttattctgtgcacggatgatagaaacttaagaaacaaaggcctaataagtggtgtgaagtcactcagtaaagaagaattgagtgcagagttattacacttatctctgaacacagatgtgtgtcatcagccttgtattcctaagcaacagttgaaagcagaaacaacacccttgaaagagagctataaggaggaatctacaaattctggactgtccattctgcttgagagcattgtatctgatcttgaaaaatctcttggaacaggtttatcttcaatattagaaacagaaatgaaaattgcttttggaaacctttggatggagatcctgtacctgaaaccaccatggactctactacatttactacagtgctttaaaaaacattggttggctgtatttggattagttatggaaaagaacttgcttttaactattgagagcctatacaaaaatctccgtaaagctaataaggcagtggattttacaacagtcaaattcttgcttcaggattctagaagtttgttacatgctttcagtacaaggtcaaattatgatggtattcttccacagacctttgctcaagtaaacaacctccttcagacatttgcagaggtcaagacaaaacttaagccaaattcttcagaaaacacagtgactaaaaagcaggaaggtacttcattgaagaattctcataatcaagaaatcactgttttctcgagttctcatcttccccaacccagcaggcatcaagaaatctggtctatcctagagagtgtttggattacaatatatcagaacagcacggatgtatttcaaagattgggctcaaattcagctctgactacttcaaatatagcatcatttgaagaagcatttatatgtcttcaaaagttaatggcagctgtgagggatattcttgaaggaattcaaaggattttggccccaaacagtaattatcaagatgttgagaccctctataacttcctaatcaagtatgaggtaaataaaaatgtcaaatttactgcccaggaaatttatgattgtgtttctcagactgagtatagggaaaagttaaccattggatgccgccagctggttgagatggaatataccatgcagcagtgcaatgcatctgtttatatggaggccaaaaacaggggatggtgtgaagacatgctcaactataggatataagtactgatttgtaactttaaaggaattgcatttgtccttaagaataacagagtagttttcaatctggtcactcttttgggccaaacccaagagaattttaagaaatgtttcataggtataaaaaggtgatcgcctattactgacagtctcattgtagctctaaaaagcctaatgtatccactgtggaataaactccatagactcaactcttctggagttcacaatgcctccctacctctattcttgatagtgagccagtatctctaaggaaaggagagccgtatttttagtcatcctagggcaggagccactgtggcatctgaggaagacccagggtacagtattagcatttctttcaaccctaagtatgggcatgtgaccagagacactgccaaaccctaagaaatcattagggcatgatcatgctcaccatatttcacaaatgaaatcttaatgtgggctgttttttatgatcaaactgtcatccatgttgacctgatgaaaataacaccctccttcacctccctcagggtaatgaaagtagaaatttgactgaagctcctacttccttatacagcctttccttctgtgggcttgtcacttttcagtacatttctagtggggaagagcagggcgacccctctgctgggtttctccttaaatgtgaagcaaaataaatttatataatggaatttggtggcagtgactgatgtttgtctctagctaaaaccaactgtttagttgactttttagttataggataagttggaagtccttgtttactggaatatattatgcttttgttaacacattagattaaatagaatttggtattctattataaatgtttattttttaaagcaataaataacttatttttggtaagatttggctttttacttccaaattgtttctgatatgtacataaggtatgattataaaagtgactgtctgcaataaaagagaacttgttcagg

SEQ ID NO: 310539 - DNA, 3768 bp, Homo sapiens
  misc_feature (1376)..(1376): n is a, c, g, or t
agcgggggtgcgggcccgagccctcgctggccggcgggtctaggactgatcatgaacggcaggcggtgacctcgcccgcaccattgcatgtcccggacctcaatcctgtgggaaaaaagagacatctcagaggaaagacaccaccacctcatcacccaattttggtgaaaaagacaagaaagagagaaaaaccccagcaagttctactagttcgtcttctataagatcagtttcatcagaaaagagaaaactgaaatcagatcatacagatgttctgtactataatataaaaagaagacaaggactgaaaagattgagtgtagaaattgacactctcagaaggagaccaaaaatcggttcttcatcccaaagacctattaaactcaaagaagcatcatattcaaatgataatcaaattattttgcagagtccttcttcaaatggaactaaaaaagacatacataaatgtgtagactttaaacctaaagatatcaaattgacaaatgctgggagcaagcttgaccatggagttaaaagccttagtagtcctaagattgccagtgatgtgaaacctaaagccgaaggccaggcaagtgaaaataaatggtctcatttacttgttcagagagagaagatgaaagaactcaagaaaggaagaaacagtaaatttagagacaattctgaaaaatgtgtcttagagaaatggaagagaaatcaattttctcaggattataactccaacaagataattaaggaacccttgggatctagaagacagaagatcagtttcaaaatccctataaaatcccgtgacaccctccagaaacttgtagaagaaaatgtcttcaacatagattctaataattcgaagactaagcaggaagaaagagaatacctggaaagctcccaggtttcattaaatgtgactaggcagaaaactgaacatttactttcagattttacatataagcggactgttcatgagtggaaacgaaaacatcattatgaccatcaagaaagtaatgattcacattctagggaaaacctaacccagagttttgaagcaccatgttgttccgtgtcatctgaaagtatccaggatgcagatcaagagatgcagatagtagaagagcttcatgctgcacgtgtgggaaaaagtgtggatttacctggagagttaatgagtatggaaattgacttagaagatgatgtacattcctcctctgcaaataatacttcagacagaaagcttctaattgttattgacacaaatattctgatgaatcatctcaaatttgttagaattttgaagacaacagaagtaccaggttttgacaaacttgtgttaataattccctgggtcgttatgcaagagntagatcgtatgaaggaaggaaaactactaaaacgtgcccagcacaaagctatacctgcagttcatttcatcaacgacagtctcaaaaatcaagatagaaagctatggggtcagtcaatacaacttgcatcccaaaaacattatggattgagtgatgagaacaatgatgatcgagtactaaaatgctgtctccagcaccaggaattattcccttgttcttttgttattctgtgcacggatgatagaaacttaagaaacaaaggcctaataagtggtgtgaagtcactcagtaaagaagaattgagtgcagagttattacacttatctctgaacacagatgtgtgtcatcagccttgtattcctaagcaacagttgaaagcagaaacaacacccttgaaagagagctataaggaggaatctacaaattctggactgtccattctgcttgagagcattgtatctgatcttgaaaaatctcttggaacaggtttatcttcaatattagaaacagaaatgaaaattgcttttggaaacctttggatggagatcctgtacctgaaaccaccatggactctactacatttactacagtgctttaaaaaacattggttggctgtatttggattagttatggaaaagaacttgcttttaactattgagagcctatacaaaaatctccgtaaagctaataaggcagtggattttacaacagtcaaattcttgcttcaggattctagaagtttgttacatgctttcagtacaaggtcaaattatgatggtattcttccacagacctttgctcaagtaaacaacctccttcagacatttgcagaggtcaagacaaaacttaagccaaattcttcagaaaacacagtgactaaaaagcaggaaggtacttcattgaagaattctcataatcaagaaatcactgttttctcgagttctcatcttccccaacccagcaggcatcaagaaatctggtctatcctagagagtgtttggattacaatatatcagaacagcacggatgtatttcaaagattgggctcaaattcagctctgactacttcaaatatagcatcatttgaagaagcatttatatgtcttcaaaagttaatggcagctgtgagggatattcttgaaggaattcaaaggattttggccccaaacagtaattatcaagatgttgagaccctctataacttcctaatcaagtatgaggtaaataaaaatgtcaaatttactgcccaggaaatttatgattgtgtttctcagactgagtatagggaaaagttaaccattggatgccgccagctggttgagatggaatataccatgcagcagtgcaatgcatctgtttatatggaggccaaaaacaggggatggtgtgaagacatgctcaactataggatataagtactgatttgtaactttaaaggaattgcatttgtccttaagaataacagagtagttttcaatctggtcactcttttgggccaaacccaagagaattttaagaaatgtttcataggtataaaaaggtgatcgcctattactgacagtctcattgtagctctaaaaagcctaatgtatccactgtggaataaactccatagactcaactcttctggagttcacaatgcctccctacctctattcttgatagtgagccagtatctctaaggaaaggagagccgtatttttagtcatcctagggcaggagccactgtggcatctgaggaagacccagggtacagtattagcatttctttcaaccctaagtatgggcatgtgaccagagacactgccaaaccctaagaaatcattagggcatgatcatgctcaccatatttcacaaatgaaatcttaatgtgggctgttttttatgatcaaactgtcatccatgttgacctgatgaaaataacaccctccttcacctccctcagggtaatgaaagtagaaatttgactgaagctcctacttccttatacagcctttccttctgtgggcttgtcacttttcagtacatttctagtggggaagagcagggcgacccctctgctgggtttctccttaaatgtgaagcaaaataaatttatataatggaatttggtggcagtgactgatgtttgtctctagctaaaaccaactgtttagttgactttttagttataggataagttggaagtccttgtttactggaatatattatgcttttgttaacacattagattaaatagaatttggtattctattataaatgtttattttttaaagcaataaataacttatttttggtaagatttggctttttacttccaaattgtttctgatatgtacataaggtatgattataaaagtgactgtctgcaataaaagagaacttgttcagg

SEQ ID NO: 310540 - DNA, 3492 bp, Homo sapiens
  misc_feature (1386)..(1386): n is a, c, g, or t
acccaggatacactgcgcagtctgggggcggggccggagttcaagcctcggaggaagtaaatgcaaatctaagcgagcgctgtggggcgcttttcaggatgtccagcaaagaatcctgtgggaaaaaagagacatctcagaggaaagacaccaccacctcatcacccaattttggtgaaaaagacaagaaagagagaaaaaccccagcaagttctactagttcgtcttctataagatcagtttcatcagaaaagagaaaactgaaatcagatcatacagatgttctgtactataatataaaaagaagacaaggactgaaaagattgagtgtagaaattgacactctcagaaggagaccaaaaatcggttcttcatcccaaagacctattaaactcaaagaagcatcatattcaaatgataatcaaattattttgcagagtccttcttcaaatggaactaaaaaagacatacataaatgtgtagactttaaacctaaagatatcaaattgacaaatgctgggagcaagcttgaccatggagttaaaagccttagtagtcctaagattgccagtgatgtgaaacctaaagccgaaggccaggcaagtgaaaataaatggtctcatttacttgttcagagagagaagatgaaagaactcaagaaaggaagaaacagtaaatttagagacaattctgaaaaatgtgtcttagagaaatggaagagaaatcaattttctcaggattataactccaacaagataattaaggaacccttgggatctagaagacagaagatcagtttcaaaatccctataaaatcccgtgacaccctccagaaacttgtagaagaaaatgtcttcaacatagattctaataattcgaagactaagcaggaagaaagagaatacctggaaagctcccaggtttcattaaatgtgactaggcagaaaactgaacatttactttcagattttacatataagcggactgttcatgagtggaaacgaaaacatcattatgaccatcaagaaagtaatgattcacattctagggaaaacctaacccagagttttgaagcaccatgttgttccgtgtcatctgaaagtatccaggatgcagatcaagagatgcagatagtagaagagcttcatgctgcacgtgtgggaaaaagtgtggatttacctggagagttaatgagtatggaaattgacttagaagatgatgtacattcctcctctgcaaataatacttcagacagaaagcttctaattgttattgacacaaatattctgatgaatcatctcaaatttgttagaattttgaagacaacagaagtaccaggttttgacaaacttgtgttaataattccctgggtcgttatgcaagagntagatcgtatgaaggaaggaaaactactaaaacgtgcccagcacaaagctatacctgcagttcatttcatcaacgacagtctcaaaaatcaagatagaaagctatggggtcagtcaatacaacttgcatcccaaaaacattatggattgagtgatgagaacaatgatgatcgagtactaaaatgctgtctccagcaccaggaattattcccttgttcttttgttattctgtgcacggatgatagaaacttaagaaacaaaggcctaataagtggtgtgaagtcactcagtaaagaagaattgagtgcagagttattacacttatctctgaacacagatgtgtgtcatcagccttgtattcctaagcaacagttgaaagcagaaacaacacccttgaaagagagctataaggaggaatctacaaattctggactgtccattctgcttgagagcattgtatctgatcttgaaaaatctcttggaacaggtttatcttcaatattagaaacagaaatgaaaattgcttttggaaacctttggatggagatcctgtacctgaaaccaccatggactctactacatttactacagtgctttaaaaaacattggttggctgtatttggattagttatggaaaagaacttgcttttaactattgagagcctatacaaaaatctccgtaaagctaataaggcagtggattttacaacagtcaaattcttgcttcaggattctagaagtttgttacatgctttcagtacaaggtcaaattatgatggtattcttccacagacctttgctcaagtaaacaacctccttcagacatttgcagaggtcaagacaaaacttaagccaaattcttcagaaaacacagtgactaaaaagcaggaaggtacttcattgaagaattctcataatcaagaaatcactgttttctcgagttctcatcttccccaacccagcaggcatcaagaaatctggtctatcctagagagtgtttggattacaatatatcagaacagcacggatgtatttcaaagattgggctcaaattcagctctgactacttcaaatatagcatcatttgaagaagcatttatatgtcttcaaaagttaatggcagctgtgagggatattcttgaaggaattcaaaggattttggccccaaacagtaattatcaagatgttgagaccctctataacttcctaatcaagtatgaggtaaataaaaatgtcaaatttactgcccaggaaatttatgattgtgtttctcagactgagtatagggaaaagttaaccattggatgccgccagctggttgagatggaatataccatgcagcagtgcaatgcatctgtttatatggaggccaaaaacaggggatggtgtgaagacatgctcaactataggatataagtactgatttgtaactttaaaggaattgcatttgtccttaagaataacagagtagttttcaatctggtcactcttttgggccaaacccaagagaattttaagaaatgtttcataggtataaaaaggtgatcgcctattactgacagtctcattgtagctctaaaaagcctaatgtatccactgtggaataaactccatagactcaactcttctggagttcacaatgcctccctacctctattcttgatagtgagccagtatctctaaggaaaggagagccgtatttttagtcatcctagggcaggagccactgtggcatctgaggaagacccagggtacagtattagcatttctttcaaccctaagtatgggcatgtgaccagagacactgccaaaccctaagaaatcattagggcatgatcatgctcaccatatttcacaaatgaaatcttaatgtgggctgttttttatgatcaaactgtcatccatgttgacctgatgaaaataacaccctccttcacctccctcagggtaatgaaagtagaaatttgactgaagctcctacttccttatacagcctttccttctgtgggcttgtcacttttcagtacatttctagtggggaagagcagggcgacccctctgctgggtttctccttaaatgtgaagcaaaataaatttatataatgga

SEQ ID NO: 310541 - DNA, 1259 bp, Homo sapiens
acccaggatacactgcgcagtctgggggcggggccggagttcaagcctcggaggaagtaaatgcaaatctaagcgagcgctgtggggcgcttttcaggatgtccagcaaagaatcctgtgggaaaaaagagacatctcagaggaaagacaccaccacctcatcacccaattttggtgaaaaagacaagaaagagagaaaaaccccagcaagttctactagttcgtcttctataagatcagtttcatcagaaaagagaaaactgaaatcagatcatacagatgttctgtactataatataaaaagaagacaaggactgaaaagattgagtgtagaaattgacactctcagaaggagaccaaaaatcggttcttcatcccaaagacctattaaactcaaagaagcatcatattcaaatgataatcaaattattttgcagagtccttcttcaaatggaactaaaaaagacatacataaatgtgtagactttaaacctaaagatatcaaattgacaaatgctgggagcaagcttgaccatggagttaaaagccttagtagtcctaagattgccagtgatgtgaaacctaaagccgaaggccaggcaagtgaaaataaatggtctcatttacttgttcagagagagaagatgaaagaactcaagaaaggaagaaacagtaaatttagagacaattctgaaaaatgtgtcttagagaaatggaagagaaatcaattttctcaggattataactccaacaagataattaaggaacccttgggatctagaagacagaagatcagtttcaaaatccctataaaatcccgtgacaccctccagaaacttgtagaagaaaatgtcttcaacatagattctaataattcgaagactaagcaggaagaaagagaatacctggaaagctcccaggtttcattaaatgtgactaggcagaaaactgaacatttactttcagattttacatataagcggactgttcatgagtggaaacgaaaacatcattatgaccatcaagaaagtaatgattcacattctagggaaaacctaacccaggtaaggtagtaaaaaatgaagaatataggttttaactgagagtttattaatatagttaagttttttctgtatttctatatttttttctgttttttttttttgttgttgttgtttgttttttgtttttgaggcggggtctcgctccgttgcccactgcattccagccttggtgacagaacaagaccctctctctct

SEQ ID NO: 310542 - DNA, 2919 bp, Homo sapiens
ggcttttccacagtgggtcggaccaatcgcgcccgctccgacgtgtccaggtccgcggccccgggagcttggcgcggcccggcctggatgcgctgggcggagggtgcaggggagggcacggcgccgcttgcttggcctgcgcacccggacctagaagccgggacgagccggggcagagccaggcgcgcggaagtctgaaggtgccctccagacacggccccgatgactgaactacagcaagatgtggaagacacaaagcctgcgaaagtgctcgggaagagggagagcaaacttggctcagcccactcagaggctgagaatggtgtggaggagaaaaagaaagcctgcaggtcgccaacagcccaatcccctaccccatctgtggaggcggactccccagaccagaagaaaatcattagcctatggtcaaaatccagttttgatggtgcctctttagcaagtgataagaacgactgtaaaacagaaagcaaaaatgaccctaagactgaaagaaaaaagtcttcatcttccagccagtacaaggccaatatgcactttcacaagttgtttcttagtgtcccaacggaggaaccactgaagcaaagctttacctgtgctctacagaaagaaatactataccaaggaaagctctttgtatcagaaaactggatttgttttcattccaaagtctttggaaaagacacaaagatctctattccagctttctcggtaaccctaataaagaaaaccaaaactgctcttctagtgccaaacgccctgatcatagcaacagtcacagacaggtacatatttgtctccttactctccagagattcaacttacaaactactaaaatctgtgtgtggacacttagaaaatacaagtgttggtaacagtcccaatccatcttctgctgaaaacagtttccgagcagaccgcccttcatctctgcctctggatttcaatgatgaattctcagatctggatggagtggttcaacaaagaaggcaagacatggaaggatatagcagttctggttctcaaactcctgaatctgagaactctcgagatttccatgcgacagaatcccaaacagttctgaatgtctccaagggagaagcaaagccaactcgggcagatgcccatgtgaacagagtacctgaaggaaaagccaagagtctccctgtacagggtctgtcagaaactgttggaatcttacataaagtcaagtctcagaaatgtccgatgcttcaccatattcttatattctatgcaattgttgtctgtgcactaatcatctcgaccttctacatgagatacagaattaatactctggaggagcagctggggttactaacctccattgtggacacccataatactgaacaggcagcaccatctggcctgaggtcacaagtacaattcaatgtggaggttctctgtcaagagcttacagctaacatagtgaaattagaaaagatacaaaataacttacagaagttgcttgagaatggtgactgatcgaccagattgcttgggccatcggaatacctcatgtttccctttgaagaaggtgcttcccgaggcgttttgtttgagtgcaccctgctggtcagaggtgcaagcagatgagaatccagacattgcatgtggaggtctccagctcaggaaagtggggagggaaataattttggttcttgtgcaataaaagttgaccttgactctctgaggaagattttgctgcttttgcctgaagaaaacagacccatctctggaggtctcaggaagggcccagcgaacacactctcttggataattaccacgatggcgtcagcaaacactccaccctgtgcctttttagtccttcccgccctcctgcctctcccttacacccctcttaacgactttcaaactaaaggatacatcatatactgacaaactcaatgtggtcctttcaagaattagccatgagtctcaaaaaggcaataaatggctctaagtggacaggtttgcttcaaacaagtaacatctacattttgtcttttttttttcagttctcctgttatgttctggttgaaatcacctgtgtgtcttaatttctcaattcctttttggcaagaatatcaagcaaggtgaatttaacattatgtttatgttttgttttgttgctgtaactaatagttaattggactgattcttacccagccctggtcaagaatctgtgaggcatgtgactgaagtactaaattaaacttattttgaaaccaaacctaatttttaagccaaaaggtgtaatagtgatttaatacaggatgaaaaacactgaatttttaagactgtaggtggactatgttagtagttttcaagcaggatgtctgtattcagcattcaataatgctaaaatccctttcagcatgaaatttgtatgtttttatcctttgctgactaaaataaaataactggtggtttgctaactatttaccatatgggttggctggtttttattaataattgtttagggtatcataagatctgtaagtacaaaggatattctgtttctatctgcaatgcatttgataatcatttctatgaaatgtattttatttaatcagataagctaataagcgaattggttacatcgtttgtatctgttggcctagtggacagctgtgcctggtgcacctctggcttttaataaatactcattggttgaaacaccctgctaacactgtgttttgtcagttcgtaaattcctttaaccaagacttaactatgctttttaactctttttccacctgccatctactactaccaactcacttatacttccttcctcccaagtaatcatttcaaaactaaaaaaggatttaagttcttgggttacaacggtttaaaggaaagaaaatgaactttgaagtc

SEQ ID NO: 310543 - DNA, 2480 bp, Homo sapiens
ggcttttccacagtgggtcggaccaatcgcgcccgctccgacgtgtccaggtccgcggccccgggagcttggcgcggcccggcctggatgcgctgggcggagggtgcaggggagggcacggcgccgcttgcttggcctgcgcacccggacctagaagccgggacgagccggggcagagccaggcgcgcggaagtctgaaggtgccctccagacacggccccgatgactgaactacagcaagatgtggaagacacaaagcctgcgaaagtgctcgggaagagggagagcaaacttggctcagcccactcagaggctgagaatggtgtggaggagaaaaagaaagcctgcaggtcgccaacagcccaatcccctaccccatctgtggaggcggactccccagaccagaagaaaatcattagcctatggtcaaaatccagttttgatggtgcctctttagcaagtgataagaacgactgtaaaacagaaagcaaaaatgaccctaagactgaaagaaaaaagtcttcatcttccagccagtacaaggccaatatgcactttcacaagttgtttcttagtgtcccaacggaggaaccactgaagcaaagctttacctgtgctctacagaaagaaatactataccaaggaaagctctttgtatcagaaaactggatttgttttcattccaaagtctttggaaaagacacaaagatctctattccagctttctcggtaaccctaataaagaaaaccaaaactgctcttctagtgccaaacgccctgatcatagcaacagtcacagacaggtacatatttgtctccttactctccagagattcaacttacaaactactaaaatctgtgtgtggacacttagaaaatacaagtgttggtaacagtcccaatccatcttctgctgaaaacagtttccgagcagaccgcccttcatctctgcctctggatttcaatgatgaattctcagatctggatggagtggttcaacaaagaaggcaagacatggaaggatatagcagttctggttctcaaactcctgaatctgagaactctcgagatttccatgcgacagaatcccaaacagttctgaatgtctccaagggagaagcaaagccaactcgggcagatgcccatgtgaacagagtacctgaaggaaaagccaagagtctccctgtacagggtctgtcagaaactgttggaatcttacataaagtcaagtctcagaaatgtccgatgcttcaccatattcttatattctatgcaattgttgtctgtgcactaatcatctcgaccttctacatgagatacagaattaatactctggaggagcagctggggttactaacctccattgtggacacccataatactgaacaggcagcaccatctggcctgaggtcacaagtacaattcaatgtggaggttctctgtcaagagcttacagctaacatagtgaaattagaaaagatacaaaataacttacagaagttgcttgagaatggtgactgatcgaccagattgcttgggccatcggaatacctcatgtttccctttgaagaaggtgcttcccgaggcgttttgtttgagtgcaccctgctggtcagaggtgcaagcagatgagaatccagacattgcatgtggaggtctccagctcaggaaagtggggagggaaataattttggttcttgtgcaataaaagttgaccttgactctctgaggaagattttgctgcttttgcctgaagaaaacagacccatctctggaggtctcaggaagggcccagcgaacacactctcttggataattaccacgatggcgtcagcaaacactccaccctgtgcctttttagtccttcccgccctcctgcctctcccttacacccctcttaacgactttcaaactaaaggatacatcatatactgacaaactcaatgtggtcctttcaagaattagccatgagtctcaaaaaggcaataaatggctctaagtggacaggtttgcttcaaacaagtaacatctacattttgtcttttttttttcagttctcctgttatgttctggttgaaatcacctgtgtgtcttaatttctcaattcctttttggcaagaatatcaagcaaggtgaatttaacattatgtttatgttttgttttgttgctgtaactaatagttaattggactgattcttacccagccctggtcaagaatctgtgaggcatgtgactgaagtactaaattaaacttattttgaaaccaaacctaatttttaagccaaaaggtgtaatagtgatttaatacaggatgaaaaacactgaatttttaagactgtaggtggactatgttagtagttttcaagcaggatgtctgtattcagcattcaataatgctaaaatccctttcagcatgaaatttgtatgtttttatcctttgctgactaaaataaaataactggtggtttgctaactattt

SEQ ID NO: 310544 - DNA, 550 bp, Homo sapiens
gtttgggtttgggttaggttttatgagctccttgtaagcaggcactatgggttagctttttggttttttaggttttgctttgctttttactttaaattttgtacaactgctagcagagtaacaagtatatgtagagatatttaatttgtttaaaaattcctctattattctgactataattgctttaaaatccctcaaataatcctatcttcaaagaataaataattgtattgaagggttgttaggcttagcccagagctagggcaataaatagaatgtcttcagaaagacatgtgaagggtacacataaacactgtgaagaaaaacactgtctgtgaggcatgatgggaactgaaaacataacataaaatataaatgggtgggaagattaggatctctagtttcctttcagactgggctttggattctacaaacctgcatttgaatcccaactctgctgccatttaactgaatgtgttgactaggaaaagagacagtttctcaagtttcagttttcttaattccgaaatggtaaaaaaaaaaaaaaaaa

SEQ ID NO: 310545 - DNA, 331 bp, Homo sapiens
ctgttgggaaaatcccagtcgtatggagtaatccttccttctattctatgttttataggtcaggcctaggtgaaagggctgggagttacaaaggcctgcctgtttactaagggaatatcagcctgtcttcatttcactgtttcctttcaggatttcaatgatgaattctcagatctggatggagtggttcaacaaagaaggcaagacatggaaggatatagcagttctggttctcaaactcctgaatctgagaactctcgagatttgggaaattgttgtattttgactaaaatttaattcccctcaaaacatcctcaccccacccccttaa

SEQ ID NO: 310546 - DNA, 1452 bp, Homo sapiens
ggcttttccacagtgggtcggaccaatcgcgcccgctccgacgtgtccaggtccgcggccccgggagcttggcgcggcccggcctggatgcgctgggcggagggtgcaggggagggcacggcgccgcttgcttggcctgcgcacccggacctagaagccgggacgagccggggcagagccaggcgcgcggaagtctgaaggtgccctccagacacggccccgatgactgaactacagcaagatgtggaagacacaaagcctgcgaaagtgctcgggaagagggagagcaaacttggctcagcccactcagaggctgagaatggtgtggaggagaaaaagaaagcctgcaggtcgccaacagcccaatcccctaccccatctgtggaggcggactccccagaccagaagaaaatcattagcctatggtcaaaatccagttttgatggtgcctctttagcaagtgataagaacgactgtaaaacagaaagcaaaaatgaccctaagactgaaagaaaaaagtcttcatcttccagccagtacaaggccaatatgcactttcacaagttgtttcttagtgtcccaacggaggaaccactgaagcaaagctttacctgtgctctacagaaagaaatactataccaaggaaagctctttgtatcagaaaactggatttgttttcattccaaagtctttggaaaagacacaaagatctctattccagctttctcggtaaccctaataaagaaaaccaaaactgctcttctagtgccaaacgccctgatcatagcaacagtcacagacaggtacatatttgtctccttactctccagagattcaacttacaaactactaaaatctgtgtgtggacacttagaaaatacaagtgttggtaacagtcccaatccatcttctgctgaaaacagtttccgagcagaccgcccttcatctctgcctctggtaagttgcccacataactatctaaatgcaaaagaaagggaatatgtcccacaattacacttgtgcttacaccatgaccagggtgtgggaagagcttaggaccaaaatatttgaggtacagttgaagaaacagggcatatcttccttgaagaagaggaaaccatagtagccataaactttttccaagtaattgaagagttgtcctgcaaaaagaaagaaacacctagtagactatcttggtgagttactggtcagtgaatgcattcataaaatcttgctctgtttgcttgtcaatattggcttagagggattcacaaatctatttgaggtaggactgaatcatcccacaaatccttaaatgtcttctgtgttcaaggcaccatgctagtgcacactgtaggataccaggaaaaattaaaactaatttatgccttcagagacttcacaacttagaagagaaatgaatatgctcagaattaactgtaaaaaaaaaaa

SEQ ID NO: 310547 - DNA, 2865 bp, Homo sapiens
ggcttttccacagtgggtcggaccaatcgcgcccgctccgacgtgtccaggtccgcggccccgggagcttggcgcggcccggcctggatgcgctgggcggagggtgcaggggagggcacggcgccgcttgcttggcctgcgcacccggacctagaagccgggacgagccggggcagagccaggcgcgcggaagtctgaaggtgccctccagacacggccccgatgactgaactacagcaagatgtggaagacacaaagcctgcgaaagtgctcgggaagagggagagcaaacttggctcagcccactcagaggctgagaatggtgtggaggagaaaaagaaagcctgcaggtcgccaacagcccaatcccctaccccatctgtggaggcggactccccagaccagaagaaaatcattagcctatggtcaaaatccagttttgatggtgcctctttagcaagtgataagaacgactgtaaaacagaaagcaaaaatgaccctaagactgaaagaaaaaagtcttcatcttccagccagtacaaggccaatatgcactttcacaagttgtttcttagtgtcccaacggaggaaccactgaagcaaagctttacctgtgctctacagaaagaaatactataccaaggaaagctctttgtatcagaaaactggatttgttttcattccaaagtctttggaaaagacacaaagatctctattccagctttctcggtaaccctaataaagaaaaccaaaactgctcttctagtgccaaacgccctgatcatagcaacagtcacagacaggtacatatttgtctccttactctccagagattcaacttacaaactactaaaatctgtgtgtggacacttagaaaatacaagtgttggtaacagtcccaatccatcttctgctgaaaacagtttccgagcagaccgcccttcatctctgcctctggatttcaatgatgaattctcagatctggatggagtggttcaacaaagaaggcaagacatggaaggatatagcagttctggttctcaaactcctgaatctgagaactctcgagatttccatgcgacagaatcccaaacagttctgaatgtctccaagggagaagcaaagccaactcgggcagatgcccatgtgaacagagtacctgaaggtaaagtcaagtctcagaaatgtccgatgcttcaccatattcttatattctatgcaattgttgtctgtgcactaatcatctcgaccttctacatgagatacagaattaatactctggaggagcagctggggttactaacctccattgtggacacccataatactgaacaggcagcaccatctggcctgaggtcacaagtacaattcaatgtggaggttctctgtcaagagcttacagctaacatagtgaaattagaaaagatacaaaataacttacagaagttgcttgagaatggtgactgatcgaccagattgcttgggccatcggaatacctcatgtttccctttgaagaaggtgcttcccgaggcgttttgtttgagtgcaccctgctggtcagaggtgcaagcagatgagaatccagacattgcatgtggaggtctccagctcaggaaagtggggagggaaataattttggttcttgtgcaataaaagttgaccttgactctctgaggaagattttgctgcttttgcctgaagaaaacagacccatctctggaggtctcaggaagggcccagcgaacacactctcttggataattaccacgatggcgtcagcaaacactccaccctgtgcctttttagtccttcccgccctcctgcctctcccttacacccctcttaacgactttcaaactaaaggatacatcatatactgacaaactcaatgtggtcctttcaagaattagccatgagtctcaaaaaggcaataaatggctctaagtggacaggtttgcttcaaacaagtaacatctacattttgtcttttttttttcagttctcctgttatgttctggttgaaatcacctgtgtgtcttaatttctcaattcctttttggcaagaatatcaagcaaggtgaatttaacattatgtttatgttttgttttgttgctgtaactaatagttaattggactgattcttacccagccctggtcaagaatctgtgaggcatgtgactgaagtactaaattaaacttattttgaaaccaaacctaatttttaagccaaaaggtgtaatagtgatttaatacaggatgaaaaacactgaatttttaagactgtaggtggactatgttagtagttttcaagcaggatgtctgtattcagcattcaataatgctaaaatccctttcagcatgaaatttgtatgtttttatcctttgctgactaaaataaaataactggtggtttgctaactatttaccatatgggttggctggtttttattaataattgtttagggtatcataagatctgtaagtacaaaggatattctgtttctatctgcaatgcatttgataatcatttctatgaaatgtattttatttaatcagataagctaataagcgaattggttacatcgtttgtatctgttggcctagtggacagctgtgcctggtgcacctctggcttttaataaatactcattggttgaaacaccctgctaacactgtgttttgtcagttcgtaaattcctttaaccaagacttaactatgctttttaactctttttccacctgccatctactactaccaactcacttatacttccttcctcccaagtaatcatttcaaaactaaaaaaggatttaagttcttgggttacaacggtttaaaggaaagaaaatgaactttgaagtc

SEQ ID NO: 310548 - DNA, 1138 bp, Homo sapiens
ggcttttccacagtgggtcggaccaatcgcgcccgctccgacgtgtccaggtccgcggccccgggagcttggcgcggcccggcctggatgcgctgggcggagggtgcaggggagggcacggcgccgcttgcttggcctgcgcacccggacctagaagccgggacgagccggggcagagccaggcgcgcggaagtctgaaggtgccctccagacacggccccgatgactgaactacagcaagatgtggaagacacaaagcctgcgaaagtgctcgggaagagggagagcaaacttggctcagcccactcagaggctgagaatggtgtggaggagaaaaagaaagcctgcaggtcgccaacagcccaatcccctaccccatctgtggaggcggactccccagaccagaagaaaatcattagcctatggtcaaaatccagttttgatggtgcctctttagcaagtgataagaacgactgtaaaacagaaagcaaaaatgaccctaagactgaaagaaaaaagtcttcatcttccagccagtacaaggccaatatgcactttcacaagttgtttcttagtgtcccaacggaggaaccactgaagcaaagctttacctgtgctctacagaaagaaatactataccaaggaaagctctttgtatcagaaaactggatttgttttcattccaaagtctttggaaaagacacaaagatctctattccagctttctcggtaaccctaataaagaaaaccaaaactgctcttctagtgccaaacgccctgatcatagcaacagtcacagacaggtacatatttgtctccttactctccagagattcaacttacaaactactaaaatctgtgtgtggacacttagaaaatacaagtgttggtaacagtcccaatccatcttctgctgaaaacagtttccgagcagaccgcccttcatctctgcctctggatttcaatgatgaattctcagatctggatggagtggttcaacaaagaaggcaagacatggaaggatatagcagttctggttctcaaactcctgaatctgagaactctcgagatttgggaaattgttgtattttgactaaaatttaattcccctcaaaacatcctcaccccacccccttaa

SEQ ID NO: 310549 - DNA, 1495 bp, Homo sapiens
ggcttttccacagtgggtcggaccaatcgcgcccgctccgacgtgtccaggtccgcggccccgggagcttggcgcggcccggcctggatgcgctgggcggagggtgcaggggagggcacggcgccgcttgcttggcctgcgcacccggacctagaagccgggacgagccggggcagagccaggcgcgcggaagtctgaaggtgccctccagacacggccccgatgactgaactacagcaagatgtggaagacacaaagcctgcgaaagtgctcgggaagagggagagcaaacttggctcagcccactcagaggctgagaatggtgtggaggagaaaaagaaagcctgcaggtcgccaacagcccaatcccctaccccatctgtggaggcggactccccagaccagaagaaaatcattagcctatgcccatatcttctctccaaatctatgcttcattcaggaccaagagtcaaaatccagttttgatggtgcctctttagcaagtgataagaacgactgtaaaacagaaagcaaaaatgaccctaagactgaaagaaaaaagtcttcatcttccagccagtacaaggccaatatgcactttcacaagttgtttcttagtgtcccaacggaggaaccactgaagcaaagctttacctgtgctctacagaaagaaatactataccaaggaaagctctttgtatcagaaaactggatttgttttcattccaaagtctttggaaaagacacaaagatctctattccagctttctcggtaaccctaataaagaaaaccaaaactgctcttctagtgccaaacgccctgatcatagcaacagtcacagacaggtacatatttgtctccttactctccagagattcaacttacaaactactaaaatctgtgtgtggacacttagaaaatacaagtgttggtaacagtcccaatccatcttctgctgaaaacagtttccgagcagaccgcccttcatctctgcctctggtaagttgcccacataactatctaaatgcaaaagaaagggaatatgtcccacaattacacttgtgcttacaccatgaccagggtgtgggaagagcttaggaccaaaatatttgaggtacagttgaagaaacagggcatatcttccttgaagaagaggaaaccatagtagccataaactttttccaagtaattgaagagttgtcctgcaaaaagaaagaaacacctagtagactatcttggtgagttactggtcagtgaatgcattcataaaatcttgctctgtttgcttgtcaatattggcttagagggattcacaaatctatttgaggtaggactgaatcatcccacaaatccttaaatgtcttctgtgttcaaggcaccatgctagtgcacactgtaggataccaggaaaaattaaaactaatttatgccttcagagacttcacaacttagaagagaaatgaatatgctcagaattaactgtaaaaaaaaaaa

SEQ ID NO: 310550 - DNA, 1466 bp, Homo sapiens
tgtgggtttcaagtgcggctggtgccatccctctgagcagacgctgaaagagaaaacttctgagatagcacttgtgagcgaaaagcacaccaactggctcaaagagctgtggttgggcagatctggtgtaaatacaaagttccttcccgacatttcccagagtttcttgaagatcacctggcctctagaagatgacaaggagacagcaagtcctacaagcaaaaaggagcattcagcaaacattccaagcacagcttatgccctggaagagtatgttccacgggagagaagtgaagccagtgggtccagacctggaactctcagaggctgagaatggtgtggaggagaaaaagaaagcctgcaggtcgccaacagcccaatcccctaccccatctgtggaggcggactccccagaccagaagaaaatcattagcctatggtcaaaatccagttttgatggtgcctctttagcaagtgataagaacgactgtaaaacagaaagcaaaaatgaccctaagactgaaagaaaaaagtcttcatcttccagccagtacaaggccaatatgcactttcacaagttgtttcttagtgtcccaacggaggaaccactgaagcaaagctttacctgtgctctacagaaagaaatactataccaaggaaagctctttgtatcagaaaactggatttgttttcattccaaagtctttggaaaagacacaaagatctctattccagctttctcggtaaccctaataaagaaaaccaaaactgctcttctagtgccaaacgccctgatcatagcaacagtcacagacaggtacatatttgtctccttactctccagagattcaacttacaaactactaaaatctgtgtgtggacacttagaaaatacaagtgttggtaacagtcccaatccatcttctgctgaaaacagtttccgagcagaccgcccttcatctctgcctctggtaagttgcccacataactatctaaatgcaaaagaaagggaatatgtcccacaattacacttgtgcttacaccatgaccagggtgtgggaagagcttaggaccaaaatatttgaggtacagttgaagaaacagggcatatcttccttgaagaagaggaaaccatagtagccataaactttttccaagtaattgaagagttgtcctgcaaaaagaaagaaacacctagtagactatcttggtgagttactggtcagtgaatgcattcataaaatcttgctctgtttgcttgtcaatattggcttagagggattcacaaatctatttgaggtaggactgaatcatcccacaaatccttaaatgtcttctgtgttcaaggcaccatgctagtgcacactgtaggataccaggaaaaattaaaactaatttatgccttcagagacttcacaacttagaagagaaatgaatatgctcagaattaactgtaaaaaaaaaaa

SEQ ID NO: 310551 - DNA, 1515 bp, Homo sapiens
tgtgggtttcaagtgcggctggtgccatccctctgagcagacgctgaaagagaaaacttctgagatagcacttgtgagcgaaaagcacaccaactggctcaaagagctgtggttgggcagatctggtgtaaatacaaagttccttcccgacatttcccagagtttcttgaagatcacctggcctctagaagatgacaaggagacagcaagtcctacaagcaaaaaggagcattcagcaaacattccaagcacagcttatgccctggaagagtatgttccacgggagagaagtgaagccagtgggtccagacctggaactctacctctctctgaatgtctaaagtgaagcggtttcctttcttcttcagctcagaggctgagaatggtgtggaggagaaaaagaaagcctgcaggtcgccaacagcccaatcccctaccccatctgtggaggcggactccccagaccagaagaaaatcattagcctatggtcaaaatccagttttgatggtgcctctttagcaagtgataagaacgactgtaaaacagaaagcaaaaatgaccctaagactgaaagaaaaaagtcttcatcttccagccagtacaaggccaatatgcactttcacaagttgtttcttagtgtcccaacggaggaaccactgaagcaaagctttacctgtgctctacagaaagaaatactataccaaggaaagctctttgtatcagaaaactggatttgttttcattccaaagtctttggaaaagacacaaagatctctattccagctttctcggtaaccctaataaagaaaaccaaaactgctcttctagtgccaaacgccctgatcatagcaacagtcacagacaggtacatatttgtctccttactctccagagattcaacttacaaactactaaaatctgtgtgtggacacttagaaaatacaagtgttggtaacagtcccaatccatcttctgctgaaaacagtttccgagcagaccgcccttcatctctgcctctggtaagttgcccacataactatctaaatgcaaaagaaagggaatatgtcccacaattacacttgtgcttacaccatgaccagggtgtgggaagagcttaggaccaaaatatttgaggtacagttgaagaaacagggcatatcttccttgaagaagaggaaaccatagtagccataaactttttccaagtaattgaagagttgtcctgcaaaaagaaagaaacacctagtagactatcttggtgagttactggtcagtgaatgcattcataaaatcttgctctgtttgcttgtcaatattggcttagagggattcacaaatctatttgaggtaggactgaatcatcccacaaatccttaaatgtcttctgtgttcaaggcaccatgctagtgcacactgtaggataccaggaaaaattaaaactaatttatgccttcagagacttcacaacttagaagagaaatgaatatgctcagaattaactgtaaaaaaaaaaa

SEQ ID NO: 310552 - DNA, 2866 bp, Homo sapiens
tgaagaaagagcttcctgcaattcaaggactgtacaaagctgaaacgcagagattttcatattatttgggagactcagaaatgagcttttaaggttgttccttgacttgcgggtcaataagcgcacaatggtgaagaaaaggctgccttctagtgacacggtgttccggtttgagactccgggcagcccaaggaaggccaacgtggaggcctcacgcagctccacagacagccccagctcggtgttcctcagctcagaggctgagaatggtgtggaggagaaaaagaaagcctgcaggtcgccaacagcccaatcccctaccccatctgtggaggcggactccccagaccagaagaaaatcattagcctatggtcaaaatccagttttgatggtgcctctttagcaagtgataagaacgactgtaaaacagaaagcaaaaatgaccctaagactgaaagaaaaaagtcttcatcttccagccagtacaaggccaatatgcactttcacaagttgtttcttagtgtcccaacggaggaaccactgaagcaaagctttacctgtgctctacagaaagaaatactataccaaggaaagctctttgtatcagaaaactggatttgttttcattccaaagtctttggaaaagacacaaagatctctattccagctttctcggtaaccctaataaagaaaaccaaaactgctcttctagtgccaaacgccctgatcatagcaacagtcacagacaggtacatatttgtctccttactctccagagattcaacttacaaactactaaaatctgtgtgtggacacttagaaaatacaagtgttggtaacagtcccaatccatcttctgctgaaaacagtttccgagcagaccgcccttcatctctgcctctggatttcaatgatgaattctcagatctggatggagtggttcaacaaagaaggcaagacatggaaggatatagcagttctggttctcaaactcctgaatctgagaactctcgagatttccatgcgacagaatcccaaacagttctgaatgtctccaagggagaagcaaagccaactcgggcagatgcccatgtgaacagagtacctgaaggaaaagccaagagtctccctgtacagggtctgtcagaaactgttggaatcttacataaagtcaagtctcagaaatgtccgatgcttcaccatattcttatattctatgcaattgttgtctgtgcactaatcatctcgaccttctacatgagatacagaattaatactctggaggagcagctggggttactaacctccattgtggacacccataatactgaacaggcagcaccatctggcctgaggtcacaagtacaattcaatgtggaggttctctgtcaagagcttacagctaacatagtgaaattagaaaagatacaaaataacttacagaagttgcttgagaatggtgactgatcgaccagattgcttgggccatcggaatacctcatgtttccctttgaagaaggtgcttcccgaggcgttttgtttgagtgcaccctgctggtcagaggtgcaagcagatgagaatccagacattgcatgtggaggtctccagctcaggaaagtggggagggaaataattttggttcttgtgcaataaaagttgaccttgactctctgaggaagattttgctgcttttgcctgaagaaaacagacccatctctggaggtctcaggaagggcccagcgaacacactctcttggataattaccacgatggcgtcagcaaacactccaccctgtgcctttttagtccttcccgccctcctgcctctcccttacacccctcttaacgactttcaaactaaaggatacatcatatactgacaaactcaatgtggtcctttcaagaattagccatgagtctcaaaaaggcaataaatggctctaagtggacaggtttgcttcaaacaagtaacatctacattttgtcttttttttttcagttctcctgttatgttctggttgaaatcacctgtgtgtcttaatttctcaattcctttttggcaagaatatcaagcaaggtgaatttaacattatgtttatgttttgttttgttgctgtaactaatagttaattggactgattcttacccagccctggtcaagaatctgtgaggcatgtgactgaagtactaaattaaacttattttgaaaccaaacctaatttttaagccaaaaggtgtaatagtgatttaatacaggatgaaaaacactgaatttttaagactgtaggtggactatgttagtagttttcaagcaggatgtctgtattcagcattcaataatgctaaaatccctttcagcatgaaatttgtatgtttttatcctttgctgactaaaataaaataactggtggtttgctaactatttaccatatgggttggctggtttttattaataattgtttagggtatcataagatctgtaagtacaaaggatattctgtttctatctgcaatgcatttgataatcatttctatgaaatgtattttatttaatcagataagctaataagcgaattggttacatcgtttgtatctgttggcctagtggacagctgtgcctggtgcacctctggcttttaataaatactcattggttgaaacaccctgctaacactgtgttttgtcagttcgtaaattcctttaaccaagacttaactatgctttttaactctttttccacctgccatctactactaccaactcacttatacttccttcctcccaagtaatcatttcaaaactaaaaaaggatttaagttcttgggttacaacggtttaaaggaaagaaaatgaactttgaagtc

SEQ ID NO: 310553 - DNA, 822 bp, Homo sapiens
cacacatgtgggtttcaagtgcggctggtgccatccctctgagcagacgctgaaagagaaaacttctgagatagcacttgtgagcgaaaagcacaccaactggctcaaagagctgtggttgggcagatctggtgtaaatacaaagttccttcccgacatttcccagagtttcttgaagatcacctggcctctagaagatgacaaggagacagcaagtcctacaagcaaaaaggagcattcagcaaacattccaagcacagcttatgccctggaagagtatgttccacgggagagaagtgaagccagtgggtccagacctggaactgtaagtgacaggtctcagacctggaaaaaccatttgggagtggagtgtggcttctgtggtttaaaaggcctttttggtatcttaaggacagagtgtctccacatggagaatgtctttgattgcccactgggggagttttccttgtttatcatcagggtcttgagtaaaagcaagaattatcccacatactgtaatgtcctcagaaacccctgatacaagtacattttgcttataggtgtattgcacaaaactggaagtttgaggtttgtcatgtcactcaagctgaaaggggaattcaagtggagacagcagtgagcaatgctaggagtggcttgaaagatacagttgcaatctaagactctatgtgttcgggagaactcagtatttgccatttcagctcaggaaaactaggattataagatatttgcatgaagtcacacttgccatgtcaactctctacattttggttttaggttccttttaacctagaaaggtag

SEQ ID NO: 310554 - DNA, 1352 bp, Homo sapiens
gaatcattgcactccctactagagcggatgtgatgagggaaaaggagaactcagcactttccctgcaggaaccggctccctcggaggggcgtggctgggaggagctgtgagtaacgtgccacagtgttgtaaaaacccagtgagtgttataaaaacccagtcagcctggctcctgttgaatagtctaccccccttgcactctacctgacacagctgcagcctgcaattcactcccactgcctgggattgcactggatccgtgtgctcagaacaaggtgaacgcccagctgcagccatgaagatctgtagcctcaccctgctctccttcctcctactggctgctcaggtgctcctggtggaggggaaaaaaaaagtgaagaatggacttcacagcaaagtggtctcagaacaaaaggacactctgggcaacacccagattaagcagaaaagcaggcccgggaacaaaggcaagtttgtcaccaaagaccaagccaactgcagatgggctgctactgagcaggaggagggcatctctctcaaggttgagtgcactcaattggaccatgaattttcctgtgtctttgctggcaatccaacctcatgcctaaagctcaaggatgagagagtctattggaaacaagttgcccggaatctgcgctcacagaaagacatctgtagatattccaagacagctgtgaaaaccagagtgtgcagaaaggattttccagaatccagtcttaagctagtcagctccactctatttgggaacacaaagcccaggaaggagaaaacagagatgtcccccagggagcacatcaagggcaaagagaccaccccctctagcctagcagtgacccagaccatggccaccaaagctcccgagtgtgtggaggacccagatatggcaaaccagaggaagactgccctggagttctgtggagagacttggagctctctctgcacattcttcctcagcatagtgcaggacacgtcatgctaatgaggtcaaaagagaacgggttcccttaagagatgtcatgtcgtaagtccctctgtatactttaaagctctctacagtccccccaaaatatgaacttttgtgcttagtgagtgcaacgaaatatttaaacaagttttgtattttttgcttttgtgttttggaatttgccttatttttcttggatgcgatgttcagaggctgtttcctgcagcatgtatttccatggcccacacagctatgtgtttgagcagcgaagagtctttgagctgaatgagccagagtgataatttcagtgcaacgaactttctgctgaattaatggtaataaaactctgggtgtttttcagaaatac

SEQ ID NO: 310555 - DNA, 1499 bp, Homo sapiens
gaatcattgcactccctactagagcggatgtgatgagggaaaaggagaactcagcactttccctgcaggaaccggctccctcggaggggcgtggctgggaggagctgtgagtaacgtgccacagtgttgtaaaaacccagtgagtgttataaaaacccagtcagcctggctcctgttgaatagtctaccccccttgcactctacctgacacagctgcagcctgcaattcactcccactgcctgggattgcactggatccgtgtgctcagaacaaggtgaacgcccagctgcagccatgaagatctgtagcctcaccctgctctccttcctcctactggctgctcaggtgctcctggtggaggggaaaaaaaaagtgaagaatggacttcacagcaaagtggtctcagaacaaaaggacactctgggcaacacccagattaagcagaaaagcaggcccgggaacaaaggcaagtttgtcaccaaagaccaagccaactgcagatgggctgctactgagcaggaggagggcatctctctcaaggttgagtgcactcaattggaccatgaattttcctgtgtctttgctggcaatccaacctcatgcctaaagctcaaggatgagagagtctattggaaacaagttgcccggaatctgcgctcacagaaagacatctgtagatattccaagacagctgtgaaaaccagagtgtgcagaaaggattttccagaatccagtcttaagctagtcagctccactctatttgggaacacaaagcccaggaaggagaaaacagagatgtcccccagggagcacatcaagggcaaagagaccaccccctctagcctagcagtgacccagaccatggccaccaaagctcccgagtgtgtggaggacccagatatggcaaaccagaggaagactgccctggagttctgtggagagacttggagctctctctgcacattcttcctcagcatagtgcaggacacgtcatgctaatgaggtcaaaagagaacgggttcccttaagagatgtcatgtcgtaagtccctctgtatactttaaagctctctacagtccccccaaaatatgaacttttgtgcttagtgagtgcaacgaaatatttaaacaagttttgtattttttgcttttgtgttttggaatttgccttatttttcttggatgcgatgttcagaggctgtttcctgcagcatgtatttccatggcccacacagctatgtgtttgagcagcgaagagtctttgagctgaatgagccagagtgataatttcagtgcaacgaactttctgctgaattaatggtaataaaactctgggtgtttttcagaaatactacacaacacaccacaaccgcgaacaaacacaaaccgcaaccacacgcagcgagcagtggaagaaccacgccagccaaaagcagccgaagcaaccgagacgacacgcccaaatccacgcgccagcaccgcaggccagcgcccggacg

SEQ ID NO: 310556 - DNA, 826 bp, Homo sapiens
gaatcattgcactccctactagagcggatgtgatgagggaaaaggagaactcagcactttccctgcaggaaccggctccctcggaggggcgtggctgggaggagctgtgagtaacgtgccacagtgttgtaaaaacccagtgagtgttataaaaacccagtcagcctggctcctgttgaatagtctaccccccttgcactctacctgacacagctgcagcctgcaattcactcccactgcctgggattgcactggatccgtgtgctcagaacaaggtgaacgcccagctgcagccatgaagatctgtagcctcaccctgctctccttcctcctactggctgctcaggtgctcctggtggaggggaaaaaaaaagtgaagaatggacttcacagcaaagtggtctcagaacaaaaggacactctgggcaacacccagattaagcagaaaagcaggcccgggaacaaaggcaagtttgtcaccaaagaccaagccaactgcagatgggctgctactgagcaggaggagggcatctctctcaaggttgagtgcactcaattggaccatgaattttcctgtgtctttgctggcaatccaacctcatgcctaaagctcaaggatgagagagtctattggaaacaagttgcccggaatctgcgctcacagaaagacatctgtagatattccaagacagctgtgaaaaccagagtgtgcagaaaggattttccagaatccagtcttaagccaagcactccgttttgcaaaaggtgcccttcctgtccattccaaatagccacctcctctttcgagggtcctctagagcgcccg

SEQ ID NO: 310557 - DNA, 988 bp, Homo sapiens
tgtgttgttgtgtaatcgttcttatgtggccgttagtgatctctctttgtttttgtattccgggaagtgtgtgataataattgttgggtctagttaataagatgttggattataatgtagatttttggtaattgtccttgaaatgtgcgtgctgacaagatttgagggagattcagtattaatataagaggggtttaggggtcgtaggaaagtggggcaacaactaatagttgttgttaaattggttaaaaatagtagggggatgatgctaataactaggcctgtgggtgttgtgtcgatccaaaataaggtgttttctgggacagtcatgtccagtggtagtcatataattgttgggacgattaggttttagcattgagttagtttagcagttatgtgggagtgctaggggttaggcttttgagcttgaacgcctgcgtgtgaacagatgaaaaatccttcagtacccaagtcccagtctgtcctatggggagcagtttgggggcggccggcagcaggagcctgggaaagaggccctcgccaggtgatggcagggccagggtggcctggggcacccagcggaatgtgcttagtatttggtcaccagccgtcatcctgggcttttcctactgtgtcttgttacaaggcctcagcaatccacagaactctctctccttccttccacctgtcagcttctctgcttctgagataagaaccatttgtgtaacaccaacacttaacttcagaaagacatgcattatgtggtgtaatcaaacccgatgctttcagatgacctacttacatcttcaatgtggataagataaagaacaaaacacatgcatctaaactgctgggcaatccagttgacttttaaatgtaagaatggaattccaaacacttaacacattcagctatatgacagaaagtaaatctatggatatggtattttgtgaatgatcttttaaataaaagaaaaccttacgtaata

SEQ ID NO: 310558 - DNA, 847 bp, Homo sapiens
cacaaccaacacaaaagaggaaataaggctaggtacgaggctgggtgttggagacggcaaatggcggacttcgacacctacgacgatcgggcctacagcagcttcggcggcggcagagggtcccgcggcagtgctggtggccatggttcccgtagccagaaggagttgcccacagagcccccctacacagcatacgtaggaaatctacctttcaatacggttcagggcgacatagatgctatctttaaggatctcagcataaggagtgtacggctagtcagagacaaagacacagataaatttaaaggattctgctatgtagaattcgatgaagtggattcccttaaggaagccttgacatacgatggtgcactgttgggcgatcggtcacttcgtgtggacattgcagaaggcagaaaacaagataaaggtggctttggattcagaaaaggtggaccagatgacagaggaatgggtagctctcgagaatctagaggtggatgggattcccgggatgacttcaattctggcttcagggatgacttcttagggggcaggggaggtagtcgcccaggcgaccggcgaacaggcccccccatgggcagccgcttcagagatggccctcccctccgtggatccaacatggatttcagagaacccacagaagaggaaagagcacagagaccacgactccagcttaaacctcgaacagtcgcgacgcccctcaatcaagtagccaatcccaactctgctatcttcgggggtgccaggcctagagaggcagagagagtgtcaaagagacgatgactgggtgcaggagggcatgggtaaaagacccactgtaccg

SEQ ID NO: 310559 - DNA, 921 bp, Homo sapiens
cacctacctccctcaccaaagcccatacataataaaaaattataataaaccctgagaagcaagaatgaagcgaaaatctgttcgcgttcattgcattgtcgcccgcatcaatcctaggcctagcccgctcgcagtactgatcattctattatccccctctattagatccccacctccaaatatctacatcgaacaaccgactaaatccaccaacccaacaatgactaatcaaactaacctcaaatacaaataataaccatacacaaacactaataggacgaagctgatctcttatactagtatcctttaatcattgtatattgccacaaataatcctcctcggactcctgacctcgactcgattatactaccaaggcacccaactatctgagtaaaccatatgcccagtgggccatccctcttatcgatgcgggtcgcagatgattagtaggctattcgtctctaagattcaaaaaatgccctagacccacttctgtaccacagaggcagcacctacgccccgttatccccatactagttattaatcgaaagcactttggtcaccagccgtcatcctgggcttttcctactgtgtcttgttacaaggcctcagcaatccacagaactctctctccttccttccacctgtcagcttctctgcttctgagataagaaccatttgtgtaacaccaacacttaacttcagaaagacatgcattatgtggtgtaatcaaacccgatgctttcagatgacctacttacatcttcaatgtggataagataaagaacaaaacacatgcatctaaactgctgggcaatccagttgacttttaaatgtaagaatggaattccaaacacttaacacattcagctatatgacagaaagtaaatctatggatatggtattttgtgaatgatctt

SEQ ID NO: 310560 - DNA, 265 bp, Homo sapiens
  misc_feature (24)..(24): n is a, c, g, or t
  misc_feature (27)..(27): n is a, c, g, or t
gagagatcccatgcaaaggcttanttnccaggagagagatgtgaaagataatgcagagctgtataggcacgcactcaaacccgatgctttcagatgacctacttacatcttcaatgtggataagataaagaacaaaacacatgcatctaaactgctgggcaatccagttgacttttaaatgtaagaatggaattccaaacacttaacacattcagctatatgacagaaagtaaatctatggatatggtattttgtgaatgatctt

SEQ ID NO: 310561 - DNA, 436 bp, Homo sapiens
tgtggttccattcttgattttatagaaaggagaagaaaaaaaaacaattgttttccttgttgaggggggatgtctggatcttaggcagagaaagtaacttcaacttcatcgagacggcaaatggcggacttcgacacctacgacgatcgggcctacagcagcttcggcggcggcagagggtgaggcgggcgtgcgcgggccccgtcgggggctgcgggaccggcggagtcggggccgtcagggtggcggccgtcctgcgctcagccggggcggcgggaggcgggggcccgcggaggcctaggagcggcgcctggagggccggggcctggaaatggcgcgctcggagacggggcggcggcggctgggctcccggggtcttgcttgcggggcggatcccttccactgcctcccgccaacgacaacgtgttggtttttg

SEQ ID NO: 310562 - DNA, 2575 bp, Homo sapiens
tcaggcggcgcggcggacagccccggcggcggggcggggggagttatattgcggggtccttcctcgctcaccctggttcctctcggagcggagacggcaaatggcggacttcgacacctacgacgatcgggcctacagcagcttcggcggcggcagagggtcccgcggcagtgctggtggccatggttcccgtagccagaaggagttgcccacagagcccccctacacagcatacgtaggaaatctacctttcaatacggttcagggcgacatagatgctatctttaaggatctcagcataaggagtgtacggctagtcagagacaaagacacagataaatttaaaggattctgctatgtagaattcgatgaagtggattcccttaaggaagccttgacatacgatggtgcactgttgggcgatcggtcacttcgtgtggacattgcagaaggcagaaaacaagataaaggtggctttggattcagaaaaggtggaccagatgacagaggcttcagggatgacttcttagggggcaggggaggtagtcgcccaggcgaccggcgaacaggcccccccatgggcagccgcttcagagatggccctcccctccgtggatccaacatggatttcagagaacccacagaagaggaaagagcacagagaccacgactccagcttaaacctcgaacagtcgcgacgcccctcaatcaagtagccaatcccaactctgctatcttcgggggtgccaggcctagagaggaagtcgttcaaaaggagcaagaatgagcctgcggttgggagggaatggggcgtggggggttagagcaggaccacagcctggtgagtccccgggcagccgtcctgcagccgccactcctgcgcctgccattggcctcctcacagcggaaacacagcttgtgagtgcatgtcagctgttaacaagtggtttttagtacattctgggctttgctgtatctatctagtgcctgtttgtgcgtttttttctttcttccgctgcttccccattttccttctgtcctttttctcctgctccttgttttcccagcagcacatggggttcctcggaggagcagaggtggccgccgtgggggggcgtttgggctgcggtgctgcgtcatttttcctttgctttctctttactttagacactggcccaactccaggcgtttcctttcattccctcagtgcttctcttctgacctgcatgttgagttctgtattgctggggcttccaacaaaaaccagagtcactgacagagggaacagcagagaccttgttggtattcagctgtgatggatatagagaatcagaggcaccttgttttcacaactaggataaaaatatctgcagggtcctttccattcctatttagagggagtcctggctccatgaccccctcccgagtggactgtccaagcagataggctcacacgagaaacagtgaggctgaaagggggggctatggaagagcggtagggagtccacggagaagatgcagtgaatgcttgcatgcattcacacgtgtgtgtgtcccagctagttcactcctttcgccgtgcgtggtggaggctggcctctctggctgggtgcagtgaatggccagcgggtttcttttctgctgggccaaggcgctttgggggtggagggggtggtgctggtgctgcactgggctgactgcggcgctgacgcagcgtttccccccatccctgttgcctgtgtgttgtgtggatctgttcctagtataggcaacataatgagatactgtgcttcccacctccccttcagttcagagccaaaatgggtctagaatctggcactttactcatttcctttgataaattgtactatgcagagctgtcaggaaccttcagatagcagtagaggactgcagctgtctaggtctgcggccacatcttggggacacactggactgttcccatgtgcagggttcagcagttatgtgggagtgctaggggttaggcttttgagcttgaacgcctgcgtgtgaacagatgaaaaatccttcagtacccaagtcccagtctgtcctatggggagcagtttgggggcggccggcagcaggagcctgggaaagaggccctcgccaggtgatggcagggccagggtggcctggggcacccagcggaatgtgcttagtatttggtcaccagccgtcatcctgggcttttcctactgtgtcttgttacaaggcctcagcaatccacagaactctctctccttccttccacctgtcagcttctctgcttctgagataagaaccatttgtgtaacaccaacacttaacttcagaaagacatgcattatgtggtgtaatcaaacccgatgctttcagatgacctacttacatcttcaatgtggataagataaagaacaaaacacatgcatctaaactgctgggcaatccagttgacttttaaatgtaagaatggaattccaaacacttaacacattcagctatatgacagaaagtaaatctatggatatggtattttgtgaatgatcttttaaataaaagaaaaccttacgtaata

SEQ ID NO: 310563 - DNA, 2556 bp, Homo sapiens
gacccacgcgtccgcggacgcgtgggtcgacccacgcgtcgcggacgcgtgggtcgcggacgcgtgggtccgagacggcaaatggcggacttcgacacctacgacgatcgggcctacagcagcttcggcggcggcagagggtcccgcggcagtgctggtggccatggttcccgtagccagaaggagttgcccacagagcccccctacacagcatacgtaggaaatctacctttcaatacggttcagggcgacatagatgctatctttaaggatctcagcataaggagtgtacggctagtcagagacaaagacacagataaatttaaaggattctgctatgtagaattcgatgaagtggattcccttaaggaagccttgacatacgatggtgcactgttgggcgatcggtcacttcgtgtggacattgcagaaggcagaaaacaagataaaggtggctttggattcagaaaaggtggaccagatgacagaggcttcagggatgacttcttagggggcaggggaggtagtcgcccaggcgaccggcgaacaggcccccccatgggcagccgcttcagagatggccctcccctccgtggatccaacatggatttcagagaacccacagaagaggaaagagcacagagaccacgactccagcttaaacctcgaacagtcgcgacgcccctcaatcaagtagccaatcccaactctgctatcttcgggggtgccaggcctagagaggaagtcgttcaaaaggagcaagaatgagcctgcggttgggagggaatggggcgtggggggttagagcaggaccacagcctggtgagtccccgggcagccgtcctgcagccgccactcctgcgcctgccattggcctcctcacagcggaaacacagcttgtgagtgcatgtcagctgttaacaagtggtttttagtacattctgggctttgctgtatctatctagtgcctgtttgtgcgtttttttctttcttccgctgcttccccattttccttctgtcctttttctcctgctccttgttttcccagcagcacatggggttcctcggaggagcagaggtggccgccgtgggggggcgtttgggctgcggtgctgcgtcatttttcctttgctttctctttactttagacactggcccaactccaggcgtttcctttcattccctcagtgcttctcttctgacctgcatgttgagttctgtattgctggggcttccaacaaaaaccagagtcactgacagagggaacagcagagaccttgttggtattcagctgtgatggatatagagaatcagaggcaccttgttttcacaactaggataaaaatatctgcagggtcctttccattcctatttagagggagtcctggctccatgaccccctcccgagtggactgtccaagcagataggctcacacgagaaacagtgaggctgaaagggggggctatggaagagcggtagggagtccacggagaagatgcagtgaatgcttgcatgcattcacacgtgtgtgtgtcccagctagttcactcctttcgccgtgcgtggtggaggctggcctctctggctgggtgcagtgaatggccagcgggtttcttttctgctgggccaaggcgctttgggggtggagggggtggtgctggtgctgcactgggctgactgcggcgctgacgcagcgtttccccccatccctgttgcctgtgtgttgtgtggatctgttcctagtataggcaacataatgagatactgtgcttcccacctccccttcagttcagagccaaaatgggtctagaatctggcactttactcatttcctttgataaattgtactatgcagagctgtcaggaaccttcagatagcagtagaggactgcagctgtctaggtctgcggccacatcttggggacacactggactgttcccatgtgcagggttcagcagttatgtgggagtgctaggggttaggcttttgagcttgaacgcctgcgtgtgaacagatgaaaaatccttcagtacccaagtcccagtctgtcctatggggagcagtttgggggcggccggcagcaggagcctgggaaagaggccctcgccaggtgatggcagggccagggtggcctggggcacccagcggaatgtgcttagtatttggtcaccagccgtcatcctgggcttttcctactgtgtcttgttacaaggcctcagcaatccacagaactctctctccttccttccacctgtcagcttctctgcttctgagataagaaccatttgtgtaacaccaacacttaacttcagaaagacatgcattatgtggtgtaatcaaacccgatgctttcagatgacctacttacatcttcaatgtggataagataaagaacaaaacacatgcatctaaactgctgggcaatccagttgacttttaaatgtaagaatggaattccaaacacttaacacattcagctatatgacagaaagtaaatctatggatatggtattttgtgaatgatcttttaaataaaagaaaaccttacgtaata

SEQ ID NO: 310564 - DNA, 2525 bp, Homo sapiens
gacccacgcgtccgcggacgcgtgggtcgacccacgcgtcgagacggcaaatggcggacttcgacacctacgacgatcgggcctacagcagcttcggcggcggcagagggtcccgcggcagtgctggtggccatggttcccgtagccagaaggagttgcccacagagcccccctacacagcatacgtaggaaatctacctttcaatacggttcagggcgacatagatgctatctttaaggatctcagcataaggagtgtacggctagtcagagacaaagacacagataaatttaaaggattctgctatgtagaattcgatgaagtggattcccttaaggaagccttgacatacgatggtgcactgttgggcgatcggtcacttcgtgtggacattgcagaaggcagaaaacaagataaaggtggctttggattcagaaaaggtggaccagatgacagaggcttcagggatgacttcttagggggcaggggaggtagtcgcccaggcgaccggcgaacaggcccccccatgggcagccgcttcagagatggccctcccctccgtggatccaacatggatttcagagaacccacagaagaggaaagagcacagagaccacgactccagcttaaacctcgaacagtcgcgacgcccctcaatcaagtagccaatcccaactctgctatcttcgggggtgccaggcctagagaggaagtcgttcaaaaggagcaagaatgagcctgcggttgggagggaatggggcgtggggggttagagcaggaccacagcctggtgagtccccgggcagccgtcctgcagccgccactcctgcgcctgccattggcctcctcacagcggaaacacagcttgtgagtgcatgtcagctgttaacaagtggtttttagtacattctgggctttgctgtatctatctagtgcctgtttgtgcgtttttttctttcttccgctgcttccccattttccttctgtcctttttctcctgctccttgttttcccagcagcacatggggttcctcggaggagcagaggtggccgccgtgggggggcgtttgggctgcggtgctgcgtcatttttcctttgctttctctttactttagacactggcccaactccaggcgtttcctttcattccctcagtgcttctcttctgacctgcatgttgagttctgtattgctggggcttccaacaaaaaccagagtcactgacagagggaacagcagagaccttgttggtattcagctgtgatggatatagagaatcagaggcaccttgttttcacaactaggataaaaatatctgcagggtcctttccattcctatttagagggagtcctggctccatgaccccctcccgagtggactgtccaagcagataggctcacacgagaaacagtgaggctgaaagggggggctatggaagagcggtagggagtccacggagaagatgcagtgaatgcttgcatgcattcacacgtgtgtgtgtcccagctagttcactcctttcgccgtgcgtggtggaggctggcctctctggctgggtgcagtgaatggccagcgggtttcttttctgctgggccaaggcgctttgggggtggagggggtggtgctggtgctgcactgggctgactgcggcgctgacgcagcgtttccccccatccctgttgcctgtgtgttgtgtggatctgttcctagtataggcaacataatgagatactgtgcttcccacctccccttcagttcagagccaaaatgggtctagaatctggcactttactcatttcctttgataaattgtactatgcagagctgtcaggaaccttcagatagcagtagaggactgcagctgtctaggtctgcggccacatcttggggacacactggactgttcccatgtgcagggttcagcagttatgtgggagtgctaggggttaggcttttgagcttgaacgcctgcgtgtgaacagatgaaaaatccttcagtacccaagtcccagtctgtcctatggggagcagtttgggggcggccggcagcaggagcctgggaaagaggccctcgccaggtgatggcagggccagggtggcctggggcacccagcggaatgtgcttagtatttggtcaccagccgtcatcctgggcttttcctactgtgtcttgttacaaggcctcagcaatccacagaactctctctccttccttccacctgtcagcttctctgcttctgagataagaaccatttgtgtaacaccaacacttaacttcagaaagacatgcattatgtggtgtaatcaaacccgatgctttcagatgacctacttacatcttcaatgtggataagataaagaacaaaacacatgcatctaaactgctgggcaatccagttgacttttaaatgtaagaatggaattccaaacacttaacacattcagctatatgacagaaagtaaatctatggatatggtattttgtgaatgatcttttaaataaaagaaaaccttacgtaata

SEQ ID NO: 310565 - DNA, 2671 bp, Homo sapiens
  misc_feature (2593)..(2593): n is a, c, g, or t
  misc_feature (2597)..(2598): n is a, c, g, or t
  misc_feature (2601)..(2601): n is a, c, g, or t
  misc_feature (2605)..(2605): n is a, c, g, or t
  misc_feature (2611)..(2611): n is a, c, g, or t
  misc_feature (2620)..(2620): n is a, c, g, or t
tcaggcggcgcggcggacagccccggcggcggggcggggggagttatattgcggggtccttcctcgctcaccctggttcctctcggagcggagacggcaaatggcggacttcgacacctacgacgatcgggcctacagcagcttcggcggcggcagagggtcccgcggcagtgctggtggccatggttcccgtagccagaaggagttgcccacagagcccccctacacagcatacgtaggaaatctacctttcaatacggttcagggcgacatagatgctatctttaaggatctcagcataaggagtgtacggctagtcagagacaaagacacagataaatttaaaggattctgctatgtagaattcgatgaagtggattcccttaaggaagccttgacatacgatggtgcactgttgggcgatcggtcacttcgtgtggacattgcagaaggcagaaaacaagataaaggtggctttggattcagaaaaggtggaccagatgacagaggcttcagggatgacttcttagggggcaggggaggtagtcgcccaggcgaccggcgaacaggcccccccatgggcagccgcttcagagatggccctcccctccgtggatccaacatggatttcagagaacccacagaagaggaaagagcacagagaccacgactccagcttaaacctcgaacagtcgcgacgcccctcaatcaagtagccaatcccaactctgctatcttcgggggtgccaggcctagagaggaagtcgttcaaaaggagcaagaatgagcctgcggttgggagggaatggggcgtggggggttagagcaggaccacagcctggtgagtccccgggcagccgtcctgcagccgccactcctgcgcctgccattggcctcctcacagcggaaacacagcttgtgagtgcatgtcagctgttaacaagtggtttttagtacattctgggctttgctgtatctatctagtgcctgtttgtgcgtttttttctttcttccgctgcttccccattttccttctgtcctttttctcctgctccttgttttcccagcagcacatggggttcctcggaggagcagaggtggccgccgtgggggggcgtttgggctgcggtgctgcgtcatttttcctttgctttctctttactttagacactggcccaactccaggcgtttcctttcattccctcagtgcttctcttctgacctgcatgttgagttctgtattgctggggcttccaacaaaaaccagagtcactgacagagggaacagcagagaccttgttggtattcagctgtgatggatatagagaatcagaggcaccttgttttcacaactaggataaaaatatctgcagggtcctttccattcctatttagagggagtcctggctccatgaccccctcccgagtggactgtccaagcagataggctcacacgagaaacagtgaggctgaaagggggggctatggaagagcggtagggagtccacggagaagatgcagtgaatgcttgcatgcattcacacgtgtgtgtgtcccagctagttcactcctttcgccgtgcgtggtggaggctggcctctctggctgggtgcagtgaatggccagcgggtttcttttctgctgggccaaggcgctttgggggtggagggggtggtgctggtgctgcactgggctgactgcggcgctgacgcagcgtttccccccatccctgttgcctgtgtgttgtgtggatctgttcctagtataggcaacataatgagatactgtgcttcccacctccccttcagttcagagccaaaatgggtctagaatctggcactttactcatttcctttgataaattgtactatgcagagctgtcaggaaccttcagatagcagtagaggactgcagctgtctaggtctgcggccacatcttggggacacactggactgttcccatgtgcagggttcagcagttatgtgggagtgctaggggttaggcttttgagcttgaacgcctgcgtgtgaacagatgaaaaatccttcagtacccaagtcccagtctgtcctatggggagcagtttgggggcggccggcagcaggagcctgggaaagaggccctcgccaggtgatggcagggccagggtggcctggggcacccagcggaatgtgcttagtatttggtcaccagccgtcatcctgggcttttcctactgtgtcttgttacaaggcctcagcaatccacagaactctctctccttccttccacctgtcagcttctctgcttctgagataagaaccatttgtgtaacaccaacacttaacttcagaaagacatgcattatgtggtgtaatcaaacccgatgctttcagatgacctacttacatcttcaatgtggataagataaagaacaaaacacatgcatctaaactgctgggcaatccagttgacttttaaatgtaagaatggaattccaaacacttaacacattcagctatatgacagaaagtaaatctatggatatggtattttgtgaatgatcttttaaataaaagaaaaccttacgtaataaaaaaaaaaaactggggntatnnggngggnaaaggntgaatggcnggcttgcgttcgcccttttgaaagggattcgggccctgggggtataacgtt

SEQ ID NO: 310566 - DNA, 2548 bp, Homo sapiens
tcaggcggcgcggcggacagccccggcggcggggcggggggagttatattgcggggtccttcctcgctcaccctggttcctctcggagcggagacggcaaatggcggacttcgacacctacgacgatcgggcctacagcagcttcggcggcggcagagggtcccgcggcagtgctggtggccatggttcccgtagccagaaggagttgcccacagagcccccctacacagcatacgtaggaaatctacctttcaatacggttcagggcgacatagatgctatctttaaggatctcagcataaggagtgtacggctagtcagagacaaagacacagataaatttaaaggattctgctatgtagaattcgatgaagtggattcccttaaggaagccttgacatacgatggtgcactgttgggcgatcggtcacttcgtgtggacattgcagaaggcagaaaacaagataaaggtggctttggattcagaaaaggtggaccagatgacagaggcttcagggatgacttcttagggggcaggggaggtagtcgcccaggcgaccggcgaacaggcccccccatgggcagccgcttcagagatggccctcccctccgtggatccaacatggatttcagagaacccacagaagaggaaagagcacagagaccacgactccagcttaaacctcgaacagtcgcgacgcccctcaatcaagtagccaatcccaactctgctatcttcgggggtgccaggcctagagaggaagtcgttcaaaaggagcaagaatgagcctgcggttgggagggaatggggcgtggggggttagagcaggaccacagcctggtgagtccccgggcagccgtcctgcagccgccactcctgcgcctgccattggcctcctcacagcggaaacacagcttgtgagtgcatgtcagctgttaacaagtggtttttagtacattctgggctttgctgtatctatctagtgcctgtttgtgcgtttttttctttcttccgctgcttccccattttccttctgtcctttttctcctgctccttgttttcccagcagcacatggggttcctcggaggagcagaggtggccgccgtgggggggcgtttgggctgcggtgctgcgtcatttttcctttgctttctctttactttagacactggcccaactccaggcgtttcctttcattccctcagtgcttctcttctgacctgcatgttgagttctgtattgctggggcttccaacaaaaaccagagtcactgacagagggaacagcagagaccttgttggtattcagctgtgatggatatagagaatcagaggcaccttgttttcacaactaggataaaaatatctgcagggtcctttccattcctatttagagggagtcctggctccatgaccccctcccgagtggactgtccaagcagataggctcacacgagaaacagtgaggctgaaagggggggctatggaagagcggtagggagtccacggagaagatgcagtgaatgcttgcatgcattcacacgtgtgtgtgtcccagctagttcactcctttcgccgtgcgtggtggaggctggcctctctggctgggtgcagtgaatggccagcgggtttcttttctgctgggccaaggcgctttgggggtggagggggtggtgctggtgctgcactgggctgactgcggcgctgacgcagcgtttccccccatccctgttgcctgtgtgttgtgtggatctgttcctagtataggcaacataatgagatactgtgcttcccacctccccttcagttcagagccaaaatgggtctagaatctggcactttactcatttcctttgataaattgtactatgcagagctgtcaggaaccttcagatagcagtagaggactgcagctgtctaggtctgcggccacatcttggggacacactggactgttcccatgtgcagggttcagcagttatgtgggagtgctaggggttaggcttttgagcttgaacgcctgcgtgtgaacagatgaaaaatccttcagtacccaagtcccagtctgtcctatggggagcagtttgggggcggccggcagcaggagcctgggaaagaggccctcgccaggtgatggcagggccagggtggcctggggcacccagcggaatgtgcttagtatttggtcaccagccgtcatcctgggcttttcctactgtgtcttgttacaaggcctcagcaatccacagaactctctctccttccttccacctgtcagcttctctgcttctgagataagaaccatttgtgtaacaccaacacttaacttcagaaagacatgcattatgtggtgtaatcaaacccgatgctttcagatgacctacttacatcttcaatgtggataagataaagaacaaaacacatgcatctaaactgctgggcaatccagttgacttttaaatgtaagaatggaattccaaacacttaacacattcagctatatgacagaaagtaaatctatggatatggtattttgtgaatgatctt

SEQ ID NO: 310567 - DNA, 2838 bp, Homo sapiens
  misc_feature (2638)..(2638): n is a, c, g, or t
tcaggcggcgcggcggacagccccggcggcggggcggggggagttatattgcggggtccttcctcgctcaccctggttcctctcggagcggagacggcaaatggcggacttcgacacctacgacgatcgggcctacagcagcttcggcggcggcagagggtcccgcggcagtgctggtggccatggttcccgtagccagaaggagttgcccacagagcccccctacacagcatacgtaggaaatctacctttcaatacggttcagggcgacatagatgctatctttaaggatctcagcataaggagtgtacggctagtcagagacaaagacacagataaatttaaaggattctgctatgtagaattcgatgaagtggattcccttaaggaagccttgacatacgatggtgcactgttgggcgatcggtcacttcgtgtggacattgcagaaggcagaaaacaagataaaggtggctttggattcagaaaaggtggaccagatgacagaggcttcagggatgacttcttagggggcaggggaggtagtcgcccaggcgaccggcgaacaggcccccccatgggcagccgcttcagagatggccctcccctccgtggatccaacatggatttcagagaacccacagaagaggaaagagcacagagaccacgactccagcttaaacctcgaacagtcgcgacgcccctcaatcaagtagccaatcccaactctgctatcttcgggggtgccaggcctagagaggaagtcgttcaaaaggagcaagaatgagcctgcggttgggagggaatggggcgtggggggttagagcaggaccacagcctggtgagtccccgggcagccgtcctgcagccgccactcctgcgcctgccattggcctcctcacagcggaaacacagcttgtgagtgcatgtcagctgttaacaagtggtttttagtacattctgggctttgctgtatctatctagtgcctgtttgtgcgtttttttctttcttccgctgcttccccattttccttctgtcctttttctcctgctccttgttttcccagcagcacatggggttcctcggaggagcagaggtggccgccgtgggggggcgtttgggctgcggtgctgcgtcatttttcctttgctttctctttactttagacactggcccaactccaggcgtttcctttcattccctcagtgcttctcttctgacctgcatgttgagttctgtattgctggggcttccaacaaaaaccagagtcactgacagagggaacagcagagaccttgttggtattcagctgtgatggatatagagaatcagaggcaccttgttttcacaactaggataaaaatatctgcagggtcctttccattcctatttagagggagtcctggctccatgaccccctcccgagtggactgtccaagcagataggctcacacgagaaacagtgaggctgaaagggggggctatggaagagcggtagggagtccacggagaagatgcagtgaatgcttgcatgcattcacacgtgtgtgtgtcccagctagttcactcctttcgccgtgcgtggtggaggctggcctctctggctgggtgcagtgaatggccagcgggtttcttttctgctgggccaaggcgctttgggggtggagggggtggtgctggtgctgcactgggctgactgcggcgctgacgcagcgtttccccccatccctgttgcctgtgtgttgtgtggatctgttcctagtataggcaacataatgagatactgtgcttcccacctccccttcagttcagagccaaaatgggtctagaatctggcactttactcatttcctttgataaattgtactatgcagagctgtcaggaaccttcagatagcagtagaggactgcagctgtctaggtctgcggccacatcttggggacacactggactgttcccatgtgcagggttcagcagttatgtgggagtgctaggggttaggcttttgagcttgaacgcctgcgtgtgaacagatgaaaaatccttcagtacccaagtcccagtctgtcctatggggagcagtttgggggcggccggcagcaggagcctgggaaagaggccctcgccaggtgatggcagggccagggtggcctggggcacccagcggaatgtgcttagtatttggtcaccagccgtcatcctgggcttttcctactgtgtcttgttacaaggcctcagcaatccacagaactctctctccttccttccacctgtcagcttctctgcttctgagataagaaccatttgtgtaacaccaacacttaacttcagaaagacatgcattatgtggtgtaatcaaacccgatgctttcagatgacctacttacatcttcaatgtggataagataaagaacaaaacacatgcatctaaactgctgggcaatccagttgacttttaaatgtaagaatggaattccaaacacttaacacattcagctatatgacagaaagtaaatctatggatatggtattttgtgaatgatcttttaaataaaagaaaaccttacgtaataaaaaaaaaaaaaaaaactcgagatatattaccatgatgaaatgatgtaaattgcttggataantaaacccaacatttactctgcattgagaaagccaagtcattttactttaaatagtaaataggcgtaaaacgaccttttggattggaagagctcaaacagattaaaataattggacactgcagcctaactaacttcctataatccctaggattattcaaagccatgcttaagtagagatattagagtaggaaaccatataa

SEQ ID NO: 310568 - DNA, 2609 bp, Homo sapiens
tcaggcggcgcggcggacagccccggcggcggggcggggggagttatattgcggggtccttcctcgctcaccctggttcctctcggagcggagacggcaaatggcggacttcgacacctacgacgatcgggcctacagcagcttcggcggcggcagagggtcccgcggcagtgctggtggccatggttcccgtagccagaaggagttgcccacagagcccccctacacagcatacgtaggaaatctacctttcaatacggttcagggcgacatagatgctatctttaaggatctcagcataaggagtgtacggctagtcagagacaaagacacagataaatttaaaggattctgctatgtagaattcgatgaagtggattcccttaaggaagccttgacatacgatggtgcactgttgggcgatcggtcacttcgtgtggacattgcagaaggcagaaaacaagataaaggtggctttggattcagaaaaggtggaccagatgacagaggcttcagggatgacttcttagggggcaggggaggtagtcgcccaggcgaccggcgaacaggcccccccatgggcagccgcttcagagatggccctcccctccgtggatccaacatggatttcagagaacccacagaagaggaaagagcacagagaccacgactccagcttaaacctcgaacagtcgcgacgcccctcaatcaagtagccaatcccaactctgctatcttcgggggtgccaggcctagagaggaagtcgttcaaaaggagcaagaatgagcctgcggttgggagggaatggggcgtggggggttagagcaggaccacagcctggtgagtccccgggcagccgtcctgcagccgccactcctgcgcctgccattggcctcctcacagcggaaacacagcttgtgagtgcatgtcagctgttaacaagtggtttttagtacattctgggctttgctgtatctatctagtgcctgtttgtgcgtttttttctttcttccgctgcttccccattttccttctgtcctttttctcctgctccttgttttcccagcagcacatggggttcctcggaggagcagaggtggccgccgtgggggggcgtttgggctgcggtgctgcgtcatttttcctttgctttctctttactttagacactggcccaactccaggcgtttcctttcattccctcagtgcttctcttctgacctgcatgttgagttctgtattgctggggcttccaacaaaaaccagagtcactgacagagggaacagcagagaccttgttggtattcagctgtgatggatatagagaatcagaggcaccttgttttcacaactaggataaaaatatctgcagggtcctttccattcctatttagagggagtcctggctccatgaccccctcccgagtggactgtccaagcagataggctcacacgagaaacagtgaggctgaaagggggggctatggaagagcggtagggagtccacggagaagatgcagtgaatgcttgcatgcattcacacgtgtgtgtgtcccagctagttcactcctttcgccgtgcgtggtggaggctggcctctctggctgggtgcagtgaatggccagcgggtttcttttctgctgggccaaggcgctttgggggtggagggggtggtgctggtgctgcactgggctgactgcggcgctgacgcagcgtttccccccatccctgttgcctgtgtgttgtgtggatctgttcctagtataggcaacataatgagatactgtgcttcccacctccccttcagttcagagccaaaatgggtctagaatctggcactttactcatttcctttgataaattgtactatgcagagctgtcaggaaccttcagatagcagtagaggactgcagctgtctaggtctgcggccacatcttggggacacactggactgttcccatgtgcagggttcagcagttatgtgggagtgctaggggttaggcttttgagcttgaacgcctgcgtgtgaacagatgaaaaatccttcagtacccaagtcccagtctgtcctatggggagcagtttgggggcggccggcagcaggagcctgggaaagaggccctcgccaggtgatggcagggccagggtggcctggggcacccagcggaatgtgcttagtatttggtcaccagccgtcatcctgggcttttcctactgtgtcttgttacaaggcctcagcaatccacagaactctctctccttccttccacctgtcagcttctctgcttctgagataagaaccatttgtgtaacaccaacacttaacttcagaaagacatgcattatgtggtgtaatcaaacccgatgctttcagatgacctacttacatcttcaatgtggataagataaagaacaaaacacatgcatctaaactgctgggcaatccagttgacttttaaatgtaagaatggaattccaaacacttaacacattcagctatatgacagaaagtaaatctatggatatggtattttgtgaatgatcttttaaataaaagaaaaccttacgtaatagaacaaaaaaaagggcggccactcgcgatctaga

SEQ ID NO: 310569 - DNA, 2521 bp, Homo sapiens
tcaggcggcgcggcggacagccccggcggcggggcggggggagttatattgcggggtccttcctcgctcaccctggttcctctcggagcggagacggcaaatggcggacttcgacacctacgacgatcgggcctacagcagcttcggcggcggcagagggtcccgcggcagtgctggtggccatggttcccgtagccagaaggagttgcccacagagcccccctacacagcatacgtaggaaatctacctttcaatacggttcagggcgacatagatgctatctttaaggatctcagcataaggagtgtacggctagtcagagacaaagacacagataaatttaaaggattctgctatgtagaattcgatgaagtggattcccttaaggaagccttgacatacgatggtgcactgttgggcgatcggtcacttcgtgtggacattgcagaaggcagaaaacaagataaaggtggctttggattcagaaaaggtggaccagatgacagaggcttcagggatgacttcttagggggcaggggaggtagtcgcccaggcgaccggcgaacaggcccccccatgggcagccgcttcagagatggccctcccctccgtggatccaacatggatttcagagaacccacagaagaggaaagagcacagagaccacgactccagcttaaacctcgaacagtcgcgacgcccctcaatcaagtagccaatcccaactctgctatcttcgggggtgccaggcctagagaggaagtcgttcaaaaggagcaagaatgagcctgcggttgggagggaatggggcgtggggggttagagcaggaccacagcctggtgagtccccgggcagccgtcctgcagccgccactcctgcgcctgccattggcctcctcacagcggaaacacagcttgtgagtgcatgtcagctgttaacaagtggtttttagtacattctgggctttgctgtatctatctagtgcctgtttgtgcgtttttttctttcttccgctgcttccccattttccttctgtcctttttctcctgctccttgttttcccagcagcacatggggttcctcggaggagcagaggtggccgccgtgggggggcgtttgggctgcggtgctgcgtcatttttcctttgctttctctttactttagacactggcccaactccaggcgtttcctttcattccctcagtgcttctcttctgacctgcatgttgagttctgtattgctggggcttccaacaaaaaccagagtcactgacagagggaacagcagagaccttgttggtattcagctgtgatggatatagagaatcagaggcaccttgttttcacaactaggataaaaatatctgcagggtcctttccattcctatttagagggagtcctggctccatgaccccctcccgagtggactgtccaagcagataggctcacacgagaaacagtgaggctgaaagggggggctatggaagagcggtagggagtccacggagaagatgcagtgaatgcttgcatgcattcacacgtgtgtgtgtcccagctagttcactcctttcgccgtgcgtggtggaggctggcctctctggctgggtgcagtgaatggccagcgggtttcttttctgctgggccaaggcgctttgggggtggagggggtggtgctggtgctgcactgggctgactgcggcgctgacgcagcgtttccccccatccctgttgcctgtgtgttgtgtggatctgttcctagtataggcaacataatgagatactgtgcttcccacctccccttcagttcagagccaaaatgggtctagaatctggcactttactcatttcctttgataaattgtactatgcagagctgtcaggaaccttcagatagcagtagaggactgcagctgtctaggtctgcggccacatcttggggacacactggactgttcccatgtgcagggttcagcagttatgtgggagtgctaggggttaggcttttgagcttgaacgcctgcgtgtgaacaggggcggccggcagcaggagcctgggaaagaggccctcgccaggtgatggcagggccagggtggcctggggcacccagcggaatgtgcttagtatttggtcaccagccgtcatcctgggcttttcctactgtgtcttgttacaaggcctcagcaatccacagaactctctctccttccttccacctgtcagcttctctgcttctgagataagaaccatttgtgtaacaccaacacttaacttcagaaagacatgcattatgtggtgtaatcaaacccgatgctttcagatgacctacttacatcttcaatgtggataagataaagaacaaaacacatgcatctaaactgctgggcaatccagttgacttttaaatgtaagaatggaattccaaacacttaacacattcagctatatgacagaaagtaaatctatggatatggtattttgtgaatgatcttttaaataaaagaaaaccttacgtaata

SEQ ID NO: 310570 - DNA, 2595 bp, Homo sapiens
cacaaccaacacaaaagaggaaataaggctaggtacgaggctgggtgttggagacggcaaatggcggacttcgacacctacgacgatcgggcctacagcagcttcggcggcggcagagggtcccgcggcagtgctggtggccatggttcccgtagccagaaggagttgcccacagagcccccctacacagcatacgtaggaaatctacctttcaatacggttcagggcgacatagatgctatctttaaggatctcagcataaggagtgtacggctagtcagagacaaagacacagataaatttaaaggattctgctatgtagaattcgatgaagtggattcccttaaggaagccttgacatacgatggtgcactgttgggcgatcggtcacttcgtgtggacattgcagaaggcagaaaacaagataaaggtggctttggattcagaaaaggtggaccagatgacagaggaatgggtagctctcgagaatctagaggtggatgggattcccgggatgacttcaattctggcttcagggatgacttcttagggggcaggggaggtagtcgcccaggcgaccggcgaacaggcccccccatgggcagccgcttcagagatggccctcccctccgtggatccaacatggatttcagagaacccacagaagaggaaagagcacagagaccacgactccagcttaaacctcgaacagtcgcgacgcccctcaatcaagtagccaatcccaactctgctatcttcgggggtgccaggcctagagaggaagtcgttcaaaaggagcaagaatgagcctgcggttgggagggaatggggcgtggggggttagagcaggaccacagcctggtgagtccccgggcagccgtcctgcagccgccactcctgcgcctgccattggcctcctcacagcggaaacacagcttgtgagtgcatgtcagctgttaacaagtggtttttagtacattctgggctttgctgtatctatctagtgcctgtttgtgcgtttttttctttcttccgctgcttccccattttccttctgtcctttttctcctgctccttgttttcccagcagcacatggggttcctcggaggagcagaggtggccgccgtgggggggcgtttgggctgcggtgctgcgtcatttttcctttgctttctctttactttagacactggcccaactccaggcgtttcctttcattccctcagtgcttctcttctgacctgcatgttgagttctgtattgctggggcttccaacaaaaaccagagtcactgacagagggaacagcagagaccttgttggtattcagctgtgatggatatagagaatcagaggcaccttgttttcacaactaggataaaaatatctgcagggtcctttccattcctatttagagggagtcctggctccatgaccccctcccgagtggactgtccaagcagataggctcacacgagaaacagtgaggctgaaagggggggctatggaagagcggtagggagtccacggagaagatgcagtgaatgcttgcatgcattcacacgtgtgtgtgtcccagctagttcactcctttcgccgtgcgtggtggaggctggcctctctggctgggtgcagtgaatggccagcgggtttcttttctgctgggccaaggcgctttgggggtggagggggtggtgctggtgctgcactgggctgactgcggcgctgacgcagcgtttccccccatccctgttgcctgtgtgttgtgtggatctgttcctagtataggcaacataatgagatactgtgcttcccacctccccttcagttcagagccaaaatgggtctagaatctggcactttactcatttcctttgataaattgtactatgcagagctgtcaggaaccttcagatagcagtagaggactgcagctgtctaggtctgcggccacatcttggggacacactggactgttcccatgtgcagggttcagcagttatgtgggagtgctaggggttaggcttttgagcttgaacgcctgcgtgtgaacagatgaaaaatccttcagtacccaagtcccagtctgtcctatggggagcagtttgggggcggccggcagcaggagcctgggaaagaggccctcgccaggtgatggcagggccagggtggcctggggcacccagcggaatgtgcttagtatttggtcaccagccgtcatcctgggcttttcctactgtgtcttgttacaaggcctcagcaatccacagaactctctctccttccttccacctgtcagcttctctgcttctgagataagaaccatttgtgtaacaccaacacttaacttcagaaagacatgcattatgtggtgtaatcaaacccgatgctttcagatgacctacttacatcttcaatgtggataagataaagaacaaaacacatgcatctaaactgctgggcaatccagttgacttttaaatgtaagaatggaattccaaacacttaacacattcagctatatgacagaaagtaaatctatggatatggtattttgtgaatgatcttttaaataaaagaaaaccttacgtaata

SEQ ID NO: 310571 - DNA, 2635 bp, Homo sapiens
tcaggcggcgcggcggacagccccggcggcggggcggggggagttatattgcggggtccttcctcgctcaccctggttcctctcggagcggagacggcaaatggcggacttcgacacctacgacgatcgggcctacagcagcttcggcggcggcagagggtcccgcggcagtgctggtggccatggttcccgtagccagaaggagttgcccacagagcccccctacacagcatacgtaggaaatctacctttcaatacggttcagggcgacatagatgctatctttaaggatctcagcataaggagtgtacggctagtcagagacaaagacacagataaatttaaaggattctgctatgtagaattcgatgaagtggattcccttaaggaagccttgacatacgatggtgcactgttgggcgatcggtcacttcgtgtggacattgcagaaggcagaaaacaagataaaggtggctttggattcagaaaaggtggaccagatgacagaggaatgggtagctctcgagaatctagaggtggatgggattcccgggatgacttcaattctggcttcagggatgacttcttagggggcaggggaggtagtcgcccaggcgaccggcgaacaggcccccccatgggcagccgcttcagagatggccctcccctccgtggatccaacatggatttcagagaacccacagaagaggaaagagcacagagaccacgactccagcttaaacctcgaacagtcgcgacgcccctcaatcaagtagccaatcccaactctgctatcttcgggggtgccaggcctagagaggaagtcgttcaaaaggagcaagaatgagcctgcggttgggagggaatggggcgtggggggttagagcaggaccacagcctggtgagtccccgggcagccgtcctgcagccgccactcctgcgcctgccattggcctcctcacagcggaaacacagcttgtgagtgcatgtcagctgttaacaagtggtttttagtacattctgggctttgctgtatctatctagtgcctgtttgtgcgtttttttctttcttccgctgcttccccattttccttctgtcctttttctcctgctccttgttttcccagcagcacatggggttcctcggaggagcagaggtggccgccgtgggggggcgtttgggctgcggtgctgcgtcatttttcctttgctttctctttactttagacactggcccaactccaggcgtttcctttcattccctcagtgcttctcttctgacctgcatgttgagttctgtattgctggggcttccaacaaaaaccagagtcactgacagagggaacagcagagaccttgttggtattcagctgtgatggatatagagaatcagaggcaccttgttttcacaactaggataaaaatatctgcagggtcctttccattcctatttagagggagtcctggctccatgaccccctcccgagtggactgtccaagcagataggctcacacgagaaacagtgaggctgaaagggggggctatggaagagcggtagggagtccacggagaagatgcagtgaatgcttgcatgcattcacacgtgtgtgtgtcccagctagttcactcctttcgccgtgcgtggtggaggctggcctctctggctgggtgcagtgaatggccagcgggtttcttttctgctgggccaaggcgctttgggggtggagggggtggtgctggtgctgcactgggctgactgcggcgctgacgcagcgtttccccccatccctgttgcctgtgtgttgtgtggatctgttcctagtataggcaacataatgagatactgtgcttcccacctccccttcagttcagagccaaaatgggtctagaatctggcactttactcatttcctttgataaattgtactatgcagagctgtcaggaaccttcagatagcagtagaggactgcagctgtctaggtctgcggccacatcttggggacacactggactgttcccatgtgcagggttcagcagttatgtgggagtgctaggggttaggcttttgagcttgaacgcctgcgtgtgaacagatgaaaaatccttcagtacccaagtcccagtctgtcctatggggagcagtttgggggcggccggcagcaggagcctgggaaagaggccctcgccaggtgatggcagggccagggtggcctggggcacccagcggaatgtgcttagtatttggtcaccagccgtcatcctgggcttttcctactgtgtcttgttacaaggcctcagcaatccacagaactctctctccttccttccacctgtcagcttctctgcttctgagataagaaccatttgtgtaacaccaacacttaacttcagaaagacatgcattatgtggtgtaatcaaacccgatgctttcagatgacctacttacatcttcaatgtggataagataaagaacaaaacacatgcatctaaactgctgggcaatccagttgacttttaaatgtaagaatggaattccaaacacttaacacattcagctatatgacagaaagtaaatctatggatatggtattttgtgaatgatcttttaaataaaagaaaaccttacgtaata

SEQ ID NO: 310572 - DNA, 2572 bp, Homo sapiens
ttgtttctccagccattctctgtaacagtcttgtggtacatcgagcagagtgcctcacctggggcgctggcggcgtagctcagcggaagaccgctttacttgttttgcttattccactctgggcacacttgaatcctgtttgtctcccctcctagggtcccgcggcagtgctggtggccatggttcccgtagccagaaggagttgcccacagagcccccctacacagcatacgtaggaaatctacctttcaatacggttcagggcgacatagatgctatctttaaggatctcagcataaggagtgtacggctagtcagagacaaagacacagataaatttaaaggattctgctatgtagaattcgatgaagtggattcccttaaggaagccttgacatacgatggtgcactgttgggcgatcggtcacttcgtgtggacattgcagaaggcagaaaacaagataaaggtggctttggattcagaaaaggtggaccagatgacagaggcttcagggatgacttcttagggggcaggggaggtagtcgcccaggcgaccggcgaacaggcccccccatgggcagccgcttcagagatggccctcccctccgtggatccaacatggatttcagagaacccacagaagaggaaagagcacagagaccacgactccagcttaaacctcgaacagtcgcgacgcccctcaatcaagtagccaatcccaactctgctatcttcgggggtgccaggcctagagaggaagtcgttcaaaaggagcaagaatgagcctgcggttgggagggaatggggcgtggggggttagagcaggaccacagcctggtgagtccccgggcagccgtcctgcagccgccactcctgcgcctgccattggcctcctcacagcggaaacacagcttgtgagtgcatgtcagctgttaacaagtggtttttagtacattctgggctttgctgtatctatctagtgcctgtttgtgcgtttttttctttcttccgctgcttccccattttccttctgtcctttttctcctgctccttgttttcccagcagcacatggggttcctcggaggagcagaggtggccgccgtgggggggcgtttgggctgcggtgctgcgtcatttttcctttgctttctctttactttagacactggcccaactccaggcgtttcctttcattccctcagtgcttctcttctgacctgcatgttgagttctgtattgctggggcttccaacaaaaaccagagtcactgacagagggaacagcagagaccttgttggtattcagctgtgatggatatagagaatcagaggcaccttgttttcacaactaggataaaaatatctgcagggtcctttccattcctatttagagggagtcctggctccatgaccccctcccgagtggactgtccaagcagataggctcacacgagaaacagtgaggctgaaagggggggctatggaagagcggtagggagtccacggagaagatgcagtgaatgcttgcatgcattcacacgtgtgtgtgtcccagctagttcactcctttcgccgtgcgtggtggaggctggcctctctggctgggtgcagtgaatggccagcgggtttcttttctgctgggccaaggcgctttgggggtggagggggtggtgctggtgctgcactgggctgactgcggcgctgacgcagcgtttccccccatccctgttgcctgtgtgttgtgtggatctgttcctagtataggcaacataatgagatactgtgcttcccacctccccttcagttcagagccaaaatgggtctagaatctggcactttactcatttcctttgataaattgtactatgcagagctgtcaggaaccttcagatagcagtagaggactgcagctgtctaggtctgcggccacatcttggggacacactggactgttcccatgtgcagggttcagcagttatgtgggagtgctaggggttaggcttttgagcttgaacgcctgcgtgtgaacagatgaaaaatccttcagtacccaagtcccagtctgtcctatggggagcagtttgggggcggccggcagcaggagcctgggaaagaggccctcgccaggtgatggcagggccagggtggcctggggcacccagcggaatgtgcttagtatttggtcaccagccgtcatcctgggcttttcctactgtgtcttgttacaaggcctcagcaatccacagaactctctctccttccttccacctgtcagcttctctgcttctgagataagaaccatttgtgtaacaccaacacttaacttcagaaagacatgcattatgtggtgtaatcaaacccgatgctttcagatgacctacttacatcttcaatgtggataagataaagaacaaaacacatgcatctaaactgctgggcaatccagttgacttttaaatgtaagaatggaattccaaacacttaacacattcagctatatgacagaaagtaaatctatggatatggtattttgtgaatgatcttttaaataaaagaaaaccttacgtaata

SEQ ID NO: 310573 - DNA, 2293 bp, Homo sapiens
tgacgtccttgttcagcacgctggagtgtacggctagtcagagacaaagacacagaaatttataggattctgctatgtagaattcgatgaagtggattcccttaaggaagccttgacatacgatggtgcactgttgggcgatcggtcacttcgtgtggacattgcagaaggcagaaaacaagataaaggtggctttggattcagaaaaggtggaccagatgacagaggcttcagggatgacttcttagggggcaggggaggtagtcgcccaggcgaccggcgaacaggcccccccatgggcagccgcttcagagatggccctcccctccgtggatccaacatggatttcagagaacccacagaagaggaaagagcacagagaccacgactccagcttaaacctcgaacagtcgcgacgcccctcaatcaagtagccaatcccaactctgctatcttcgggggtgccaggcctagagaggaagtcgttcaaaaggagcaagaatgagcctgcggttgggagggaatggggcgtggggggttagagcaggaccacagcctggtgagtccccgggcagccgtcctgcagccgccactcctgcgcctgccattggcctcctcacagcggaaacacagcttgtgagtgcatgtcagctgttaacaagtggtttttagtacattctgggctttgctgtatctatctagtgcctgtttgtgcgtttttttctttcttccgctgcttccccattttccttctgtcctttttctcctgctccttgttttcccagcagcacatggggttcctcggaggagcagaggtggccgccgtgggggggcgtttgggctgcggtgctgcgtcatttttcctttgctttctctttactttagacactggcccaactccaggcgtttcctttcattccctcagtgcttctcttctgacctgcatgttgagttctgtattgctggggcttccaacaaaaaccagagtcactgacagagggaacagcagagaccttgttggtattcagctgtgatggatatagagaatcagaggcaccttgttttcacaactaggataaaaatatctgcagggtcctttccattcctatttagagggagtcctggctccatgaccccctcccgagtggactgtccaagcagataggctcacacgagaaacagtgaggctgaaagggggggctatggaagagcggtagggagtccacggagaagatgcagtgaatgcttgcatgcattcacacgtgtgtgtgtcccagctagttcactcctttcgccgtgcgtggtggaggctggcctctctggctgggtgcagtgaatggccagcgggtttcttttctgctgggccaaggcgctttgggggtggagggggtggtgctggtgctgcactgggctgactgcggcgctgacgcagcgtttccccccatccctgttgcctgtgtgttgtgtggatctgttcctagtataggcaacataatgagatactgtgcttcccacctccccttcagttcagagccaaaatgggtctagaatctggcactttactcatttcctttgataaattgtactatgcagagctgtcaggaaccttcagatagcagtagaggactgcagctgtctaggtctgcggccacatcttggggacacactggactgttcccatgtgcagggttcagcagttatgtgggagtgctaggggttaggcttttgagcttgaacgcctgcgtgtgaacagatgaaaaatccttcagtacccaagtcccagtctgtcctatggggagcagtttgggggcggccggcagcaggagcctgggaaagaggccctcgccaggtgatggcagggccagggtggcctggggcacccagcggaatgtgcttagtatttggtcaccagccgtcatcctgggcttttcctactgtgtcttgttacaaggcctcagcaatccacagaactctctctccttccttccacctgtcagcttctctgcttctgagataagaaccatttgtgtaacaccaacacttaacttcagaaagacatgcattatgtggtgtaatcaaacccgatgctttcagatgacctacttacatcttcaatgtggataagataaagaacaaaacacatgcatctaaactgctgggcaatccagttgacttttaaatgtaagaatggaattccaaacacttaacacattcagctatatgacagaaagtaaatctatggatatggtattttgtgaatgatcttttaaataaaagaaaaccttacgtaata

SEQ ID NO: 310574 - DNA, 2076 bp, Homo sapiens
tcaggcggcgcggcggacagccccggcggcggggcggggggagttatattgcggggtccttcctcgctcaccctggttcctctcggagcggagacggcaaatggcggacttcgacacctacgacgatcgggcctacagcagcttcggcggcggcagagggtcccgcggcagtgctggtggccatggttcccgtagccagaaggagttgcccacagagcccccctacacagcatacgtaggaaatctacctttcaatacggttcagggcgacatagatgctatctttaaggatctcagcataaggagtgtacggctagtcagagacaaagacacagataaatttaaaggattctgctatgtagaattcgatgaagtggattcccttaaggaagccttgacatacgatggtgcactgttgggcgatcggtcacttcgtgtggacattgcagaaggcagaaaacaagataaaggtggctttggattcagaaaaggtggaccagatgacagaggcttcagggatgacttcttagggggcaggggaggtagtcgcccaggcgaccggcgaacaggcccccccatgggcagccgcttcagagatggccctcccctccgtggatccaacatggatttcagagaacccacagaagaggaaagagcacagagaccacgactccagcttaaacctcgaacagtcgcgacgcccctcaatcaagtagccaatcccaactctgctatcttcgggggtgccaggcctagagaggaagtcgttcaaaaggagcaagaatgagcctgcggttgggagggaatggggcgtggggggttagagcaggaccacagcctggtgagtccccgggcagccgtcctgcagccgccactcctgcgcctgccattggcctcctcacagcggaaacacagcttgtgagtgcatgtcagctgttaacaagtggtttttagtacattctgggctttgctgtatctatctagtgcctgtttgtgcgtttttttctttcttccgctgcttccccattttccttctgtcctttttctcctgctccttgttttcccagcagcacatggggttcctcggaggagcagaggtggccgccgtgggggggcgtttgggctgcggtgctgcgtcatttttcctttgctttctctttactttagacactggcccaactccaggcgtttcctttcattccctcagtgcttctcttctgacctgcatgttggttgcctgtgtgttgtgtggatctgttcctagtataggcaacataatgagatactgtgcttcccacctccccttcagttcagagccaaaatgggtctagaatctggcactttactcatttcctttgataaattgtactatgcagagctgtcaggaaccttcagatagcagtagaggactgcagctgtctaggtctgcggccacatcttggggacacactggactgttcccatgtgcagggttcagcagttatgtgggagtgctaggggttaggcttttgagcttgaacgcctgcgtgtgaacagatgaaaaatccttcagtacccaagtcccagtctgtcctatggggagcagtttgggggcggccggcagcaggagcctgggaaagaggccctcgccaggtgatggcagggccagggtggcctggggcacccagcggaatgtgcttagtatttggtcaccagccgtcatcctgggcttttcctactgtgtcttgttacaaggcctcagcaatccacagaactctctctccttccttccacctgtcagcttctctgcttctgagataagaaccatttgtgtaacaccaacacttaacttcagaaagacatgcattatgtggtgtaatcaaacccgatgctttcagatgacctacttacatcttcaatgtggataagataaagaacaaaacacatgcatctaaactgctgggcaatccagttgacttttaaatgtaagaatggaattccaaacacttaacacattcagctatatgacagaaagtaaatctatggatatggtattttgtgaatgatcttttaaataaaagaaaaccttacgtaata

SEQ ID NO: 310575 - DNA, 2497 bp, Homo sapiens
tcaggcggcgcggcggacagccccggcggcggggcggggggagttatattgcggggtccttcctcgctcaccctggttcctctcggagcggagacggcaaatggcggacttcgacacctacgacgatcgggcctacagcagcttcggcggcggcagagggtcccgcggcagtgctggtggccatggttcccgtagccagaaggagttgcccacagagcccccctacacagcatacgtaggaaatctacctttcaatacggttcagggcgacatagatgctatctttaaggatctcagcataaggagtgtacggctagtcagagacaaagacacagataaatttaaaggattctgctatgtagaattcgatgaagtggattcccttaaggaagccttgacatacgatggtgcactgttgggcgatcggtcacttcgtgtggacattgcagaaggcagaaaacaagataaaggtggctttggattcagaaaaggtggaccagatgacagaggcttcagagatggccctcccctccgtggatccaacatggatttcagagaacccacagaagaggaaagagcacagagaccacgactccagcttaaacctcgaacagtcgcgacgcccctcaatcaagtagccaatcccaactctgctatcttcgggggtgccaggcctagagaggaagtcgttcaaaaggagcaagaatgagcctgcggttgggagggaatggggcgtggggggttagagcaggaccacagcctggtgagtccccgggcagccgtcctgcagccgccactcctgcgcctgccattggcctcctcacagcggaaacacagcttgtgagtgcatgtcagctgttaacaagtggtttttagtacattctgggctttgctgtatctatctagtgcctgtttgtgcgtttttttctttcttccgctgcttccccattttccttctgtcctttttctcctgctccttgttttcccagcagcacatggggttcctcggaggagcagaggtggccgccgtgggggggcgtttgggctgcggtgctgcgtcatttttcctttgctttctctttactttagacactggcccaactccaggcgtttcctttcattccctcagtgcttctcttctgacctgcatgttgagttctgtattgctggggcttccaacaaaaaccagagtcactgacagagggaacagcagagaccttgttggtattcagctgtgatggatatagagaatcagaggcaccttgttttcacaactaggataaaaatatctgcagggtcctttccattcctatttagagggagtcctggctccatgaccccctcccgagtggactgtccaagcagataggctcacacgagaaacagtgaggctgaaagggggggctatggaagagcggtagggagtccacggagaagatgcagtgaatgcttgcatgcattcacacgtgtgtgtgtcccagctagttcactcctttcgccgtgcgtggtggaggctggcctctctggctgggtgcagtgaatggccagcgggtttcttttctgctgggccaaggcgctttgggggtggagggggtggtgctggtgctgcactgggctgactgcggcgctgacgcagcgtttccccccatccctgttgcctgtgtgttgtgtggatctgttcctagtataggcaacataatgagatactgtgcttcccacctccccttcagttcagagccaaaatgggtctagaatctggcactttactcatttcctttgataaattgtactatgcagagctgtcaggaaccttcagatagcagtagaggactgcagctgtctaggtctgcggccacatcttggggacacactggactgttcccatgtgcagggttcagcagttatgtgggagtgctaggggttaggcttttgagcttgaacgcctgcgtgtgaacagatgaaaaatccttcagtacccaagtcccagtctgtcctatggggagcagtttgggggcggccggcagcaggagcctgggaaagaggccctcgccaggtgatggcagggccagggtggcctggggcacccagcggaatgtgcttagtatttggtcaccagccgtcatcctgggcttttcctactgtgtcttgttacaaggcctcagcaatccacagaactctctctccttccttccacctgtcagcttctctgcttctgagataagaaccatttgtgtaacaccaacacttaacttcagaaagacatgcattatgtggtgtaatcaaacccgatgctttcagatgacctacttacatcttcaatgtggataagataaagaacaaaacacatgcatctaaactgctgggcaatccagttgacttttaaatgtaagaatggaattccaaacacttaacacattcagctatatgacagaaagtaaatctatggatatggtattttgtgaatgatcttttaaataaaagaaaaccttacgtaata

SEQ ID NO: 310576 - DNA, 2407 bp, Homo sapiens
cacaaccaacacaaaagaggaaataaggctaggtacgaggctgggtgttggagacggcaaatggcggacttcgacacctacgacgatcgggcctacagcagcttcggcggcggcagagggattctgctatgtagaattcgatgaagtggattcccttaaggaagccttgacatacgatggtgcactgttgggcgatcggtcacttcgtgtggacattgcagaaggcagaaaacaagataaaggtggctttggattcagaaaaggtggaccagatgacagaggaatgggtagctctcgagaatctagaggtggatgggattcccgggatgacttcaattctggcttcagggatgacttcttagggggcaggggaggtagtcgcccaggcgaccggcgaacaggcccccccatgggcagccgcttcagagatggccctcccctccgtggatccaacatggatttcagagaacccacagaagaggaaagagcacagagaccacgactccagcttaaacctcgaacagtcgcgacgcccctcaatcaagtagccaatcccaactctgctatcttcgggggtgccaggcctagagaggaagtcgttcaaaaggagcaagaatgagcctgcggttgggagggaatggggcgtggggggttagagcaggaccacagcctggtgagtccccgggcagccgtcctgcagccgccactcctgcgcctgccattggcctcctcacagcggaaacacagcttgtgagtgcatgtcagctgttaacaagtggtttttagtacattctgggctttgctgtatctatctagtgcctgtttgtgcgtttttttctttcttccgctgcttccccattttccttctgtcctttttctcctgctccttgttttcccagcagcacatggggttcctcggaggagcagaggtggccgccgtgggggggcgtttgggctgcggtgctgcgtcatttttcctttgctttctctttactttagacactggcccaactccaggcgtttcctttcattccctcagtgcttctcttctgacctgcatgttgagttctgtattgctggggcttccaacaaaaaccagagtcactgacagagggaacagcagagaccttgttggtattcagctgtgatggatatagagaatcagaggcaccttgttttcacaactaggataaaaatatctgcagggtcctttccattcctatttagagggagtcctggctccatgaccccctcccgagtggactgtccaagcagataggctcacacgagaaacagtgaggctgaaagggggggctatggaagagcggtagggagtccacggagaagatgcagtgaatgcttgcatgcattcacacgtgtgtgtgtcccagctagttcactcctttcgccgtgcgtggtggaggctggcctctctggctgggtgcagtgaatggccagcgggtttcttttctgctgggccaaggcgctttgggggtggagggggtggtgctggtgctgcactgggctgactgcggcgctgacgcagcgtttccccccatccctgttgcctgtgtgttgtgtggatctgttcctagtataggcaacataatgagatactgtgcttcccacctccccttcagttcagagccaaaatgggtctagaatctggcactttactcatttcctttgataaattgtactatgcagagctgtcaggaaccttcagatagcagtagaggactgcagctgtctaggtctgcggccacatcttggggacacactggactgttcccatgtgcagggttcagcagttatgtgggagtgctaggggttaggcttttgagcttgaacgcctgcgtgtgaacagatgaaaaatccttcagtacccaagtcccagtctgtcctatggggagcagtttgggggcggccggcagcaggagcctgggaaagaggccctcgccaggtgatggcagggccagggtggcctggggcacccagcggaatgtgcttagtatttggtcaccagccgtcatcctgggcttttcctactgtgtcttgttacaaggcctcagcaatccacagaactctctctccttccttccacctgtcagcttctctgcttctgagataagaaccatttgtgtaacaccaacacttaacttcagaaagacatgcattatgtggtgtaatcaaacccgatgctttcagatgacctacttacatcttcaatgtggataagataaagaacaaaacacatgcatctaaactgctgggcaatccagttgacttttaaatgtaagaatggaattccaaacacttaacacattcagctatatgacagaaagtaaatctatggatatggtattttgtgaatgatcttttaaataaaagaaaaccttacgtaata

SEQ ID NO: 310577 - DNA, 2180 bp, Homo sapiens
gtggacaaactaaagaatttaaaatgaaactcaaacaattcccagaacattattctataagcagcttggagacgatagtttgaaaagtaattcagtgtcctgtttcttcctcaggcttcagggatgacttcttagggggcaggggaggtagtcgcccaggcgaccggcgaacaggcccccccatgggcagccgcttcagagatggccctcccctccgtggatccaacatggatttcagagaacccacagaagaggaaagagcacagagaccacgactccagcttaaacctcgaacagtcgcgacgcccctcaatcaagtagccaatcccaactctgctatcttcgggggtgccaggcctagagaggaagtcgttcaaaaggagcaagaatgagcctgcggttgggagggaatggggcgtggggggttagagcaggaccacagcctggtgagtccccgggcagccgtcctgcagccgccactcctgcgcctgccattggcctcctcacagcggaaacacagcttgtgagtgcatgtcagctgttaacaagtggtttttagtacattctgggctttgctgtatctatctagtgcctgtttgtgcgtttttttctttcttccgctgcttccccattttccttctgtcctttttctcctgctccttgttttcccagcagcacatggggttcctcggaggagcagaggtggccgccgtgggggggcgtttgggctgcggtgctgcgtcatttttcctttgctttctctttactttagacactggcccaactccaggcgtttcctttcattccctcagtgcttctcttctgacctgcatgttgagttctgtattgctggggcttccaacaaaaaccagagtcactgacagagggaacagcagagaccttgttggtattcagctgtgatggatatagagaatcagaggcaccttgttttcacaactaggataaaaatatctgcagggtcctttccattcctatttagagggagtcctggctccatgaccccctcccgagtggactgtccaagcagataggctcacacgagaaacagtgaggctgaaagggggggctatggaagagcggtagggagtccacggagaagatgcagtgaatgcttgcatgcattcacacgtgtgtgtgtcccagctagttcactcctttcgccgtgcgtggtggaggctggcctctctggctgggtgcagtgaatggccagcgggtttcttttctgctgggccaaggcgctttgggggtggagggggtggtgctggtgctgcactgggctgactgcggcgctgacgcagcgtttccccccatccctgttgcctgtgtgttgtgtggatctgttcctagtataggcaacataatgagatactgtgcttcccacctccccttcagttcagagccaaaatgggtctagaatctggcactttactcatttcctttgataaattgtactatgcagagctgtcaggaaccttcagatagcagtagaggactgcagctgtctaggtctgcggccacatcttggggacacactggactgttcccatgtgcagggttcagcagttatgtgggagtgctaggggttaggcttttgagcttgaacgcctgcgtgtgaacagatgaaaaatccttcagtacccaagtcccagtctgtcctatggggagcagtttgggggcggccggcagcaggagcctgggaaagaggccctcgccaggtgatggcagggccagggtggcctggggcacccagcggaatgtgcttagtatttggtcaccagccgtcatcctgggcttttcctactgtgtcttgttacaaggcctcagcaatccacagaactctctctccttccttccacctgtcagcttctctgcttctgagataagaaccatttgtgtaacaccaacacttaacttcagaaagacatgcattatgtggtgtaatcaaacccgatgctttcagatgacctacttacatcttcaatgtggataagataaagaacaaaacacatgcatctaaactgctgggcaatccagttgacttttaaatgtaagaatggaattccaaacacttaacacattcagctatatgacagaaagtaaatctatggatatggtattttgtgaatgatcttttaaataaaagaaaaccttacgtaata

SEQ ID NO: 310578 - DNA, 2168 bp, Homo sapiens
  misc_feature (2037)..(2037): n is a, c, g, or t
  misc_feature (2042)..(2042): n is a, c, g, or t
tcaggcggcgcggcggacagccccggcggcggggcggggggagttatattgcggggtccttcctcgctcaccctggttcctctcggagcggagacggcaaatggcggacttcgacacctacgacgatcgggcctacagcagcttcggcggcggcagagggtcccgcggcagtgctggtggccatggttcccgtagccagaaggagttgcccacagagcccccctacacagcatacgtaggaaatctacctttcaatacggttcagggcgacatagatgctatctttaaggatctcagcataaggagtgtacggctagtcagagacaaagacacagataaatttaaaggattctgctatgtagaattcgatgaagtggattcccttaaggaagccttgacatacgatggtgcactgttgggcgatcggtcacttcgtgtggacattgcagaaggcagaaaacaagataaaggtggctttggattcagaaaaggtggaccagatgacagaggcttcagggatgacttcttagggggcaggggaggtagtcgcccaggcgaccggcgaacaggcccccccatgggcagccgcttcagagatggccctcccctccgtggatccaacatggatttcagagaacccacagaagaggaaagagcacagagaccacgactccagcttaaacctcgaacagtcgcgacgcccctcaatcaagtagccaatcccaactctgctatcttcgggggtgccaggcctagagaggaagtcgttcaaaaggagcaagaatgagcctgcggttgggagggaatggggcgtggggggttagagcaggaccacagcctggtgagtccccgggcagccgtcctgcagccgccactcctgcgcctgccattggcctcctcacagcggaaacacagcttgtgagtgcatgtcagctgttaacaagtggtttttagtacattctgggctttgctgtatctatctagtgcctgtttgtgcgtttttttctttcttccgctgcttccccattttccttctgtcctttttctcctgctccttgttttcccagcagcacatggggttcctcggaggagcagaggtggccgccgtgggggggcgtttgggctgcggtgctgcgtcatttttcctttgctttctctttactttagacactggcccaactccaggcgtttcctttcattccctcagtgcttctcttctgacctgcatgttgagttctgtattgctggggcttccaacaaaaaccagagtcactgacagagggaacagcagagaccttgttggtattcagctgtgatggatatagagaatcagaggcaccttgttttcacaactaggataaaaatatctgcagggtcctttccattcctatttagagggagtcctggctccatgaccccctcccgagtggactgtccaagcagataggctcacacgagaaacagtgaggctgaaagggggggctatggaagagcggtagggagtccacggagaagatgcagtgaatgcttgcatgcattcacacgtgtgtgtgtcccagctagttcactcctttcgccgtgcgtggtggaggctggcctctctggctgggtgcagtgaatggccagcgggtttcttttctgctgggccaaggcgctttgggggtggagggggtggtgctggtgctgcactgggctgactgcggcgctgacgcagcgtttccccccatccctgttgcctgtgtgttgtgtggatctgttcctagtataggcaacataatgagatactgtgcttcccacctccccttcagttcagagccaaaatgggtctagaatctggcactttactcatttcctttgataaattgtactatgcagagctgtcaggaaccttcagatagcagtagaggactgcagctgtctaggtctgcggccacatcttggggacacactggactgttcccatgtgcagggttcagcagttatgtgggagtgctaggggttaggcttttgagcttgaacgcctgcgtgtgaacagcngtganatcttcgtcccatgcccgtgccttgggccattggggggccgctggcctggaaaagccccccggttgttgcccgttgttgggcccgcgttcgtttggcccccctccgggtccctcgttttagcccac

SEQ ID NO: 310579 - DNA, 2207 bp, Homo sapiens
tcaggcggcgcggcggacagccccggcggcggggcggggggagttatattgcggggtccttcctcgctcaccctggttcctctcggagcggagacggcaaatggcggacttcgacacctacgacgatcgggcctacagcagcttcggcggcggcagagggtcccgcggcagtgctggtggccatggttcccgtagccagaaggagttgcccacagagcccccctacacagcatacgtaggaaatctacctttcaatacggttcagggcgacatagatgctatctttaaggatctcagcataaggagtgtacggctagtcagagacaaagacacagataaatttaaaggattctgctatgtagaattcgatgaagtggattcccttaaggaagccttgacatacgatggtgcactgttgggcgatcggtcacttcgtgtggacattgcagaaggcagaaaacaagataaaggtggctttggattcagaaaaggtggaccagatgacagaggcttcagggatgacttcttagggggcaggggaggtagtcgcccaggcgaccggcgaacaggcccccccatgggcagccgcttcagagatggccctcccctccgtggatccaacatggatttcagagaacccacagaagaggaaagagcacagagaccacgactccagcttaaacctcgaacagtcgcgacgcccctcaatcaagtagccaatcccaactctgctatcttcgggggtgccaggcctagagaggaagtcgttcaaaaggagcaagaatgagcctgcggttgggagggaatggggcgtggggggttagagcaggaccacagcctggtgagtccccgggcagccgtcctgcagccgccactcctgcgcctgccattggcctcctcacagcggaaacacagcttgtgagtgcatgtcagctgttaacaagtggtttttagtacattctgggctttgctgtatctatctagtgcctgtttgtgcgtttttttctttcttccgctgcttccccattttccttctgtcctttttctcctgctccttgttttcccagcagcacatggggttcctcggaggagcagaggtggccgccgtgggggggcgtttgggctgcggtgctgcgtcatttttcctttgctttctctttactttagacactggcccaactccaggcgtttcctttcattccctcagtgcttctcttctgacctgcatgttgagttctgtattgctggggcttccaacaaaaaccagagtcactgacagagggaacagcagagaccttgttggtattcagctgtgatggatatagagaatcagaggcaccttgttttcacaactaggataaaaatatctgcagggtcctttccattcctatttagagggagtcctggctccatgaccccctcccgagtggactgtccaagcagataggctcacacgagaaacagtgaggctgaaagggggggctatggaagagcggtagggagtccacggagaagatgcagtgaatgcttgcatgcattcacacgtgtgtgtgtcccagctagttcactcctttcgccgtgcgtggtggaggctggcctctctggctgggtgcagtgaatggccagcgggtttcttttctgctgggccaaggcgctttgggggtggagggggtggtgctggtgctgcactgggctgactgcggcgctgacgcagcgtttccccccatccctgttgcctgtgtgttgtgtggatctgttcctagtataggcaacataatgagatactgtgcttcccacctccccttcagttcagagccaaaatgggtctagaatctggcactttactcatttcctttgataaattgtactatgcagagctgtcaggaaccttcagatagcagtagaggactgcagctgtctaggtctgcggccacatcttggggacacactggactgttcccatgtgcagggttcagccccccgtatgtgggggagggcacgggggtagggccgttggagactggaaagccccttgggtgtgaccgtagtaaaacttctgtgccccgtcccccgtgttgctgggggcgcctggtggcgcggcgcagcacgtgtgaaaacccgcggttgtggccgggctgtgtccccatgtgtttgtgaccccacgctctctgtgttgatcagcgccacctctccgtgaggaggtggag

SEQ ID NO: 310580 - DNA, 1393 bp, Homo sapiens
cacaaccaacacaaaagaggaaataaggctaggtacgaggctgggtgttgagttctgtattgctggggcttccaacaaaaaccagagtcactgacagagggaacagcagagaccttgttggtattcagctgtgatggatatagagaatcagaggcaccttgttttcacaactaggataaaaatatctgcagggtcctttccattcctatttagagggagtcctggctccatgaccccctcccgagtggactgtccaagcagataggctcacacgagaaacagtgaggctgaaagggggggctatggaagagcggtagggagtccacggagaagatgcagtgaatgcttgcatgcattcacacgtgtgtgtgtcccagctagttcactcctttcgccgtgcgtggtggaggctggcctctctggctgggtgcagtgaatggccagcgggtttcttttctgctgggccaaggcgctttgggggtggagggggtggtgctggtgctgcactgggctgactgcggcgctgacgcagcgtttccccccatccctgttgcctgtgtgttgtgtggatctgttcctagtataggcaacataatgagatactgtgcttcccacctccccttcagttcagagccaaaatgggtctagaatctggcactttactcatttcctttgataaattgtactatgcagagctgtcaggaaccttcagatagcagtagaggactgcagctgtctaggtctgcggccacatcttggggacacactggactgttcccatgtgcagggttcagcagttatgtgggagtgctaggggttaggcttttgagcttgaacgcctgcgtgtgaacagatgaaaaatccttcagtacccaagtcccagtctgtcctatggggagcagtttgggggcggccggcagcaggagcctgggaaagaggccctcgccaggtgatggcagggccagggtggcctggggcacccagcggaatgtgcttagtatttggtcaccagccgtcatcctgggcttttcctactgtgtcttgttacaaggcctcagcaatccacagaactctctctccttccttccacctgtcagcttctctgcttctgagataagaaccatttgtgtaacaccaacacttaacttcagaaagacatgcattatgtggtgtaatcaaacccgatgctttcagatgacctacttacatcttcaatgtggataagataaagaacaaaacacatgcatctaaactgctgggcaatccagttgacttttaaatgtaagaatggaattccaaacacttaacacattcagctatatgacagaaagtaaatctatggatatggtattttgtgaatgatcttttaaataaaagaaaaccttacgtaata

SEQ ID NO: 310581 - DNA, 1551 bp, Homo sapiens
  misc_feature (65)..(65): n is a, c, g, or t
  misc_feature (117)..(117): n is a, c, g, or t
  misc_feature (156)..(156): n is a, c, g, or t
gtaaaacgtcaacgggatgccagcagtttagatgcatgtgtttggttctttatcttatccacatngaagatgtaagtaggtcatctgaaagcatcgggttggattacaccacataangcatgtctttctgaagttaagtgtgggtgttacacaaanggttcttatctcagaagcagagaagctgacaggtggaaggaaggagagagagagttctgtattgctggggcttccaacaaaaaccagagtcactgacagagggaacagcagagaccttgttggtattcagctgtgatggatatagagaatcagaggcaccttgttttcacaactaggataaaaatatctgcagggtcctttccattcctatttagagggagtcctggctccatgaccccctcccgagtggactgtccaagcagataggctcacacgagaaacagtgaggctgaaagggggggctatggaagagcggtagggagtccacggagaagatgcagtgaatgcttgcatgcattcacacgtgtgtgtgtcccagctagttcactcctttcgccgtgcgtggtggaggctggcctctctggctgggtgcagtgaatggccagcgggtttcttttctgctgggccaaggcgctttgggggtggagggggtggtgctggtgctgcactgggctgactgcggcgctgacgcagcgtttccccccatccctgttgcctgtgtgttgtgtggatctgttcctagtataggcaacataatgagatactgtgcttcccacctccccttcagttcagagccaaaatgggtctagaatctggcactttactcatttcctttgataaattgtactatgcagagctgtcaggaaccttcagatagcagtagaggactgcagctgtctaggtctgcggccacatcttggggacacactggactgttcccatgtgcagggttcagcagttatgtgggagtgctaggggttaggcttttgagcttgaacgcctgcgtgtgaacagatgaaaaatccttcagtacccaagtcccagtctgtcctatggggagcagtttgggggcggccggcagcaggagcctgggaaagaggccctcgccaggtgatggcagggccagggtggcctggggcacccagcggaatgtgcttagtatttggtcaccagccgtcatcctgggcttttcctactgtgtcttgttacaaggcctcagcaatccacagaactctctctccttccttccacctgtcagcttctctgcttctgagataagaaccatttgtgtaacaccaacacttaacttcagaaagacatgcattatgtggtgtaatcaaacccgatgctttcagatgacctacttacatcttcaatgtggataagataaagaacaaaacacatgcatctaaactgctgggcaatccagttgacttttaaatgtaagaatggaattccaaacacttaacacattcagctatatgacagaaagtaaatctatggatatggtattttgtgaatgatcttttaaataaaagaaaaccttacgtaata

SEQ ID NO: 310582 - DNA, 1764 bp, Homo sapiens
tcaggcggcgcggcggacagccccggcggcggggcggggggagttatattgcggggtccttcctcgctcaccctggttcctctcggagcggagacggcaaatggcggacttcgacacctacgacgatcgggcctacagcagcttcggcggcggcagagggtcccgcggcagtgctggtggccatggttcccgtagccagaaggagttgcccacagagcccccctacacagcatacgtaggaaatctacctttcaatacggttcagggcgacatagatgctatctttaaggatctcagcataaggagtgtacggctagtcagagacaaagacacagataaatttaaaggattctgctatgtagaattcgatgaagtggattcccttaaggaagccttgacatacgatggtgcactgttgggcgatcggtcacttcgtgtggacattgcagaaggcagaaaacaagataaaggtggctttggattcagaaaaggtggaccagatgacagaggcttcagggatgacttcttagggggcaggggaggtagtcgcccaggcgaccggcgaacaggcccccccatgggcagccgcttcagagatggccctcccctccgtggatccaacatggatttcagagaacccacagaagaggaaagagcacagagaccacgactccagcttaaacctcgaacagtcgcgacgcccctcaatcaagtagccaatcccaactctgctatcttcgggggtgccaggcctagagaggaagtcgttcaaaaggagcaagaatgagcctgcggttgggagggaatggggcgtggggggttagagcaggaccacagcctggtgagtccccgggcagccgtcctgcagccgccactcctgcgcctgccattggcctcctcacagcggaaacacagcttgtgagtgcatgtcagctgttaacaagtggtttttagtacattctgggctttgctgtatctatctagtgcctgtttgtgcgtttttttctttcttccgctgcttccccattttccttctgtcctttttctcctgctccttgttttcccagcagcacatggggttcctcggaggagcagaggtggccgccgtgggggggcgtttgggctgcggtgctgcgtcatttttcctttgctttctctttactttagacactggcccaactccaggcgtttcctttcattccctcagtgcttctcttctgacctgcatgttgagttctgtattgctggggcttccaacaaaaaccagagtcactgacagagggaacagcagagaccttgttggtattcagctgtgatggatatagagaatcagaggcaccttgttttcacaactaggataaaaatatctgcagggtcctttccattcctatttagagggagtcctggctccatgaccccctcccgagtggactgtccaagcagataggctcacacgagaaacagtgaggctgaaagggggggctatggaagagcggtagggagtccacggagaagatgcagtgaatgcttgcatgcattcacacgtgtgtgtgtcccagctagttcactcctttcgccgtgcgtggtggaggctggcctctctggctgggtgcaggggccgcaccagctggctcttctctttgatgaggaagagggcgaatacctgcacttcctgaggctccgtgatacccatttgccggcacagctcctcctgcacttctgctgctactgtgaaagtctggatattcgtcctataatccacac

SEQ ID NO: 310583 - DNA, 1625 bp, Homo sapiens
tcaggcggcgcggcggacagccccggcggcggggcggggggagttatattgcggggtccttcctcgctcaccctggttcctctcggagcggagacggcaaatggcggacttcgacacctacgacgatcgggcctacagcagcttcggcggcggcagagggtcccgcggcagtgctggtggccatggttcccgtagccagaaggagttgcccacagagcccccctacacagcatacgtaggaaatctacctttcaatacggttcagggcgacatagatgctatctttaaggatctcagcataaggagtgtacggctagtcagagacaaagacacagataaatttaaaggattctgctatgtagaattcgatgaagtggattcccttaaggaagccttgacatacgatggtgcactgttgggcgatcggtcacttcgtgtggacattgcagaaggcagaaaacaagataaaggtggctttggattcagaaaaggtggaccagatgacagaggcttcagggatgacttcttagggggcaggggaggtagtcgcccaggcgaccggcgaacaggcccccccatgggcagccgcttcagagatggccctcccctccgtggatccaacatggatttcagagaacccacagaagaggaaagagcacagagaccacgactccagcttaaacctcgaacagtcgcgacgcccctcaatcaagtagccaatcccaactctgctatcttcgggggtgccaggcctagagaggaagtcgttcaaaaggagcaagaatgagcctgcggttgggagggaatggggcgtggggggttagagcaggaccacagcctggtgagtccccgggcagccgtcctgcagccgccactcctgcgcctgccattggcctcctcacagcggaaacacagcttgtgagtgcatgtcagctgttaacaagtggtttttagtacattctgggctttgctgtatctatctagtgcctgtttgtgcgtttttttctttcttccgctgcttccccattttccttctgtcctttttctcctgctccttgttttcccagcagcacatggggttcctcggaggagcagaggtggccgccgtgggggggcgtttgggctgcggtgctgcgtcatttttcctttgctttctctttactttagacactggcccaactccaggcgtttcctttcattccctcagtgcttctcttctgacctgcatgttgtttggtcaccagccgtcatcctgggcttttcctactgtgtcttgttacaaggcctcagcaatccacagaactctctctccttccttccacctgtcagcttctctgcttctgagataagaaccatttgtgtaacaccaacacttaacttcagaaagacatgcattatgtggtgtaatcaaacccgatgctttcagatgacctacttacatcttcaatgtggataagataaagaacaaaacacatgcatctaaactgctgggcaatccagttgacttttaaatgtaagaatggaattccaaacacttaacacattcagctatatgacagaaagtaaatctatggatatggtattttgtgaatgatcttttaaataaaagaaaaccttacgtaata

SEQ ID NO: 310584 - DNA, 1615 bp, Homo sapiens
tcaggcggcgcggcggacagccccggcggcggggcggggggagttatattgcggggtccttcctcgctcaccctggttcctctcggagcggagacggcaaatggcggacttcgacacctacgacgatcgggcctacagcagcttcggcggcggcagagggtcccgcggcagtgctggtggccatggttcccgtagccagaaggagttgcccacagagcccccctacacagcatacgtaggaaatctacctttcaatacggttcagggcgacatagatgctatctttaaggatctcagcataaggagtgtacggctagtcagagacaaagacacagataaatttaaaggattctgctatgtagaattcgatgaagtggattcccttaaggaagccttgacatacgatggtgcactgttgggcgatcggtcacttcgtgtggacattgcagaaggcagaaaacaagataaaggtggctttggattcagaaaaggtggaccagatgacagaggcttcagggatgacttcttagggggcaggggaggtagtcgcccaggcgaccggcgaacaggcccccccatgggcagccgcttcagagatggccctcccctccgtggatccaacatggatttcagagaacccacagaagaggaaagagcacagagaccacgactccagcttaaacctcgaacagtcgcgacgcccctcaatcaagtagccaatcccaactctgctatcttcgggggtgccaggcctagagaggaagtcgttcaaaaggagcaagaatgagcctgcggttgggagggaatggggcgtggggggttagagcaggaccacagcctggtgagtccccgggcagccgtcctgcagccgccactcctgcgcctgccattggcctcctcacagcggaaacacagcttgtgagtgcatgtcagctgttaacaagtggtttttagtacattctgggctttgctgtatctatctagtgcctgtttgtgcgtttttttctttcttccgctgcttccccattttccttctgtcctttttctcctgctccttgttttcccagcagcacatggggttcctcggaggagcagaggtggccgccgtgggggggcgtttgggctgcggtgctgcgtcatttttcctttgctttctctttactttagacactggcccaactccaggcgtttcctttcattccctcagtgcttctcttctgacctgcatgttgagttctgtattgctggggcttccaacaaaaaccagagtcactgacagagggaacagcagagaccttgttggtattcagctgtgatggatatagagaatcagaggcaccttgttttcacaactaggataaaaatatctgcagggtcctttccattcctatttagagggagtcctggctccatgaccccctcccgagtggactgtccacacatggatttcagagaacccaacagaagagggaaggagcacagagaccacgaatccagggtttaagacctcgaaacagtcgagaaggcccctcaattcaagtaggccaatcccaattctgcttatcttcggggggtgccagggctacgagaggaagtcgttcaaaaggagccagat

SEQ ID NO: 310585 - DNA, 1592 bp, Homo sapiens
tcaggcggcgcggcggacagccccggcggcggggcggggggagttatattgcggggtccttcctcgctcaccctggttcctctcggagcggagacggcaaatggcggacttcgacacctacgacgatcgggcctacagcagcttcggcggcggcagagggtcccgcggcagtgctggtggccatggttcccgtagccagaaggagttgcccacagagcccccctacacagcatacgtaggaaatctacctttcaatacggttcagggcgacatagatgctatctttaaggatctcagcataaggagtgtacggctagtcagagacaaagacacagataaatttaaaggattctgctatgtagaattcgatgaagtggattcccttaaggaagccttgacatacgatggtgcactgttgggcgatcggtcacttcgtgtggacattgcagaaggcagaaaacaagataaaggtggctttggattcagaaaaggtggaccagatgacagaggcttcagggatgacttcttagggggcaggggaggtagtcgcccaggcgaccggcgaacaggcccccccatgggcagccgcttcagagatggccctcccctccgtggatccaacatggatttcagagaacccacagaagaggaaagagcacagagaccacgactccagcttaaacctcgaacagtcgcgacgcccctcaatcaagtagccaatcccaactctgctatcttcgggggtgccaggcctagagaggaagtcgttcaaaaggagcaagaatgagcctgcggttgggagggaatggggcgtggggggttagagcaggaccacagcctggtgagtccccgggcagccgtcctgcagccgccactcctgcgcctgccattggcctcctcacagcggaaacacagcttgtgagtgcatgtcagctgttaacaagtggtttttagtacattctgggctttgctgtatctatctagtgcctgtttgtgcgtttttttctttcttccgctgcttccccattttccttctgtcctttttctcctgctccttgttttcccagcagcacatggggttcctcggaggagcagaggtggccgccgtgggggggcgtttgggctgcggtgctgcgtcatttttcctttgctttctctttactttagacactggcccaactccaggcgtttcctttcattccctcagtgcttctcttctgacctgcatgttgagttctgtattgctggggcttccaacaaaaaccagagtcactgacagagggaacagcagagaccttgttggtattcagctgtgatggatatagagaatcagaggcaccttgttttcacaactaggataaaaatatctgcagcttcctgcttctgccgtctactcctctcagccttctgctgcccccagggctacctcttggttcctaacccacacctcctatccgttctcttttcattaagctctcccaagccacctaactccaggtctccatcccgcatctcctcctcctcctccctctctcctttccagctcctgcctcttctcccctctctccttttcacctgcttcctgcttctgt

SEQ ID NO: 310586 - DNA, 1349 bp, Homo sapiens
tcaggcggcgcggcggacagccccggcggcggggcggggggagttatattgcggggtccttcctcgctcaccctggttcctctcggagcggagacggcaaatggcggacttcgacacctacgacgatcgggcctacagcagcttcggcggcggcagagggtcccgcggcagtgctggtggccatggttcccgtagccagaaggagttgcccacagagcccccctacacagcatacgtaggaaatctacctttcaatacggttcagggcgacatagatgctatctttaaggatctcagcataaggagtgtacggctagtcagagacaaagacacagataaatttaaaggattctgctatgtagaattcgatgaagtggattcccttaaggaagccttgacatacgatggtgcactgctgggccaaggcgctttgggggtggagggggtggtgctggtgctgcactgggctgactgcggcgctgacgcagcgtttccccccatccctgttgcctgtgtgttgtgtggatctgttcctagtataggcaacataatgagatactgtgcttcccacctccccttcagttcagagccaaaatgggtctagaatctggcactttactcatttcctttgataaattgtactatgcagagctgtcaggaaccttcagatagcagtagaggactgcagctgtctaggtctgcggccacatcttggggacacactggactgttcccatgtgcagggttcagcagttatgtgggagtgctaggggttaggcttttgagcttgaacgcctgcgtgtgaacagatgaaaaatccttcagtacccaagtcccagtctgtcctatggggagcagtttgggggcggccggcagcaggagcctgggaaagaggccctcgccaggtgatggcagggccagggtggcctggggcacccagcggaatgtgcttagtatttggtcaccagccgtcatcctgggcttttcctactgtgtcttgttacaaggcctcagcaatccacagaactctctctccttccttccacctgtcagcttctctgcttctgagataagaaccatttgtgtaacaccaacacttaacttcagaaagacatgcattatgtggtgtaatcaaacccgatgctttcagatgacctacttacatcttcaatgtggataagataaagaacaaaacacatgcatctaaactgctgggcaatccagttgacttttaaatgtaagaatggaattccaaacacttaacacattcagctatatgacagaaagtaaatctatggatatggtattttgtgaatgatcttttaaataaaagaaaaccttacgtaata

SEQ ID NO: 310587 - DNA, 1228 bp, Homo sapiens
tcaggcggcgcggcggacagccccggcggcggggcggggggagttatattgcggggtccttcctcgctcaccctggttcctctcggagcggagacggcaaatggcggacttcgacacctacgacgatcgggcctacagcagcttcggcggcggcagagggtcccgcggcagtgctggtggccatggttcccgtagccagaaggagttgcccacagagcccccctacacagcatacgtaggaaatctacctttcaatacggttcagggcgacatagatgctatctttaaggatctcagcataaggagtgtacggctagtcagagacaaagacacagataaatttaaaggattctgctatgtagaattcgatgaagtggattcccttaaggaagccttgacatacgatggtgcactgttgggcgatcggtcacttcgtgtggacattgcagaaggcagaaaacaagataaaggtggctttggattcagaaaaggtggaccagatgacagaggcttcagggatgacttcttagggggcaggggaggtagtcgcccaggcgaccggcgaacaggcccccccatgggcagccgcttcagagatggccctcccctccgtggatccaacatggatttcagagaacccacagaagaggaaagagcacagagaccacgactccagcttaaacctcgaacagtcgcgacgcccctcaatcaagtagccaatcccaactctgctatcttcgggggtgccaggcctagagaggaagtcgttcaaaaggagcaagaatgagcctgcggttgggagggaatggggcgtggggggttagagcaggaccacagcctggtgagtccccgggcagccgtcctgcagccgccactcctgcgcctgccattggcctcctcacagcggaaacacagcttgtgagtgcatgtcagttctctgcttctgagataagaaccatttgtgtaacaccaacacttaacttcagaaagacatgcattatgtggtgtaatcaaacccgatgctttcagatgacctacttacatcttcaatgtggataagataaagaacaaaacacatgcatctaaactgctgggcaatccagttgacttttaaatgtaagaatggaattccaaacacttaacacattcagctatatgacagaaagtaaatctatggatatggtattttgtgaatgatcttttaaataaaagaaaaccttacgtaata

SEQ ID NO: 310588 - DNA, 804 bp, Homo sapiens
agtacggtccggcccatggaaattgatcaagcaatacccatttcccccgtgcacctattctgagcttccttccctcatttcctttgataaattgtactatgcagagctgtcaggaaccttcagatagcagtagaggactgcagctgtctaggtctgcggccacatcttggggacacactggactgttcccatgtgcagggttcagcagttatgtgggagtgctaggggttaggcttttgagcttgaacgcctgcgtgtgaacagatgaaaaatccttcagtacccaagtcccagtctgtcctatggggagcagtttgggggcggccggcagcaggagcctgggaaagaggccctcgccaggtgatggcagggccagggtggcctggggcacccagcggaatgtgcttagtatttggtcaccagccgtcatcctgggcttttcctactgtgtcttgttacaaggcctcagcaatccacagaactctctctccttccttccacctgtcagcttctctgcttctgagataagaaccatttgtgtaacaccaacacttaacttcagaaagacatgcattatgtggtgtaatcaaacccgatgctttcagatgacctacttacatcttcaatgtggataagataaagaacaaaacacatgcatctaaactgctgggcaatccagttgacttttaaatgtaagaatggaattccaaacacttaacacattcagctatatgacagaaagtaaatctatggatatggtattttgtgaatgatcttttaaataaaagaaaaccttacgtaata

SEQ ID NO: 310589 - DNA, 696 bp, Homo sapiens
  misc_feature (650)..(650): n is a, c, g, or t
tcaggcggcgcggcggacagccccggcggcggggcggggggagttatattgcggggtccttcctcgctcaccctggttcctctcggagcggagacggcaaatggcggacttcgacacctacgacgatcgggcctacagcagcttcggcggcggcagagggtcccgcggcagtgctggtggccatggttcccgtagccagaaggagttgcccacagagcccccctacacagcatacgtaggaaatctacctttcaatacggttcagggcgacatagatgctatctttaaggatctcagcataaggagtgtacggctagtcagagacaaagacacagataaatttaaaggattctgctatgtagaattcgatgaagtggattcccttaaggaagccttgacatacgatggtgcactgttgggcgatcggtcacttcgtgtggacattgcagaaggcagaaaacaagataaaggtggctttggattcagaaaaggtggaccagatgacagaggcttcagggatgacttcttagggggcaggggaggtagtcgcccaggcgaccggcgaacaggcccccccatgggcagccgcttcagagatggccctcccctccgtggatccaacatggatttcagagaacccacagaagagnacagaacacagagaccacgccacccctgctggtaccagctcgattc

SEQ ID NO: 310590 - DNA, 503 bp, Homo sapiens
tcaggcggcgcggcggacagccccggcggcggggcggggggagttatattgcggggtccttcctcgctcaccctggttcctctcggagcggagacggcaaatggcggacttcgacacctacgacgatcgggcctacagcagcttcggcggcggcagagggtcccgcggcagtgctggtggccatggttcccgtagccagaaggagttgcccacagagcccccctacacagcatacgtaggaaatctacctttcaatacggttcagggcgacatagatgctatctttaaggatctcagcataaggagtgtacggctagtcagagacaaagacacagataaatttaaaggattctgctatgtagaattcgatgaagtggattcccttaaggaagccttgacatacgatggtgcactgttgggcgatcggtcacttcgtgtggttgtacggcgtgtgcagcaacaacttcgtccatactgacttgtctgggctctcggcgtgtgca

SEQ ID NO: 310591 - DNA, 373 bp, Homo sapiens
cccgcggcagtgctggtggccatggttcccgtagccagaaggagttgcccacagagcccccctacacagcatacgtaggaaatctacctttcaatacggttcagggcgacatagatgctatctttaaggatctcagcataaggagtgtacggctagtcagagacaaagacacagataaatttaaaggtgagtttgggggattcttattgtatattactgtaaagtgtaggggaggatgggaaggggttctaaataaaaatagatttgtgaaccagaggctgtaatcaagaaagtgttttaaacatttgcctggtctaagtggccgaaagaaacataactcttcaactcataggtcttcagttcacttagggga

SEQ ID NO: 310592 - DNA, 495 bp, Homo sapiens
tgcagtatgcctaccaattccaactcgtgaacgttcctagtagaactcgattatctcataggtgtgataggttctcgtgagctcttaaaagtttgcgtaaaatcctagaaagaatggctgatgcttctgcaagcctggcgttttttgttttctgttggaagcaaaagctcttaaaatgatttcattgaaccttccatcacttgagttgtatgtcttccaaatgaatttttccatgtttgcgcagcaaggtaatgacacgacctcaactttatcttttttgtgtatcctcaggaatgggtagctctcgagaatctagaggtggatgggattcccgggatgacttcaattctggtatcagtatttaaagtatcaccacttaatttttcctaggagccttgctgctgttctctgtttcttacgagtagcccgcctggccggactacttatttagttcctttaacaaatacaactctcctgcagggtgcccaggcatgc

SEQ ID NO: 310593 - DNA, 557 bp, Homo sapiens
  misc_feature (41)..(41): n is a, c, g, or t
  misc_feature (401)..(401): n is a, c, g, or t
  misc_feature (449)..(449): n is a, c, g, or t
  misc_feature (455)..(455): n is a, c, g, or t
cccttgaaatacttaaatgtctctacttaaaatacagaaanttcgggcgcggtggcgcgtgcctgtagtcccagctactcgggaggctgaggctggaggatcgcttgagtccaggagttctgggctgtagtgcgctatgccgatcgggtgtccgcactaagttcggcatcaatatggtgacctcccgggagcgggggaccaccaggttgcctaaggaggggtgaaccggcccaggtcggaaacggagcaggtcaaaactcccgtgctgatcagtagtgggatcgcgcctgtgaatagccactgcactccagcctgagcaacatagcgagacccctgtctctactaaaaatacaaaaaattagccgggcgtggtggcacgtgcctgtagtcccagctactcnggaggctgaggcaggagaatcgcttgaacccgggaggcagaggttgcngtgagncgagattgcaccactgcactccagcctgggtgacagagtaagacactagatagatagatagatagatagatagatagatagatagatagatagaaccgacag

SEQ ID NO: 310594 - DNA, 474 bp, Homo sapiens
gaatctgttcggctgtggctctatctgaagacaatgagaaggtttgggtgagagcaggtgcaaacgtggacagagcactggcctgagagtcagcatgtggccgggcgcagtggctcacgcctgtaatcccagcactttgggaggccgaggcgggtggatcacgaggtcaggagatcgagaccatcctggctaacatggtgaaaccccgtctctactaaaaatacaaaaaattagccgggcgtggtggcggcgggcgcggtggcgcgtgcctgtagtcccagctactcgggaggctgaggctggaggatcgcttgagtccaggagttctgggctgtagtgcgctatgccgatcgggtgtccgcactaagttcggcatcaatatggtgacctcccgggagcgggggaccaccaggttgcctagattccatttgggggattccattgggggattccatttgggggaatccatttggg

SEQ ID NO: 310595 - DNA, 856 bp, Homo sapiens
  misc_feature (363)..(363): n is a, c, g, or t
  misc_feature (483)..(483): n is a, c, g, or t
  misc_feature (534)..(535): n is a, c, g, or t
  misc_feature (565)..(565): n is a, c, g, or t
  misc_feature (571)..(571): n is a, c, g, or t
  misc_feature (593)..(593): n is a, c, g, or t
  misc_feature (635)..(635): n is a, c, g, or t
  misc_feature (672)..(672): n is a, c, g, or t
  misc_feature (833)..(833): n is a, c, g, or t
  misc_feature (837)..(837): n is a, c, g, or t
  misc_feature (843)..(843): n is a, c, g, or t
  misc_feature (847)..(847): n is a, c, g, or t
gcggccgcctactactactaaattcgcggccgcgtcgacagccgggcgcggtggcgcgtgcctgtagtcccagctactcgggaggctgaggctggaggatcgcttgagtccaggagttctgggctgtagtgcgctatgccgatcgggtgtccgcactaagttcggcatcaatatggtgacctcccgggagcgggggaccaccaggttgcctacaacccccctcctaatactaactacctgactcctacccctcacaatcatggcaagccaacgccacttatccagtgaaccactatcacgaaaaaaactctacctctctatactaatctccctacaaatctccttaattataacattcacagncacagaactaatcatattttatatcttcttcgaaacacacttatccccaccttggctatcatcacccgatgaggcaaccagccagaacgcctgaacgcaggcacatacttcctattctanaccctagtaggctcccttcccctactcatcgcactaatttacactcacaanncctaggctcactaaacattctactactcancctcantgcccaagaactatcaaactcntgagccaacaacttaatatgactagcttacacaatagctttnatagtaaaaatacctctttacggactccacttatganccctaaagccatgtcgaagcccccatcgctgggtcaaatagtactttgccgcagtactcttgaaactaggcggctatggtataatacgcctcaactcattctcaacccctgacaaacacatagctacccttcttgtactatcctatgaggcataattatancagntccatntggntagaaaaca

SEQ ID NO: 310596 - DNA, 634 bp, Homo sapiens
ggtgtaaccggatcaggtttatcagcaaactaaagagatgagttggagagtatgatagatattctaacgagcctttctgagtactttcaagagttttagagcatgtttctttgtctaaatgtctagtctcctttcgtattatacatgggttaaggagaccttttatacaggcacatgaccggcctacttaacaatgactcaaataggtttccaagtcacaaataaaatggagaagaaaggaataaagagaaagggggagaagaaatgaggtaatatggcaatggcagaaaagaaatttcagttggagggatctaacagaggctgtgtgcttatcaagaaatggtacgaggccaggtgtcgggcgcggtggcgcgtgcctgtagtcccagctactcgggaggctgaggctggaggatcgcttgagtccaggagttctgggctgtagtgcgctatgccgatcgggtgtccgcactaagttcggcatcaatatggtgacctcccgggagcgggggaccaccaggttgcctacaggctggagtgcagtggcacgatttcagctcactgcaacctccgtctcccaggttcaagcgattctcctgcctcagcctcctgagtagctgggattacaggcata

SEQ ID NO: 310597 - DNA, 274 bp, Homo sapiens
gtgtactggctgcacgtcgatcgggcgaggcgttgaatcaggtgtctcagtgatcacctgtaccgtgagaccgtcgctcctggaatatttccccgtcacgcaagtcgtgaaggaggggtgaaccggcccaggtcggaaacggagcaggtcaaaactcccgtgctgatcagtagtgggatcgcgcctgtgaatagccactgcactccagcctgagcaacatagcgagacccctcttaaaagaaaaatataatacgttaattttggactctcaaga

SEQ ID NO: 310598 - DNA, 301 bp, Homo sapiens
  misc_feature (278)..(278): n is a, c, g, or t
gcggccgcctactactactaaattcgcggccgcgtcgacagccaggtcaaaactcccgtgctgatcagtagtgggatcgcgcctgtgaatagccactgcactccagcctgagcaacatagcgagacccctttaaatcaagaaaacctaaaaaaacattttcatttacatagcaccaaatataagagccttttttttttaacctagaaagagtattttggagagagaaactaaggatcagaaggtttaagagtatcaaaaatctgaggccagtcctcancatcgtgtaatcccacgaccttt

SEQ ID NO: 310599 - DNA, 734 bp, Homo sapiens
  misc_feature (578)..(578): n is a, c, g, or t
  misc_feature (626)..(626): n is a, c, g, or t
  misc_feature (632)..(632): n is a, c, g, or t
gagcagatacacacagtagacagaaattcaatgttaaacactaaaataatgtataaaagaggtaatgtagccgggcgcagtggctcacgcctgtaatcccagcactttgggaggccgaggcgggtggatcacgaggtcaggagatcgagaccatcctggctaacatggtgaaaccccgtctctactaaaaatacaaaaaattagccgggcgtggtggcggcgggcgcggtggcgcgtgcctgtagtcccagctactcgggaggctgaggctggaggatcgcttgagtccaggagttctgggctgtagtgcgctatgccgatcgggtgtccgcactaagttcggcatcaatatggtgacctcccgggagcgggggaccaccaggttgcctaaggaggggtgaaccggcccaggtcggaaacggagcaggtcaaaactcccgtgctgatcagtagtgggatcgcgcctgtgaatagccactgcactccagcctgagcaacatagcgagacccctgtctctactaaaaatacaaaaaattagccgggcgtggtggcacgtgcctgtagtcccagctactcnggaggctgaggcaggagaatcgcttgaacccgggaggcagaggttgcngtgagncgagattgcaccactgcactccagcctgggtgacagagtaagacactagatagatagatagatagatagatagatagatagatagatagatagaaccgacag

SEQ ID NO: 310600 - DNA, 824 bp, Homo sapiens
  misc_feature (578)..(578): n is a, c, g, or t
  misc_feature (626)..(626): n is a, c, g, or t
  misc_feature (632)..(632): n is a, c, g, or t
gagcagatacacacagtagacagaaattcaatgttaaacactaaaataatgtataaaagaggtaatgtagccgggcgcagtggctcacgcctgtaatcccagcactttgggaggccgaggcgggtggatcacgaggtcaggagatcgagaccatcctggctaacatggtgaaaccccgtctctactaaaaatacaaaaaattagccgggcgtggtggcggcgggcgcggtggcgcgtgcctgtagtcccagctactcgggaggctgaggctggaggatcgcttgagtccaggagttctgggctgtagtgcgctatgccgatcgggtgtccgcactaagttcggcatcaatatggtgacctcccgggagcgggggaccaccaggttgcctaaggaggggtgaaccggcccaggtcggaaacggagcaggtcaaaactcccgtgctgatcagtagtgggatcgcgcctgtgaatagccactgcactccagcctgagcaacatagcgagacccctgtctctactaaaaatacaaaaaattagccgggcgtggtggcacgtgcctgtagtcccagctactcnggaggctgaggcaggagaatcgcttgaacccgggaggcagaggttgcngtgagncgagattgcaccactgcactccagcctgggctacaagaaaaaaaaaaaaaaggtttttcccaggttgagagggcaaggttagtaccctagtaccctatgtccttggctggagaatcaaattgtcaagttagggccctcggatacaacccattttttttcctagactacctgggctctttatacccaactggt

SEQ ID NO: 310601 - DNA, 836 bp, Homo sapiens
  misc_feature (680)..(680): n is a, c, g, or t
  misc_feature (728)..(728): n is a, c, g, or t
  misc_feature (734)..(734): n is a, c, g, or t
cgaacatgtcggggcttagaaggtaaataaaataataatatttcttagaattttctgactatccttaaatcctgcaggtaaattattcccaacaaattttcaaaaggcaatcaataataagtaggttcttcttcaataacatgagcatatgcttcttaaagactgggtgacgccgggcgcagtggctcacgcctgtaatcccagcactttgggaggccgaggcgggtggatcacgaggtcaggagatcgagaccatcctggctaacatggtgaaaccccgtctctactaaaaatacaaaaaattagccgggcgtggtggcggcgggcgcggtggcgcgtgcctgtagtcccagctactcgggaggctgaggctggaggatcgcttgagtccaggagttctgggctgtagtgcgctatgccgatcgggtgtccgcactaagttcggcatcaatatggtgacctcccgggagcgggggaccaccaggttgcctaaggaggggtgaaccggcccaggtcggaaacggagcaggtcaaaactcccgtgctgatcagtagtgggatcgcgcctgtgaatagccactgcactccagcctgagcaacatagcgagacccctgtctctactaaaaatacaaaaaattagccgggcgtggtggcacgtgcctgtagtcccagctactcnggaggctgaggcaggagaatcgcttgaacccgggaggcagaggttgcngtgagncgagattgcaccactgcactccagcctgggtgacagagtaagacactagatagatagatagatagatagatagatagatagatagatagatagaaccgacag

SEQ ID NO: 310602 - DNA, 739 bp, Homo sapiens
  misc_feature (583)..(583): n is a, c, g, or t
  misc_feature (631)..(631): n is a, c, g, or t
  misc_feature (637)..(637): n is a, c, g, or t
tttacttaatattgggcataatcgtatcattcaagattaagtctgggttatttctttgataagaactgaatgtggccgggcgcagtggctcacgcctgtaatcccagcactttgggaggccgaggcgggtggatcacgaggtcaggagatcgagaccatcctggctaacatggtgaaaccccgtctctactaaaaatacaaaaaattagccgggcgtggtggcggcgggcgcggtggcgcgtgcctgtagtcccagctactcgggaggctgaggctggaggatcgcttgagtccaggagttctgggctgtagtgcgctatgccgatcgggtgtccgcactaagttcggcatcaatatggtgacctcccgggagcgggggaccaccaggttgcctaaggaggggtgaaccggcccaggtcggaaacggagcaggtcaaaactcccgtgctgatcagtagtgggatcgcgcctgtgaatagccactgcactccagcctgagcaacatagcgagacccctgtctctactaaaaatacaaaaaattagccgggcgtggtggcacgtgcctgtagtcccagctactcnggaggctgaggcaggagaatcgcttgaacccgggaggcagaggttgcngtgagncgagattgcaccactgcactccagcctgggtgacagagtaagacactagatagatagatagatagatagatagatagatagatagatagatagaaccgacag

SEQ ID NO: 310603 - DNA, 689 bp, Homo sapiens
  misc_feature (578)..(578): n is a, c, g, or t
gagcagatacacacagtagacagaaattcaatgttaaacactaaaataatgtataaaagaggtaatgtagccgggcgcagtggctcacgcctgtaatcccagcactttgggaggccgaggcgggtggatcacgaggtcaggagatcgagaccatcctggctaacatggtgaaaccccgtctctactaaaaatacaaaaaattagccgggcgtggtggcggcgggcgcggtggcgcgtgcctgtagtcccagctactcgggaggctgaggctggaggatcgcttgagtccaggagttctgggctgtagtgcgctatgccgatcgggtgtccgcactaagttcggcatcaatatggtgacctcccgggagcgggggaccaccaggttgcctaaggaggggtgaaccggcccaggtcggaaacggagcaggtcaaaactcccgtgctgatcagtagtgggatcgcgcctgtgaatagccactgcactccagcctgagcaacatagcgagacccctgtctctactaaaaatacaaaaaattagccgggcgtggtggcacgtgcctgtagtcccagctactcnggaggctgaggcaggagaatcgcttgaacccgggaggcagaggtggctagaccctcatcctcctgtagctttctgcatccatttcctagatgtcatggaggtgatctctac

SEQ ID NO: 310604 - DNA, 682 bp, Homo sapiens
gagcagatacacacagtagacagaaattcaatgttaaacactaaaataatgtataaaagaggtaatgtagccgggcgcagtggctcacgcctgtaatcccagcactttgggaggccgaggcgggtggatcacgaggtcaggagatcgagaccatcctggctaacatggtgaaaccccgtctctactaaaaatacaaaaaattagccgggcgtggtggcggcgggcgcggtggcgcgtgcctgtagtcccagctactcgggaggctgaggctggaggatcgcttgagtccaggagttctgggctgtagtgcgctatgccgatcgggtgtccgcactaagttcggcatcaatatggtgacctcccgggagcgggggaccaccaggttgcctaaggaggggtgaaccggcccaggtcggaaacggagcaggtcaaaactcccgtgctgatcagtagtgggatcgcgcctgtgaatagccactgcactccagcctgagcaacatagcgagacccctaggcaacctggtggtcccccgctcccgggaggtcaccatattgatgccgaacttagtgcggacacccgatcggcatagcgcactacagcccagaactcctgggctcaagcgatcctcccacctcagcctcccgagtagctgggactacaggcacgcgccaccacgcccgg

SEQ ID NO: 310605 - DNA, 697 bp, Homo sapiens
gagcagatacacacagtagacagaaattcaatgttaaacactaaaataatgtataaaagaggtaatgtagccgggcgcagtggctcacgcctgtaatcccagcactttgggaggccgaggcgggtggatcacgaggtcaggagatcgagaccatcctggctaacatggtgaaaccccgtctctactaaaaatacaaaaaattagccgggcgtggtggcggcgggcgcggtggcgcgtgcctgtagtcccagctactcgggaggctgaggctggaggatcgcttgagtccaggagttctgggctgtagtgcgctatgccgatcgggtgtccgcactaagttcggcatcaatatggtgacctcccgggagcgggggaccaccaggttgcctaaggaggggtgaaccggcccaggtcggaaacggagcaggtcaaaactcccgtgctgatcagtagtgggatcgcgcctgtgaatagccactgcactccagcctgagcaacatagcgagacccctctctactaaaaatacaaaaaattagccgggcgtggtggcgggcgcctgtagtcccagctactggggaggctgaggcaggagaatggcgtgaacccgggaggcggagttgcagtgagccgagattgcgccactcagtcgcagtccagcctgggcgacagagcgagactccgtctcaaaaaaaaaaa

SEQ ID NO: 310606 - DNA, 676 bp, Homo sapiens
gagcagatacacacagtagacagaaattcaatgttaaacactaaaataatgtataaaagaggtaatgtagccgggcgcagtggctcacgcctgtaatcccagcactttgggaggccgaggcgggtggatcacgaggtcaggagatcgagaccatcctggctaacatggtgaaaccccgtctctactaaaaatacaaaaaattagccgggcgtggtggcggcgggcgcggtggcgcgtgcctgtagtcccagctactcgggaggctgaggctggaggatcgcttgagtccaggagttctgggctgtagtgcgctatgccgatcgggtgtccgcactaagttcggcatcaatatggtgacctcccgggagcgggggaccaccaggttgcctaaggaggggtgaaccggcccaggtcggaaacggagcaggtcaaaactcccgtgctgatcagtagtgggatcgcgcctgtgaatagccactgcactccagcctgagcaacatagcgagacccctgtctctactaaaaatacaaaaattagccaggcatggtggcgcacctgtaatcccagctactcaggaggctgaggcaggagaatcacttgaacccaggaggcagaggttgcagtgagccgagatggcaccactgcactccagcttgggagtgcagattgagactc

SEQ ID NO: 310607 - DNA, 652 bp, Homo sapiens
gagcagatacacacagtagacagaaattcaatgttaaacactaaaataatgtataaaagaggtaatgtagccgggcgcagtggctcacgcctgtaatcccagcactttgggaggccgaggcgggtggatcacgaggtcaggagatcgagaccatcctggctaacatggtgaaaccccgtctctactaaaaatacaaaaaattagccgggcgtggtggcggcgggcgcggtggcgcgtgcctgtagtcccagctactcgggaggctgaggctggaggatcgcttgagtccaggagttctgggctgtagtgcgctatgccgatcgggtgtccgcactaagttcggcatcaatatggtgacctcccgggagcgggggaccaccaggttgcctaaggaggggtgaaccggcccaggtcggaaacggagcaggtcaaaactcccgtgctgatcagtagtgggatcgcgcctgtgaatagccactgcactccagcctgagcaacatagcgagacccctaggcaacctggtggtcccccgctcccgggaggtcaccatattgatgccgaacttagtgcggacacccgatcggcatagcgcactacagcccagaactcctggtcgacgcggccgcgaatttagtagtagtaggcggccgc

SEQ ID NO: 310608 - DNA, 658 bp, Homo sapiens
  misc_feature (518)..(518): n is a, c, g, or t
  misc_feature (647)..(647): n is a, c, g, or t
  misc_feature (656)..(656): n is a, c, g, or t
gagcagatacacacagtagacagaaattcaatgttaaacactaaaataatgtataaaagaggtaatgtagccgggcgcagtggctcacgcctgtaatcccagcactttgggaggccgaggcgggtggatcacgaggtcaggagatcgagaccatcctggctaacatggtgaaaccccgtctctactaaaaatacaaaaaattagccgggcgtggtggcggcgggcgcggtggcgcgtgcctgtagtcccagctactcgggaggctgaggctggaggatcgcttgagtccaggagttctgggctgtagtgcgctatgccgatcgggtgtccgcactaagttcggcatcaatatggtgacctcccgggagcgggggaccaccaggttgcctaaggaggggtgaaccggcccaggtcggaaacggagcaggtcaaaactcccgtgctgatcagtagtgggatcgcgcctgtgaatagccactgcactccagcctgagcaacatagcgagacccctaaaaanaaagaaaaaagacaaggagatggaatcaaagcccagaggtcctccccttcttcagagccaccactagttctcttgttgaccatgggaaaactacccccagccccactgcctttttgcctccggtcagtngggtttttncg

SEQ ID NO: 310609 - DNA, 553 bp, Homo sapiens
  misc_feature (397)..(397): n is a, c, g, or t
  misc_feature (445)..(445): n is a, c, g, or t
  misc_feature (451)..(451): n is a, c, g, or t
tagtgctgcctctggtggtactcctccgccgggcgcggtcgggcgcggtggcgcgtgcctgtagtcccagctactcgggaggctgaggctggaggatcgcttgagtccaggagttctgggctgtagtgcgctatgccgatcgggtgtccgcactaagttcggcatcaatatggtgacctcccgggagcgggggaccaccaggttgcctaaggaggggtgaaccggcccaggtcggaaacggagcaggtcaaaactcccgtgctgatcagtagtgggatcgcgcctgtgaatagccactgcactccagcctgagcaacatagcgagacccctgtctctactaaaaatacaaaaaattagccgggcgtggtggcacgtgcctgtagtcccagctactcnggaggctgaggcaggagaatcgcttgaacccgggaggcagaggttgcngtgagncgagattgcaccactgcactccagcctgggtgacagagtaagacactagatagatagatagatagatagatagatagatagatagatagatagaaccgacag

SEQ ID NO: 310610 - DNA, 672 bp, Homo sapiens
gagcagatacacacagtagacagaaattcaatgttaaacactaaaataatgtataaaagaggtaatgtagccgggcgcagtggctcacgcctgtaatcccagcactttgggaggccgaggcgggtggatcacgaggtcaggagatcgagaccatcctggctaacatggtgaaaccccgtctctactaaaaatacaaaaaattagccgggcgtggtggcggcgggcgcggtggcgcgtgcctgtagtcccagctactcgggaggctgaggctggaggatcgcttgagtccaggagttctgggctgtagtgcgctatgccgatcgggtgtccgcactaagttcggcatcaatatggtgacctcccgggagcgggggaccaccaggttgcctaaggaggggtgaaccggcccaggtcggaaacggagcaggtcaaaactcccgtgctgatcagtagtgggatcgcgcctgtgaatagccactgcactccagcctgagcaacatagcgagacccctaaaaaaaaaaaaaaaaaagaaagcacatttttttcctttatgtaataaattaccagtctcagatactcagttatagcaacagaaaacggagtaagacagcgttaatatgtaatgtgttaatttgtatgatttttacatgaattaaaaaatattcaaacaa

SEQ ID NO: 310611 - DNA, 685 bp, Homo sapiens
gagcagatacacacagtagacagaaattcaatgttaaacactaaaataatgtataaaagaggtaatgtagccgggcgcagtggctcacgcctgtaatcccagcactttgggaggccgaggcgggtggatcacgaggtcaggagatcgagaccatcctggctaacatggtgaaaccccgtctctactaaaaatacaaaaaattagccgggcgtggtggcggcgggcgcggtggcgcgtgcctgtagtcccagctactcgggaggctgaggctggaggatcgcttgagtccaggagttctgggctgtagtgcgctatgccgatcgggtgtccgcactaagttcggcatcaatatggtgacctcccgggagcgggggaccaccaggttgcctaaggaggggtgaaccggcccaggtcggaaacggagcaggtcaaaactcccgtgctgatcagtagtgggatcgcgcctgtgaatagccactgcactccagcctgagcaacatagcgagacccctaggcaacctggtggtcccccgctcccgggaggtcaccatattgatgccgaacttagtgcggacacccgatcggcatagcgcactacagcccagaactcctgggctcaagcgatcctcccacctcagcctcccgagtcgacgcggccgcgaatttagtagtagtaggcggccgc

SEQ ID NO: 310612 - DNA, 611 bp, Homo sapiens
gagcagatacacacagtagacagaaattcaatgttaaacactaaaataatgtataaaagaggtaatgtagccgggcgcagtggctcacgcctgtaatcccagcactttgggaggccgaggcgggtggatcacgaggtcaggagatcgagaccatcctggctaacatggtgaaaccccgtctctactaaaaatacaaaaaattagccgggcgtggtggcggcgggcgcggtggcgcgtgcctgtagtcccagctactcgggaggctgaggctggaggatcgcttgagtccaggagttctgggctgtagtgcgctatgccgatcgggtgtccgcactaagttcggcatcaatatggtgacctcccgggagcgggggaccaccaggttgcctaaggaggggtgaaccggcccaggtcggaaacggagcaggtcaaaactcccgtgctgatcagtagtgggatcgcgcctgtgaatagccactgcactccagcctgagcaacatagcgagacccctataagaaattagccaagcatggtcgcacgtgcctgaagtttccagttactcaggagctgaggtggaaggatcaattgagcccaggattttgaggctgca

SEQ ID NO: 310613 - DNA, 585 bp, Homo sapiens
gagcagatacacacagtagacagaaattcaatgttaaacactaaaataatgtataaaagaggtaatgtagccgggcgcagtggctcacgcctgtaatcccagcactttgggaggccgaggcgggtggatcacgaggtcaggagatcgagaccatcctggctaacatggtgaaaccccgtctctactaaaaatacaaaaaattagccgggcgtggtggcggcgggcgcggtggcgcgtgcctgtagtcccagctactcgggaggctgaggctggaggatcgcttgagtccaggagttctgggctgtagtgcgctatgccgatcgggtgtccgcactaagttcggcatcaatatggtgacctcccgggagcgggggaccaccaggttgcctaaggaggggtgaaccggcccaggtcggaaacggagcaggtcaaaactcccgtgctgatcagtagtgggatcgcgcctgtgaatagccactgcactccagcctgagcaacatagcgagacccctactaaactacaaaagtagctgggctgtagcccacgcctatatcccagcgacagcgagatgcggtaccgagctc

SEQ ID NO: 310614 - DNA, 650 bp, Homo sapiens
gagcagatacacacagtagacagaaattcaatgttaaacactaaaataatgtataaaagaggtaatgtagccgggcgcagtggctcacgcctgtaatcccagcactttgggaggccgaggcgggtggatcacgaggtcaggagatcgagaccatcctggctaacatggtgaaaccccgtctctactaaaaatacaaaaaattagccgggcgtggtggcggcgggcgcggtggcgcgtgcctgtagtcccagctactcgggaggctgaggctggaggatcgcttgagtccaggagttctgggctgtagtgcgctatgccgatcgggtgtccgcactaagttcggcatcaatatggtgacctcccgggagcgggggaccaccaggttgcctaaggaggggtgaaccggcccaggtcggaaacggagcaggtcaaaactcccgtgctgatcagtagtgggatcgcgcctgtgaatagccactgcactccagcctgagcaacatagcgagacccctgtctctactaaaaatacaaaaattagccaggcatggtggcgcacctgtaatcccagctactcaggaggcggaggttggagtgagccaagactgcgacattgcactccaggctgggcaacagagtgagacttcatctcg

SEQ ID NO: 310615 - DNA, 605 bp, Homo sapiens
gagcagatacacacagtagacagaaattcaatgttaaacactaaaataatgtataaaagaggtaatgtagccgggcgcagtggctcacgcctgtaatcccagcactttgggaggccgaggcgggtggatcacgaggtcaggagatcgagaccatcctggctaacatggtgaaaccccgtctctactaaaaatacaaaaaattagccgggcgtggtggcggcgggcgcggtggcgcgtgcctgtagtcccagctactcgggaggctgaggctggaggatcgcttgagtccaggagttctgggctgtagtgcgctatgccgatcgggtgtccgcactaagttcggcatcaatatggtgacctcccgggagcgggggaccaccaggttgcctaaggaggggtgaaccggcccaggtcggaaacggagcaggtcaaaactcccgtgctgatcagtagtgggatcgcgcctgtgaatagccactgcactccagcctgagcaacatagcgagacccctaaaaaaaaaaattccatgtgcatgaacatattctaagagagagtgagaaagcacagatttttatgcaaggtatctccaatgtttcctgaattg

SEQ ID NO: 310616 - DNA, 554 bp, Homo sapiens
gagcagatacacacagtagacagaaattcaatgttaaacactaaaataatgtataaaagaggtaatgtagccgggcgcagtggctcacgcctgtaatcccagcactttgggaggccgaggcgggtggatcacgaggtcaggagatcgagaccatcctggctaacatggtgaaaccccgtctctactaaaaatacaaaaaattagccgggcgtggtggcggcgggcgcggtggcgcgtgcctgtagtcccagctactcgggaggctgaggctggaggatcgcttgagtccaggagttctgggctgtagtgcgctatgccgatcgggtgtccgcactaagttcggcatcaatatggtgacctcccgggagcgggggaccaccaggttgcctaaggaggggtgaaccggcccaggtcggaaacggagcaggtcaaaactcccgtgctgatcagtagtgggatcgcgcctgtgaatagccactgcactccagcctgagcaacatagcgagacccctcttaaaagaaaaatataatacgttaattttggactctcaaga

SEQ ID NO: 310617 - DNA, 540 bp, Homo sapiens
  misc_feature (384)..(384): n is a, c, g, or t
  misc_feature (432)..(432): n is a, c, g, or t
  misc_feature (438)..(438): n is a, c, g, or t
gctcgattccccttttggggtctttgcgggcgcggtggcgcgtgcctgtagtcccagctactcgggaggctgaggctggaggatcgcttgagtccaggagttctgggctgtagtgcgctatgccgatcgggtgtccgcactaagttcggcatcaatatggtgacctcccgggagcgggggaccaccaggttgcctaaggaggggtgaaccggcccaggtcggaaacggagcaggtcaaaactcccgtgctgatcagtagtgggatcgcgcctgtgaatagccactgcactccagcctgagcaacatagcgagacccctgtctctactaaaaatacaaaaaattagccgggcgtggtggcacgtgcctgtagtcccagctactcnggaggctgaggcaggagaatcgcttgaacccgggaggcagaggttgcngtgagncgagattgcaccactgcactccagcctgggtgacagagtaagacactagatagatagatagatagatagatagatagatagatagatagatagaaccgacag

SEQ ID NO: 310618 - DNA, 542 bp, Homo sapiens
  misc_feature (386)..(386): n is a, c, g, or t
  misc_feature (434)..(434): n is a, c, g, or t
  misc_feature (440)..(440): n is a, c, g, or t
tcactcggtacggtgttatcgatgccaccgggcgcggtggcgcgtgcctgtagtcccagctactcgggaggctgaggctggaggatcgcttgagtccaggagttctgggctgtagtgcgctatgccgatcgggtgtccgcactaagttcggcatcaatatggtgacctcccgggagcgggggaccaccaggttgcctaaggaggggtgaaccggcccaggtcggaaacggagcaggtcaaaactcccgtgctgatcagtagtgggatcgcgcctgtgaatagccactgcactccagcctgagcaacatagcgagacccctgtctctactaaaaatacaaaaaattagccgggcgtggtggcacgtgcctgtagtcccagctactcnggaggctgaggcaggagaatcgcttgaacccgggaggcagaggttgcngtgagncgagattgcaccactgcactccagcctgggtgacagagtaagacactagatagatagatagatagatagatagatagatagatagatagatagaaccgacag

SEQ ID NO: 310619 - DNA, 653 bp, Homo sapiens
  misc_feature (132)..(132): n is a, c, g, or t
  misc_feature (497)..(497): n is a, c, g, or t
  misc_feature (545)..(545): n is a, c, g, or t
  misc_feature (551)..(551): n is a, c, g, or t
caggtgcagtggctcacacctgtaatcccagcactttgggaggccaaggtgggtggatcacttgaggccaggagttcaagaccagcctggccaacatggcaaaaccctgtctctactaaaaataaaatacanaaaattacgggcgcggtggcgcgtgcctgtagtcccagctactcgggaggctgaggctggaggatcgcttgagtccaggagttctgggctgtagtgcgctatgccgatcgggtgtccgcactaagttcggcatcaatatggtgacctcccgggagcgggggaccaccaggttgcctaaggaggggtgaaccggcccaggtcggaaacggagcaggtcaaaactcccgtgctgatcagtagtgggatcgcgcctgtgaatagccactgcactccagcctgagcaacatagcgagacccctgtctctactaaaaatacaaaaaattagccgggcgtggtggcacgtgcctgtagtcccagctactcnggaggctgaggcaggagaatcgcttgaacccgggaggcagaggttgcngtgagncgagattgcaccactgcactccagcctgggtgacagagtaagacactagatagatagatagatagatagatagatagatagatagatagatagaaccgacag

SEQ ID NO: 310620 - DNA, 679 bp, Homo sapiens
  misc_feature (158)..(158): n is a, c, g, or t
  misc_feature (523)..(523): n is a, c, g, or t
  misc_feature (571)..(571): n is a, c, g, or t
  misc_feature (577)..(577): n is a, c, g, or t
taatatctggtcgatatatttctaatatgtttcagtagtgtaactgtggaaaatgttcactttgggaggccaaggtgggtggatcacttgaggccaggagttcaagaccagcctggccaacatggcaaaaccctgtctctactaaaaataaaatacanaaaattacgggcgcggtggcgcgtgcctgtagtcccagctactcgggaggctgaggctggaggatcgcttgagtccaggagttctgggctgtagtgcgctatgccgatcgggtgtccgcactaagttcggcatcaatatggtgacctcccgggagcgggggaccaccaggttgcctaaggaggggtgaaccggcccaggtcggaaacggagcaggtcaaaactcccgtgctgatcagtagtgggatcgcgcctgtgaatagccactgcactccagcctgagcaacatagcgagacccctgtctctactaaaaatacaaaaaattagccgggcgtggtggcacgtgcctgtagtcccagctactcnggaggctgaggcaggagaatcgcttgaacccgggaggcagaggttgcngtgagncgagattgcaccactgcactccagcctgggtgacagagtaagacactagatagatagatagatagatagatagatagatagatagatagatagaaccgacag

SEQ ID NO: 310621 - DNA, 711 bp, Homo sapiens
  misc_feature (555)..(555): n is a, c, g, or t
  misc_feature (603)..(603): n is a, c, g, or t
  misc_feature (609)..(609): n is a, c, g, or t
tgcatccgtgcatgggtgactcttagatgtatcccctcctcgatcgcaacttcaaaaattcatctattatgccgggcgcggctgtgctcacgcctgtaattcccagcactttgaggaggtcgatggactgcgagaacactagcgcaggagatcgagaccacggtgaaaccccgtctctactaaaaatacaaaaaattcgggcgcggtggcgcgtgcctgtagtcccagctactcgggaggctgaggctggaggatcgcttgagtccaggagttctgggctgtagtgcgctatgccgatcgggtgtccgcactaagttcggcatcaatatggtgacctcccgggagcgggggaccaccaggttgcctaaggaggggtgaaccggcccaggtcggaaacggagcaggtcaaaactcccgtgctgatcagtagtgggatcgcgcctgtgaatagccactgcactccagcctgagcaacatagcgagacccctgtctctactaaaaatacaaaaaattagccgggcgtggtggcacgtgcctgtagtcccagctactcnggaggctgaggcaggagaatcgcttgaacccgggaggcagaggttgcngtgagncgagattgcaccactgcactccagcctgggtgacagagtaagacactagatagatagatagatagatagatagatagatagatagatagatagaaccgacag

SEQ ID NO: 310622 - DNA, 694 bp, Homo sapiens
  misc_feature (538)..(538): n is a, c, g, or t
  misc_feature (586)..(586): n is a, c, g, or t
  misc_feature (592)..(592): n is a, c, g, or t
tcaaaccacatgaaatattttggactcttatactaattccaacactttgaagatctggggagaacaaactagattggtgctttccttggcttagtatgttctgtttttatagggagagcaaattattgttcaccagcactattaaaatagctacaacaggatgggcatggtggctcacaccgggcgcggtggcgcgtgcctgtagtcccagctactcgggaggctgaggctggaggatcgcttgagtccaggagttctgggctgtagtgcgctatgccgatcgggtgtccgcactaagttcggcatcaatatggtgacctcccgggagcgggggaccaccaggttgcctaaggaggggtgaaccggcccaggtcggaaacggagcaggtcaaaactcccgtgctgatcagtagtgggatcgcgcctgtgaatagccactgcactccagcctgagcaacatagcgagacccctgtctctactaaaaatacaaaaaattagccgggcgtggtggcacgtgcctgtagtcccagctactcnggaggctgaggcaggagaatcgcttgaacccgggaggcagaggttgcngtgagncgagattgcaccactgcactccagcctgggtgacagagtaagacactagatagatagatagatagatagatagatagatagatagatagatagaaccgacag

SEQ ID NO: 310623 - DNA, 647 bp, Homo sapiens
  misc_feature (491)..(491): n is a, c, g, or t
  misc_feature (539)..(539): n is a, c, g, or t
  misc_feature (545)..(545): n is a, c, g, or t
acagtggctcacccctgtgatcccaacactttgggagactaggaagggaggattgcatgagcccaggagttccagaccagcctgagcaacatggtgagacttccatctctacgaaaaattttataaaaattagcgggcgcggtggcgcgtgcctgtagtcccagctactcgggaggctgaggctggaggatcgcttgagtccaggagttctgggctgtagtgcgctatgccgatcgggtgtccgcactaagttcggcatcaatatggtgacctcccgggagcgggggaccaccaggttgcctaaggaggggtgaaccggcccaggtcggaaacggagcaggtcaaaactcccgtgctgatcagtagtgggatcgcgcctgtgaatagccactgcactccagcctgagcaacatagcgagacccctgtctctactaaaaatacaaaaaattagccgggcgtggtggcacgtgcctgtagtcccagctactcnggaggctgaggcaggagaatcgcttgaacccgggaggcagaggttgcngtgagncgagattgcaccactgcactccagcctgggtgacagagtaagacactagatagatagatagatagatagatagatagatagatagatagatagaaccgacag

SEQ ID NO: 310624 - DNA, 679 bp, Homo sapiens
  misc_feature (523)..(523): n is a, c, g, or t
  misc_feature (571)..(571): n is a, c, g, or t
  misc_feature (577)..(577): n is a, c, g, or t
caggcacagtggctcacccctataatcccaacactttgggaggccgaggcaggcggatcacctgagatcgggagtttgagaccagcctggccaacgtggtgaaaccccatctctactaaaaatacaaaataagccgggcgtggtgacgcatgcctgtaatcccagcgggcgcggtggcgcgtgcctgtagtcccagctactcgggaggctgaggctggaggatcgcttgagtccaggagttctgggctgtagtgcgctatgccgatcgggtgtccgcactaagttcggcatcaatatggtgacctcccgggagcgggggaccaccaggttgcctaaggaggggtgaaccggcccaggtcggaaacggagcaggtcaaaactcccgtgctgatcagtagtgggatcgcgcctgtgaatagccactgcactccagcctgagcaacatagcgagacccctgtctctactaaaaatacaaaaaattagccgggcgtggtggcacgtgcctgtagtcccagctactcnggaggctgaggcaggagaatcgcttgaacccgggaggcagaggttgcngtgagncgagattgcaccactgcactccagcctgggtgacagagtaagacactagatagatagatagatagatagatagatagatagatagatagatagaaccgacag

SEQ ID NO: 310625 - DNA, 617 bp, Homo sapiens
  misc_feature (461)..(461): n is a, c, g, or t
  misc_feature (509)..(509): n is a, c, g, or t
  misc_feature (515)..(515): n is a, c, g, or t
gaagtgacttccaggggacttcaaaagccagcatcctgtttttcctcccttcatttttcttttgacccccttttgtaagccagatgttaaaaacttggaccttcgggcgcggtggcgcgtgcctgtagtcccagctactcgggaggctgaggctggaggatcgcttgagtccaggagttctgggctgtagtgcgctatgccgatcgggtgtccgcactaagttcggcatcaatatggtgacctcccgggagcgggggaccaccaggttgcctaaggaggggtgaaccggcccaggtcggaaacggagcaggtcaaaactcccgtgctgatcagtagtgggatcgcgcctgtgaatagccactgcactccagcctgagcaacatagcgagacccctgtctctactaaaaatacaaaaaattagccgggcgtggtggcacgtgcctgtagtcccagctactcnggaggctgaggcaggagaatcgcttgaacccgggaggcagaggttgcngtgagncgagattgcaccactgcactccagcctgggtgacagagtaagacactagatagatagatagatagatagatagatagatagatagatagatagaaccgacag

SEQ ID NO: 310626 - DNA, 556 bp, Homo sapiens
  misc_feature (400)..(400): n is a, c, g, or t
  misc_feature (448)..(448): n is a, c, g, or t
  misc_feature (454)..(454): n is a, c, g, or t
gcggccgcctactactactaaattcgcggccgcgtcgacagccgggcgcggtggcgcgtgcctgtagtcccagctactcgggaggctgaggctggaggatcgcttgagtccaggagttctgggctgtagtgcgctatgccgatcgggtgtccgcactaagttcggcatcaatatggtgacctcccgggagcgggggaccaccaggttgcctaaggaggggtgaaccggcccaggtcggaaacggagcaggtcaaaactcccgtgctgatcagtagtgggatcgcgcctgtgaatagccactgcactccagcctgagcaacatagcgagacccctgtctctactaaaaatacaaaaaattagccgggcgtggtggcacgtgcctgtagtcccagctactcnggaggctgaggcaggagaatcgcttgaacccgggaggcagaggttgcngtgagncgagattgcaccactgcactccagcctgggtgacagagtaagacactagatagatagatagatagatagatagatagatagatagatagatagaaccgacag

SEQ ID NO: 310627 - DNA, 581 bp, Homo sapiens
  misc_feature (425)..(425): n is a, c, g, or t
  misc_feature (473)..(473): n is a, c, g, or t
  misc_feature (479)..(479): n is a, c, g, or t
tgggcggatcatgaggtcaggagatggagaccatcctggctcacactaaaaatacaaaaaagttaaccgggcgcggtggcgcgtgcctgtagtcccagctactcgggaggctgaggctggaggatcgcttgagtccaggagttctgggctgtagtgcgctatgccgatcgggtgtccgcactaagttcggcatcaatatggtgacctcccgggagcgggggaccaccaggttgcctaaggaggggtgaaccggcccaggtcggaaacggagcaggtcaaaactcccgtgctgatcagtagtgggatcgcgcctgtgaatagccactgcactccagcctgagcaacatagcgagacccctgtctctactaaaaatacaaaaaattagccgggcgtggtggcacgtgcctgtagtcccagctactcnggaggctgaggcaggagaatcgcttgaacccgggaggcagaggttgcngtgagncgagattgcaccactgcactccagcctgggtgacagagtaagacactagatagatagatagatagatagatagatagatagatagatagatagaaccgacag

SEQ ID NO: 310628 - DNA, 547 bp, Homo sapiens
  misc_feature (391)..(391): n is a, c, g, or t
  misc_feature (439)..(439): n is a, c, g, or t
  misc_feature (445)..(445): n is a, c, g, or t
tcacccacaaaccccctcacccacaaaccccctcgggcgcggtggcgcgtgcctgtagtcccagctactcgggaggctgaggctggaggatcgcttgagtccaggagttctgggctgtagtgcgctatgccgatcgggtgtccgcactaagttcggcatcaatatggtgacctcccgggagcgggggaccaccaggttgcctaaggaggggtgaaccggcccaggtcggaaacggagcaggtcaaaactcccgtgctgatcagtagtgggatcgcgcctgtgaatagccactgcactccagcctgagcaacatagcgagacccctgtctctactaaaaatacaaaaaattagccgggcgtggtggcacgtgcctgtagtcccagctactcnggaggctgaggcaggagaatcgcttgaacccgggaggcagaggttgcngtgagncgagattgcaccactgcactccagcctgggtgacagagtaagacactagatagatagatagatagatagatagatagatagatagatagatagaaccgacag

SEQ ID NO: 310629 - DNA, 714 bp, Homo sapiens
  misc_feature (558)..(558): n is a, c, g, or t
  misc_feature (606)..(606): n is a, c, g, or t
  misc_feature (612)..(612): n is a, c, g, or t
taatcctctgcactttgattctggaggttgtttactcagttgatcatagacccaggctgcttctcccaattgagggatcccaggcaaagcctgtggtcaggctccaaaacagcttttcaggccccatcttttacagctgatgctgtcgcatacccttcaaaagactttcaggacttggtccttcaacaatagtattctgtcgggcgcggtggcgcgtgcctgtagtcccagctactcgggaggctgaggctggaggatcgcttgagtccaggagttctgggctgtagtgcgctatgccgatcgggtgtccgcactaagttcggcatcaatatggtgacctcccgggagcgggggaccaccaggttgcctaaggaggggtgaaccggcccaggtcggaaacggagcaggtcaaaactcccgtgctgatcagtagtgggatcgcgcctgtgaatagccactgcactccagcctgagcaacatagcgagacccctgtctctactaaaaatacaaaaaattagccgggcgtggtggcacgtgcctgtagtcccagctactcnggaggctgaggcaggagaatcgcttgaacccgggaggcagaggttgcngtgagncgagattgcaccactgcactccagcctgggtgacagagtaagacactagatagatagatagatagatagatagatagatagatagatagatagaaccgacag

SEQ ID NO: 310630 - DNA, 537 bp, Homo sapiens
  misc_feature (381)..(381): n is a, c, g, or t
  misc_feature (429)..(429): n is a, c, g, or t
  misc_feature (435)..(435): n is a, c, g, or t
ggtccacttatcacggttggctgcgggcgcggtggcgcgtgcctgtagtcccagctactcgggaggctgaggctggaggatcgcttgagtccaggagttctgggctgtagtgcgctatgccgatcgggtgtccgcactaagttcggcatcaatatggtgacctcccgggagcgggggaccaccaggttgcctaaggaggggtgaaccggcccaggtcggaaacggagcaggtcaaaactcccgtgctgatcagtagtgggatcgcgcctgtgaatagccactgcactccagcctgagcaacatagcgagacccctgtctctactaaaaatacaaaaaattagccgggcgtggtggcacgtgcctgtagtcccagctactcnggaggctgaggcaggagaatcgcttgaacccgggaggcagaggttgcngtgagncgagattgcaccactgcactccagcctgggtgacagagtaagacactagatagatagatagatagatagatagatagatagatagatagatagaaccgacag

SEQ ID NO: 310631 - DNA, 575 bp, Homo sapiens
  misc_feature (419)..(419): n is a, c, g, or t
  misc_feature (467)..(467): n is a, c, g, or t
  misc_feature (473)..(473): n is a, c, g, or t
atgcactgtgatgcctcttgctccttgagtacatttttgtatattgtgatgagggtccagtcgggcgcggtggcgcgtgcctgtagtcccagctactcgggaggctgaggctggaggatcgcttgagtccaggagttctgggctgtagtgcgctatgccgatcgggtgtccgcactaagttcggcatcaatatggtgacctcccgggagcgggggaccaccaggttgcctaaggaggggtgaaccggcccaggtcggaaacggagcaggtcaaaactcccgtgctgatcagtagtgggatcgcgcctgtgaatagccactgcactccagcctgagcaacatagcgagacccctgtctctactaaaaatacaaaaaattagccgggcgtggtggcacgtgcctgtagtcccagctactcnggaggctgaggcaggagaatcgcttgaacccgggaggcagaggttgcngtgagncgagattgcaccactgcactccagcctgggtgacagagtaagacactagatagatagatagatagatagatagatagatagatagatagatagaaccgacag

SEQ ID NO: 310632 - DNA, 729 bp, Homo sapiens
  misc_feature (641)..(641): n is a, c, g, or t
  misc_feature (645)..(645): n is a, c, g, or t
  misc_feature (648)..(648): n is a, c, g, or t
  misc_feature (651)..(651): n is a, c, g, or t
tttacttaatattgggcataatcgtatcattcaagattaagtctgggttatttctttgataagaactgaatgtggccgggcgcagtggctcacgcctgtaatcccagcactttgggaggccgaggcgggtggatcacgaggtcaggagatcgagaccatcctggctaacatggtgaaaccccgtctctactaaaaatacaaaaaattagccgggcgtggtggcggcgggcgcggtggcgcgtgcctgtagtcccagctactcgggaggctgaggctggaggatcgcttgagtccaggagttctgggctgtagtgcgctatgccgatcgggtgtccgcactaagttcggcatcaatatggtgacctcccgggagcgggggaccaccaggttgcctaaggaggggtgaaccggcccaggtcggaaacggagcaggtcaaaactcccgtgctgatcagtagtgggatcgcgcctgtgaataagccaaccgtggactagtagccaaccgtggactagtagccaaccgtggactagtagccaaccgtggactagtagccaaccgtggactagtagccaaccgtggactagtagccaaccgtggactagtagccaaccgtggactagtagccaaccgtggactagtngccnacngtngactaagtagccaaccgtggactagtagccaaccgtggactagtagccaaccgtggactaggacaaccgtggactagt

SEQ ID NO: 310633 - DNA, 782 bp, Homo sapiens
  misc_feature (491)..(491): n is a, c, g, or t
  misc_feature (693)..(693): n is a, c, g, or t
  misc_feature (747)..(747): n is a, c, g, or t
  misc_feature (759)..(760): n is a, c, g, or t
tttacttaatattgggcataatcgtatcattcaagattaagtctgggttatttctttgataagaactgaatgtggccgggcgcagtggctcacgcctgtaatcccagcactttgggaggccgaggcgggtggatcacgaggtcaggagatcgagaccatcctggctaacatggtgaaaccccgtctctactaaaaatacaaaaaattagccgggcgtggtggcggcgggcgcggtggcgcgtgcctgtagtcccagctactcgggaggctgaggctggaggatcgcttgagtccaggagttctgggctgtagtgcgctatgccgatcgggtgtccgcactaagttcggcatcaatatggtgacctcccgggagcgggggaccaccaggttgcctaaggaggggtgaaccggcccaggtcggaaacggagcaggtcaaaactcccgtgctgatcagtagtgggatcgcgcctgtgaataagcattcctcgcnacagctgttgcgaggaatgctgagtgttcctgcatgtaagaattaagaccaagggaggggagagagaaacccacacataaacaatgcactaaagatcactgaactgtttaaacatttccacttgccagtttaatttcttgaagactgttgcttgtttggaatgtttcttgtcactgattttaaggttgcatctggaaaagantaaaggcttcagtcccctcccaccaccagaaatgaacaaaagcattttacctanaaatacacagcnnatgtactcagcattcctcgcaa

SEQ ID NO: 310634 - DNA, 565 bp, Homo sapiens
tttacttaatattgggcataatcgtatcattcaagattaagtctgggttatttctttgataagaactgaatgtggccgggcgcagtggctcacgcctgtaatcccagcactttgggaggccgaggcgggtggatcacgaggtcaggagatcgagaccatcctggctaacatggtgaaaccccgtctctactaaaaatacaaaaaattagccgggcgtggtggcggcgggcgcggtggcgcgtgcctgtagtcccagctactcgggaggctgaggctggaggatcgcttgagtccaggagttctgggctgtagtgcgctatgccgatcgggtgtccgcactaagttcggcatcaatatggtgacctcccgggagcgggggaccaccaggttgcctaaggaggggtgaaccggcccaggtcggaaacggagcaggtcaaaactcccgtgctgatcagtagtgggatcgcgcctgtgaatatgccaagccaggcgaaaccccatcgctacaatgaaggttcacaatgtccaacagctcaagaaatacttagagacctgagcagctcgg

SEQ ID NO: 310635 - DNA, 1114 bp, Homo sapiens
tttacttaatattgggcataatcgtatcattcaagattaagtctgggttatttctttgataagaactgaatgtggccgggcgcagtggctcacgcctgtaatcccagcactttgggaggccgaggcgggtggatcacgaggtcaggagatcgagaccatcctggctaacatggtgaaaccccgtctctactaaaaatacaaaaaattagccgggcgtggtggcggcgggcgcggtggcgcgtgcctgtagtcccagctactcgggaggctgaggctggaggatcgcttgagtccaggagttctgggctgtagtgcgctatgccgatcgggtgtccgcactaagttcggcatcaatatggtgacctcccgggagcgggggaccaccaggttgcctaaggaggggtgaaccggcccaggtcggaaacggagcaggtcaaaactcccgtgctgatcagtagtgggatcgcgcctgtgaatagctggagtgcagtggcactatctcggctcactgcaacctccgtctcccaggttcaagcgattctcctgcctcagcttcccgggtagctgggactacaggtgcgcgccaacactctgtctaatttttgtatttttagtagagacggggtttcaccatgctggccaggctggtctccaactcccgacctcaggcgattctcccgcctcggcctcataaacctgtttcgcagaactcatttattcagcaaatatttattgagtgcctaccagatgccagtcaccgcacaaggcactgggtatatggtatccccaaacaagagacataatcccggtccttaggtagtgctagtgtggtctgtaatatcttactaaggccttggtatacgacccagagataacacgatgcgtatttcagttttgcaaagaaggggtccggtctctgtgccagctctataatcgtttcgctacgattccactgaaactcttcgatcaagctactttatgtaaatcacttcactcgtcttaccaggaataaacttggatcatatcgtccagctcatctggcataactgtggatcttctcacgacaattactggacacattaagggtgtctgtcagatattcatattgacccaa

SEQ ID NO: 310636 - DNA, 634 bp, Homo sapiens
  misc_feature (546)..(546): n is a, c, g, or t
  misc_feature (550)..(550): n is a, c, g, or t
  misc_feature (553)..(553): n is a, c, g, or t
  misc_feature (556)..(556): n is a, c, g, or t
tttacttaatattgggcataatcgtatcattcaagattaagtctgggttatttctttgataagaactgaatgtggccgggcgcagtggctcacgcctgtaatcccagcactttgggaggccgaggcgggtggatcacgaggtcaggagatcgagaccatcctggctaacatggtgaaaccccgtctctactaaaaatacaaaaaattagccgggcgtggtggcggcgggcgcggtggcgcgtgcctgtagtcccagctactcgggaggctgaggctggaggatcgcttgagtccaggagttctgggctgtagtgcgctatgccgatcgggtgtccgcactaagttcggcatcaatatggtgacctcccgggagcgggggaccaccaggttgcctaaggaggggtgaaccggcccaggtcggaaacggagcaggtcaaaactcccgtgctgatcagtagtgggatcgcgcctgtgaataaccgtggactagtagccaaccgtggactagtagccaaccgtggactagtagccaaccgtggactagtngccnacngtngactaagtagccaaccgtggactagtagccaaccgtggactagtagccaaccgtggactaggacaaccgtggactagt

SEQ ID NO: 310637 - DNA, 756 bp, Homo sapiens
tttacttaatattgggcataatcgtatcattcaagattaagtctgggttatttctttgataagaactgaatgtggccgggcgcagtggctcacgcctgtaatcccagcactttgggaggccgaggcgggtggatcacgaggtcaggagatcgagaccatcctggctaacatggtgaaaccccgtctctactaaaaatacaaaaaattagccgggcgtggtggcggcgggcgcggtggcgcgtgcctgtagtcccagctactcgggaggctgaggctggaggatcgcttgagtccaggagttctgggctgtagtgcgctatgccgatcgggtgtccgcactaagttcggcatcaatatggtgacctcccgggagcgggggaccaccaggttgcctaaggaggggtgaaccggcccaggtcggaaacggagcaggtcaaaactcccgtgctgatcagtagtgggatcgcgcctgtgaatactggagtgcagtggcacaatctcggctcactgcaacctccgcctcccgggttcaagcgattctccttgctcagcctccaaagtagctgggattacaggcatgcactaccacgcccagctaatttttgtatttttagtagaaacagggcttcaccatgttggccaggctggtctcaaactcctgacctcaagtgatccacctgcctcggcctcccaaagtgctgggattacaggcgtgagccactgcgccccacctaaactcaaatcttaagtggaata

SEQ ID NO: 310638 - DNA, 584 bp, Homo sapiens
tttacttaatattgggcataatcgtatcattcaagattaagtctgggttatttctttgataagaactgaatgtggccgggcgcagtggctcacgcctgtaatcccagcactttgggaggccgaggcgggtggatcacgaggtcaggagatcgagaccatcctggctaacatggtgaaaccccgtctctactaaaaatacaaaaaattagccgggcgtggtggcggcgggcgcggtggcgcgtgcctgtagtcccagctactcgggaggctgaggctggaggatcgcttgagtccaggagttctgggctgtagtgcgctatgccgatcgggtgtccgcactaagttcggcatcaatatggtgacctcccgggagcgggggaccaccaggttgcctaaggaggggtgaaccggcccaggtcggaaacggagcaggtcaaaactcccgtgctgatcagtagtgggatcgcgcctgtgaatacaggctggagtgcagtggcacgatttcagctcactgcaacctccgtctcccaggttcaagcgattctcctgcctcagcctcctgagtagctgggattacaggcata

SEQ ID NO: 310639 - DNA, 577 bp, Homo sapiens
tttacttaatattgggcataatcgtatcattcaagattaagtctgggttatttctttgataagaactgaatgtggccgggcgcagtggctcacgcctgtaatcccagcactttgggaggccgaggcgggtggatcacgaggtcaggagatcgagaccatcctggctaacatggtgaaaccccgtctctactaaaaatacaaaaaattagccgggcgtggtggcggcgggcgcggtggcgcgtgcctgtagtcccagctactcgggaggctgaggctggaggatcgcttgagtccaggagttctgggctgtagtgcgctatgccgatcgggtgtccgcactaagttcggcatcaatatggtgacctcccgggagcgggggaccaccaggttgcctaaggaggggtgaaccggcccaggtcggaaacggagcaggtcaaaactcccgtgctgatcagtagtgggatcgcgcctgtgaataagccaccagcgctgagccatacagccgtgtgtatgcttcatcttcctgcagtatggactcattggcaagtagtcttgatgaaggagatacaacttcccc

SEQ ID NO: 310640 - DNA, 538 bp, Homo sapiens
tttacttaatattgggcataatcgtatcattcaagattaagtctgggttatttctttgataagaactgaatgtggccgggcgcagtggctcacgcctgtaatcccagcactttgggaggccgaggcgggtggatcacgaggtcaggagatcgagaccatcctggctaacatggtgaaaccccgtctctactaaaaatacaaaaaattagccgggcgtggtggcggcgggcgcggtggcgcgtgcctgtagtcccagctactcgggaggctgaggctggaggatcgcttgagtccaggagttctgggctgtagtgcgctatgccgatcgggtgtccgcactaagttcggcatcaatatggtgacctcccgggagcgggggaccaccaggttgcctaaggaggggtgaaccggcccaggtcggaaacggagcaggtcaaaactcccgtgctgatcagtagtgggatcgcgcctgtgaatacacaacccatgccccaacccacgcggcccaaaaccaatgcccaaacccaggcgcccaaaa

SEQ ID NO: 310641 - DNA, 527 bp, Homo sapiens
  misc_feature (439)..(439): n is a, c, g, or t
  misc_feature (443)..(443): n is a, c, g, or t
  misc_feature (446)..(446): n is a, c, g, or t
  misc_feature (449)..(449): n is a, c, g, or t
ggtccacttatcacggttggctgcgggcgcggtggcgcgtgcctgtagtcccagctactcgggaggctgaggctggaggatcgcttgagtccaggagttctgggctgtagtgcgctatgccgatcgggtgtccgcactaagttcggcatcaatatggtgacctcccgggagcgggggaccaccaggttgcctaaggaggggtgaaccggcccaggtcggaaacggagcaggtcaaaactcccgtgctgatcagtagtgggatcgcgcctgtgaataagccaaccgtggactagtagccaaccgtggactagtagccaaccgtggactagtagccaaccgtggactagtagccaaccgtggactagtagccaaccgtggactagtagccaaccgtggactagtagccaaccgtggactagtagccaaccgtggactagtngccnacngtngactaagtagccaaccgtggactagtagccaaccgtggactagtagccaaccgtggactaggacaaccgtggactagt

SEQ ID NO: 310642 - DNA, 684 bp, Homo sapiens
  misc_feature (528)..(528): n is a, c, g, or t
  misc_feature (576)..(576): n is a, c, g, or t
  misc_feature (582)..(582): n is a, c, g, or t
gcagtggcaccatctcagctcactgcaacctctgcctcccaggttcaagcgattctcgtgcctcagcctcccaagtagctgggattacaggtgactgccaccatgcccggctaatttttgtatttttagtagatacgaggttcacggtgttggccaggctgctctcgaactcctaacctcaggtgatccacctgccttggcctcccaatgtgctcagattacaggtgtgagccacggcacccagccaaaccctgtagtgcgctatgccgatcgggtgtccgcactaagttcggcatcaatatggtgacctcccgggagcgggggaccaccaggttgcctaaggaggggtgaaccggcccaggtcggaaacggagcaggtcaaaactcccgtgctgatcagtagtgggatcgcgcctgtgaatagccactgcactccagcctgagcaacatagcgagacccctgtctctactaaaaatacaaaaaattagccgggcgtggtggcacgtgcctgtagtcccagctactcnggaggctgaggcaggagaatcgcttgaacccgggaggcagaggttgcngtgagncgagattgcaccactgcactccagcctgggtgacagagtaagacactagatagatagatagatagatagatagatagatagatagatagatagaaccgacag

SEQ ID NO: 310643 - DNA, 655 bp, Homo sapiens
  misc_feature (499)..(499): n is a, c, g, or t
  misc_feature (547)..(547): n is a, c, g, or t
  misc_feature (553)..(553): n is a, c, g, or t
gcgccagcatgcgcggataattatgtatttatagtagagacagtgtttctccatgttggtcaggctgatctcaaactcccaatctcaggtgatctacctgcctcggcctcccaaagtgctcggattacaggtgcgaaccaccacgcccagcccgaaacacatttattgttcgtgcattgtattgtgttcgagacagggtctcgctcttttgcccatgctggaatgtagtgcgctatgccgatcgggtgtccgcactaagttcggcatcaatatggtgacctcccgggagcgggggaccaccaggttgcctaaggaggggtgaaccggcccaggtcggaaacggagcaggtcaaaactcccgtgctgatcagtagtgggatcgcgcctgtgaatagccactgcactccagcctgagcaacatagcgagacccctgtctctactaaaaatacaaaaaattagccgggcgtggtggcacgtgcctgtagtcccagctactcnggaggctgaggcaggagaatcgcttgaacccgggaggcagaggttgcngtgagncgagattgcaccactgcactccagcctgggtgacagagtaagacactagatagatagatagatagatagatagatagatagatagatagatagaaccgacag

SEQ ID NO: 310644 - DNA, 511 bp, Homo sapiens
  misc_feature (355)..(355): n is a, c, g, or t
  misc_feature (403)..(403): n is a, c, g, or t
  misc_feature (409)..(409): n is a, c, g, or t
attaggaagtgcagcgcggtgagcacatagcctgcgcacaggcgcgatcccactactgatcagcacgggagttttgggctgtagtgcgctatgccgatcgggtgtccgcactaagttcggcatcaatatggtgacctcccgggagcgggggaccaccaggttgcctaaggaggggtgaaccggcccaggtcggaaacggagcaggtcaaaactcccgtgctgatcagtagtgggatcgcgcctgtgaatagccactgcactccagcctgagcaacatagcgagacccctgtctctactaaaaatacaaaaaattagccgggcgtggtggcacgtgcctgtagtcccagctactcnggaggctgaggcaggagaatcgcttgaacccgggaggcagaggttgcngtgagncgagattgcaccactgcactccagcctgggtgacagagtaagacactagatagatagatagatagatagatagatagatagatagatagatagaaccgacag

SEQ ID NO: 310645 - DNA, 422 bp, Homo sapiens
actctagagcatcccctggatcgagagctgctggtcaggtcggtaaggaggcagagatgtcgggccgggcgactcacgcatgctatcaatatggtgacctcccgggagcgggggaccaccaggttgcctaaggaggggtgaaccggcccaggtcggaaacggagcaggtcaaaactcccgtgctgatcagtagtgggatcgcgcctgtgaatagccactgcactccagcctgagcaacatagcgagacccctaggcaacctggtggtcccccgctcccgggaggtcaccatattgatgccgaacttagtgcggacacccgatcggcatagcgcactacagcccagaactcctgggctcaagcgatcctcccacctcagcctcccgagtagctgggactacaggcacgcgccaccacgcccgg

SEQ ID NO: 310646 - DNA, 501 bp, Homo sapiens
gagcagatacacacagtagacagaaattcaatgttaaacactaaaataatgtataaaagaggtaatgtagccgggcgcagtggctcacgcctgtaatcccagcactttgggaggccgaggcgggtggatcacgaggtcaggagatcgagaccatcctggctaacatggtgaaaccccgtctctactaaaaatacaaaaaattagccgggcgtggtggcggcgggcgcggtggcgcgtgcctgtagtcccagctactcgggaggctgaggctggaggatcgcttgagtccaggagttctgggctgtagtgcgctatgccgatcgggtgtccgcactaagttcggcatcaatatggtgacctcccgggagcgggggaccaccaggttgcctactcgctatgttgcccaggctggagtgcagtggctattcacaggcgcgatcccactactgatcagcacgggagtttagacctgctccgtttccgacctgggccgggtcgagc

SEQ ID NO: 310647 - DNA, 955 bp, Homo sapiens
  misc_feature (462)..(462): n is a, c, g, or t
  misc_feature (582)..(582): n is a, c, g, or t
  misc_feature (633)..(634): n is a, c, g, or t
  misc_feature (664)..(664): n is a, c, g, or t
  misc_feature (670)..(670): n is a, c, g, or t
  misc_feature (692)..(692): n is a, c, g, or t
  misc_feature (734)..(734): n is a, c, g, or t
  misc_feature (771)..(771): n is a, c, g, or t
  misc_feature (932)..(932): n is a, c, g, or t
  misc_feature (936)..(936): n is a, c, g, or t
  misc_feature (942)..(942): n is a, c, g, or t
  misc_feature (946)..(946): n is a, c, g, or t
gagcagatacacacagtagacagaaattcaatgttaaacactaaaataatgtataaaagaggtaatgtagccgggcgcagtggctcacgcctgtaatcccagcactttgggaggccgaggcgggtggatcacgaggtcaggagatcgagaccatcctggctaacatggtgaaaccccgtctctactaaaaatacaaaaaattagccgggcgtggtggcggcgggcgcggtggcgcgtgcctgtagtcccagctactcgggaggctgaggctggaggatcgcttgagtccaggagttctgggctgtagtgcgctatgccgatcgggtgtccgcactaagttcggcatcaatatggtgacctcccgggagcgggggaccaccaggttgcctaactatcacgaaaaaaactctacctctctatactaatctccctacaaatctccttaattataacattcacagncacagaactaatcatattttatatcttcttcgaaacacacttatccccaccttggctatcatcacccgatgaggcaaccagccagaacgcctgaacgcaggcacatacttcctattctanaccctagtaggctcccttcccctactcatcgcactaatttacactcacaanncctaggctcactaaacattctactactcancctcantgcccaagaactatcaaactcntgagccaacaacttaatatgactagcttacacaatagctttnatagtaaaaatacctctttacggactccacttatganccctaaagccatgtcgaagcccccatcgctgggtcaaatagtactttgccgcagtactcttgaaactaggcggctatggtataatacgcctcaactcattctcaacccctgacaaacacatagctacccttcttgtactatcctatgaggcataattatancagntccatntggntagaaaaca

SEQ ID NO: 310648 - DNA, 520 bp, Homo sapiens
actgtgcgcaagcggggggcgggcgcaggccgcggtctcgctccgctcccctttgttctctcccattgtgtggcacttcctcctcaggcgcttcttctctgcaccctggcagcccgtggggagttcgggaaggggccctggatgccttttctgcttgtttttgagtacgtgaggacctccccggcaccgcctcgcgcgggtccctgccccgtgcccaggcggaggcggggtggccactgtccttccttcccgctccgcgccctcggcggcttccccgcggccccctgcgccgcgccccctccaggaggcgtcctgaccccgcactccggcctttcacctcccgaccgtcagcctcagggccgccgcggcgacgcgcgaccccttccctctgaggggcgcgggctccggacgcgccgggctctgccaggcatctagtggagggtcggaggtcggcgaccagcccgagcccagccgtcccgggagctggcgcgagtgtcgccacgaccctccctgtcccttg

SEQ ID NO: 310649 - DNA, 4680 bp, Homo sapiens
gggggaagagaagcgatcgcgagagaaaaaaatgcaacctcccaaaataaagagcaaagattgcattaggagcgaacagcgctgcagaaatagatggcagcttcgtgtcagtgagtttgcatcccccttcctgatccacgagctggagtgattagagccctggaagggaattgttactcccgtggagaagtccccttttcctggcagtcgtctgcactgtacacgctggatgcctctctccatccaccccactcactcgctcctctctcacctcctctctccctctcctgcattgatttttttttttcctttttagttgactgaaacaaaacaaaacaaaagggccactggatgtctgccttcttggggggtgagccagacagactgacaaacaaacagccccaactgtgttcgggggagggtttcgcctcccgttttgcccggcagcagcagcatggacgtgttggctagttatagtatattccaggagctacaacttgtccacgacaccggctacttctcagctttaccatccctggaggagacctggcagcagacatgccttgaattggaacgctacctacagacggagccccggaggatctcagagacctttggtgaggacttggactgtttcctccacgcttcccctcccccgtgcattgaggaaagcttccgtcgcttagaccccctgctgctccccgtggaagcggccatctgtgagaagagctcggcagtggacatcttgctctctcgggacaagttgctatctgagacctgcctcagcctccagccggccagctcttctctagacagctacacagccgtcaaccaggcccagctcaacgcagtgacctcattaacgcccccatcgtcccctgagctcagccgccatctggtcaaaacctcacaaactctctctgccgtggatggcacggtgacgttgaaactggtggccaagaaggctgctctcagctccgtaaaggtgggaggggtcgcaacagctgcagcagccgtgacggctgcgggggccgttaagagtggacagagcgacagtgaccaaggagggctaggggctgaagcatgtcccgaaaacaagaagagggttcaccgctgtcagtttaacgggtgccggaaagtttatacaaaaagctcccacttaaaggcccaccagaggactcacacaggtgagaagccttataagtgctcatgggagggatgtgagtggcgttttgcacgaagcgatgagctcacgaggcactacaggaaacacacaggtgcaaagcccttcaaatgcaaccactgcgacaggtgtttttccaggtctgaccatcttgccctccacatgaagagacatatctaaaaaaccgaaaggccagagttgccatggcatcggctagtgtctaaaggaaacgccatgaggcagggggctggacttcaggcggggacccattgcctcgcagaagaaagttctcacttataaacctctgtacacacacacacacacacacacatatacacacactcacagacccacacacatacacactgtcatgcactcaactatatttaaaatatatacgtctattctttatgccttgccctagccagatggaagaagatgaagaaggaaaccaggtgaactcagcaaggcagactggctgcttacttcagcactattggaattatttcccgctgttgccaatggaaatcaaagaaaatggatgtgacgtctgtgcaggtggacggcagtccgaggggcttatttcacttgcttctcagtgcaacttgataggagaatccagcatcttaaagttgcatatgtgtagcactaatgtttctttttaaatagttgggggaaaatgacctagaaaaccaaattgcagtttggtagccaaaattaactcttggtttatttgtcctttgtgtgtgaaaagtcctactattccgtgcgtcagacttcctcacagaactgttgactggttttggttcttagtactattgagatctttcgcgtcgatcccaacggccttagcggcggcagactggaataacaccttacacctttctggcctgcatttctgtagacttcactctcaagggaggagttttcttttcttacgttttgacttttgcacaccatatgcactagggattctggaaacttctagcatgactgcaaagtggccaagagaataaagtccttgatgataaatcacagtatatcccttgagcctcaccttattgccagtgctagattttttctttttaatctctccgtttttgctaacgaaaacttgaaaagcttatttggaagcttaaatgttttatcttttctccatggactaaacctctccaggactctctcggcacctggatgtccagctctcgaagcagccagtcagatgggacatcacagttctctcatcctccttgaggcatgatgacctcagctcatagtgatcaaccgttgtgctgtgtgtcattgctaccccataaccagttacagcatagatgtcgctagtctcagagggcagctgcgtatttaatttaactctggtttatgacctgacaaaaagccaaaaatatcactctttccaggagtggggaaaactgaggatgcctcccaagtctagtggcttcacaaaagatcatcctgtcttctctgtcatgcccactgagctcctattcccctacgtgttacaatacacaatttaaaacgccattgtgggagtgaagggttgacatttaaggaaaaggttgaggtgtttctctcatgggctgtctaaaaggagagacacgtttctttctttcctttttttttggctaggcccaccatgacttgtgacctagaacccccaggattaacagaggcctcacatttactctgcaagctgactccaaaggagtctacagtccttacttgtcatgccacactcacacatccagtagtggtctctatctacccgcattcctagctagctggcactggcctcaactccaaagactgcctttaggaccatcaaatggcctatgcaagcaagcggggtggttattaggacagattgtatattttgtatattctgggaccatcccttcaagacacgtctataaaacaaaaatggcgcttggtccacacacggttgctgctccctcctaccagctggctcccctcctgtcctcctttgactgtttgactcattgactgttaaaatgccaccccatacatatttgggatgcaaaactgaagtcaaaaggaaataatataagaaacacaaacacatatatgacagcaaccttcaagatctgggttttcagctttctgcaacctttgttttcactgaaatgttgaaactactcgtctgagggcaaaggaacctcctcacaaatgctatagctgccaattggacacttggggcatttcgaggtctggccctaagaatttactttctccttttccttttttctatttagaccaaaaaaaacaaaaacaaaaacaaaaaaaaaaaaacaaaattattacaaaatcgaaaaaaaaagaaagaacacccgttaacacacacgcgcacacacacacaaaatctgtccatttgccggaggcaattgtatgtatgttagttggagggtattaaaaatcagttttattccaaagatttaaaactagacatgacttaaaaacaatttctggagcactgcttgctgacaatctcgtagttctctgctgcatttgagtgcattttgtggccagtccatcagggcgtaccatgggattatatttgaatgtgtggtgcatccttcctggatgaaggatgtgtgagggaccttgaacctcagctgtattaaactgtagcgcctccagtcagtgcactagatgaaacttttagacaccctgaattctgttggttcctttcttttcctttatgtagcagcctccagcatgaatgcacgcacacgccagtgatggcattaagccatggccaccacgatttgcaaatgttctctcccaagctggagctgctcttgcctctcgaatgctattattaagggtttataatacttaatttaattttcgaactgaccaatgcaaggctctattaaaaagaaagtttaaaaaatgcaaaagagtaatcattgcttgtttgctccctatgtttcatctgtggtctcatttgaatgtggcagaacaaaggccctttggtcctcatcagtgtctgaaatgttcagtaatttctctctcttttgtatcagtgaggtcctttgtaatctgctcctgacctttcttggagcagggtgcattgaaactcaatggtggtgcttgcttgcttcagagtcatttgttgactgtgagaattggcctaagaatttggtgggtgctaagtggatggctttgaaactgttcttctttagcccagttgacacctgtgaatgatgaccagtcctgatcattttggaaatggatttgtaataaaacgtccatcacctctgcagtggcagagatggttactaagagccgctagagcgagcaggttttccaagaagtaacctgaagacattttgctcccaagaggactggttatttaaaacagtgcattaatggacatttgaaacacattaaacccctttctcatttcagttgttacctcctaaccctccaggggatcccaaatttgaaaggaaaaa

SEQ ID NO: 310650 - DNA, 4326 bp, Homo sapiens
actgtgcgcaagcggggggcgggcgcaggccgcggtctcgctccgctcccctttgttctctcccattgtgtggcacttcctcctcaggcgcttcttctctgcaccctggcagcccgtggggagttcgggaaggggccctggatgccttttctgcttgtttttgattgactgaaacaaaacaaaacaaaagggccactggatgtctgccttcttggggggtgagccagacagactgacaaacaaacagccccaactgtgttcgggggagggtttcgcctcccgttttgcccggcagcagcagcatggacgtgttggctagttatagtatattccaggagctacaacttgtccacgacaccggctacttctcagctttaccatccctggaggagacctggcagcagacatgccttgaattggaacgctacctacagacggagccccggaggatctcagagacctttggtgaggacttggactgtttcctccacgcttcccctcccccgtgcattgaggaaagcttccgtcgcttagaccccctgctgctccccgtggaagcggccatctgtgagaagagctcggcagtggacatcttgctctctcgggacaagttgctatctgagacctgcctcagcctccagccggccagctcttctctagacagctacacagccgtcaaccaggcccagctcaacgcagtgacctcattaacgcccccatcgtcccctgagctcagccgccatctggtcaaaacctcacaaactctctctgccgtggatggcacggtgacgttgaaactggtggccaagaaggctgctctcagctccgtaaaggtgagaagccttataagtgctcatgggagggatgtgagtggcgttttgcacgaagcgatgagctcacgaggcactacaggaaacacacaggtgcaaagcccttcaaatgcaaccactgcgacaggtgtttttccaggtctgaccatcttgccctccacatgaagagacatatctaaaaaaccgaaaggccagagttgccatggcatcggctagtgtctaaaggaaacgccatgaggcagggggctggacttcaggcggggacccattgcctcgcagaagaaagttctcacttataaacctctgtacacacacacacacacacacacatatacacacactcacagacccacacacatacacactgtcatgcactcaactatatttaaaatatatacgtctattctttatgccttgccctagccagatggaagaagatgaagaaggaaaccaggtgaactcagcaaggcagactggctgcttacttcagcactattggaattatttcccgctgttgccaatggaaatcaaagaaaatggatgtgacgtctgtgcaggtggacggcagtccgaggggcttatttcacttgcttctcagtgcaacttgataggagaatccagcatcttaaagttgcatatgtgtagcactaatgtttctttttaaatagttgggggaaaatgacctagaaaaccaaattgcagtttggtagccaaaattaactcttggtttatttgtcctttgtgtgtgaaaagtcctactattccgtgcgtcagacttcctcacagaactgttgactggttttggttcttagtactattgagatctttcgcgtcgatcccaacggccttagcggcggcagactggaataacaccttacacctttctggcctgcatttctgtagacttcactctcaagggaggagttttcttttcttacgttttgacttttgcacaccatatgcactagggattctggaaacttctagcatgactgcaaagtggccaagagaataaagtccttgatgataaatcacagtatatcccttgagcctcaccttattgccagtgctagattttttctttttaatctctccgtttttgctaacgaaaacttgaaaagcttatttggaagcttaaatgttttatcttttctccatggactaaacctctccaggactctctcggcacctggatgtccagctctcgaagcagccagtcagatgggacatcacagttctctcatcctccttgaggcatgatgacctcagctcatagtgatcaaccgttgtgctgtgtgtcattgctaccccataaccagttacagcatagatgtcgctagtctcagagggcagctgcgtatttaatttaactctggtttatgacctgacaaaaagccaaaaatatcactctttccaggagtggggaaaactgaggatgcctcccaagtctagtggcttcacaaaagatcatcctgtcttctctgtcatgcccactgagctcctattcccctacgtgttacaatacacaatttaaaacgccattgtgggagtgaagggttgacatttaaggaaaaggttgaggtgtttctctcatgggctgtctaaaaggagagacacgtttctttctttcctttttttttggctaggcccaccatgacttgtgacctagaacccccaggattaacagaggcctcacatttactctgcaagctgactccaaaggagtctacagtccttacttgtcatgccacactcacacatccagtagtggtctctatctacccgcattcctagctagctggcactggcctcaactccaaagactgcctttaggaccatcaaatggcctatgcaagcaagcggggtggttattaggacagattgtatattttgtatattctgggaccatcccttcaagacacgtctataaaacaaaaatggcgcttggtccacacacggttgctgctccctcctaccagctggctcccctcctgtcctcctttgactgtttgactcattgactgttaaaatgccaccccatacatatttgggatgcaaaactgaagtcaaaaggaaataatataagaaacacaaacacatatatgacagcaaccttcaagatctgggttttcagctttctgcaacctttgttttcactgaaatgttgaaactactcgtctgagggcaaaggaacctcctcacaaatgctatagctgccaattggacacttggggcatttcgaggtctggccctaagaatttactttctccttttccttttttctatttagaccaaaaaaaacaaaaacaaaaacaaaaaaaaaaaaacaaaattattacaaaatcgaaaaaaaaagaaagaacacccgttaacacacacgcgcacacacacacaaaatctgtccatttgccggaggcaattgtatgtatgttagttggagggtattaaaaatcagttttattccaaagatttaaaactagacatgacttaaaaacaatttctggagcactgcttgctgacaatctcgtagttctctgctgcatttgagtgcattttgtggccagtccatcagggcgtaccatgggattatatttgaatgtgtggtgcatccttcctggatgaaggatgtgtgagggaccttgaacctcagctgtattaaactgtagcgcctccagtcagtgcactagatgaaacttttagacaccctgaattctgttggttcctttcttttcctttatgtagcagcctccagcatgaatgcacgcacacgccagtgatggcattaagccatggccaccacgatttgcaaatgttctctcccaagctggagctgctcttgcctctcgaatgctattattaagggtttataatacttaatttaattttcgaactgaccaatgcaaggctctattaaaaagaaagtttaaaaaatgcaaaagagtaatcattgcttgtttgctccctatgtttcatctgtggtctcatttgaatgtggcagaacaaaggccctttggtcctcatcagtgtctgaaatgttcagtaatttctctctcttttgtatcagtgaggtcctttgtaatctgctcctgacctttcttggagcagggtgcattgaaactcaatggtggtgcttgcttgcttcagagtcatttgttgactgtgagaattggcctaagaatttggtgggtgctaagtggatggctttgaaactgttcttctttagcccagttgacacctgtgaatgatgaccagtcctgatcattttggaaatggatttgtaataaaacgtccatcacctctgcagtggcagagatggttactaagagccgctagagcgagcaggttttccaagaagtaacctgaagacattttgctcccaagaggactggttatttaaaacagtgcattaatggacatttgaaacacattaaacccctttctcatttcagttgttacctcctaaccctccaggggatcccaaatttgaaaggaaaaa

SEQ ID NO: 310651 - DNA, 4528 bp, Homo sapiens
actgtgcgcaagcggggggcgggcgcaggccgcggtctcgctccgctcccctttgttctctcccattgtgtggcacttcctcctcaggcgcttcttctctgcaccctggcagcccgtggggagttcgggaaggggccctggatgccttttctgcttgtttttgattgactgaaacaaaacaaaacaaaagggccactggatgtctgccttcttggggggtgagccagacagactgacaaacaaacagccccaactgtgttcgggggagggtttcgcctcccgttttgcccggcagcagcagcatggacgtgttggctagttatagtatattccaggagctacaacttgtccacgacaccggctacttctcagctttaccatccctggaggagacctggcagcagacatgccttgaattggaacgctacctacagacggagccccggaggatctcagagacctttggtgaggacttggactgtttcctccacgcttcccctcccccgtgcattgaggaaagcttccgtcgcttagaccccctgctgctccccgtggaagcggccatctgtgagaagagctcggcagtggacatcttgctctctcgggacaagttgctatctgagacctgcctcagcctccagccggccagctcttctctagacagctacacagccgtcaaccaggcccagctcaacgcagtgacctcattaacgcccccatcgtcccctgagctcagccgccatctggtcaaaacctcacaaactctctctgccgtggatggcacggtgacgttgaaactggtggccaagaaggctgctctcagctccgtaaaggtgggaggggtcgcaacagctgcagcagccgtgacggctgcgggggccgttaagagtggacagagcgacagtgaccaaggagggctaggggctgaagcatgtcccgaaaacaagaagagggttcaccgctgtcagtttaacgggtgccggaaagtttatacaaaaagctcccacttaaaggcccaccagaggactcacacaggtgagaagccttataagtgctcatgggagggatgtgagtggcgttttgcacgaagcgatgagctcacgaggcactacaggaaacacacaggtgcaaagcccttcaaatgcaaccactgcgacaggtgtttttccaggtctgaccatcttgccctccacatgaagagacatatctaaaaaaccgaaaggccagagttgccatggcatcggctagtgtctaaaggaaacgccatgaggcagggggctggacttcaggcggggacccattgcctcgcagaagaaagttctcacttataaacctctgtacacacacacacacacacacacatatacacacactcacagacccacacacatacacactgtcatgcactcaactatatttaaaatatatacgtctattctttatgccttgccctagccagatggaagaagatgaagaaggaaaccaggtgaactcagcaaggcagactggctgcttacttcagcactattggaattatttcccgctgttgccaatggaaatcaaagaaaatggatgtgacgtctgtgcaggtggacggcagtccgaggggcttatttcacttgcttctcagtgcaacttgataggagaatccagcatcttaaagttgcatatgtgtagcactaatgtttctttttaaatagttgggggaaaatgacctagaaaaccaaattgcagtttggtagccaaaattaactcttggtttatttgtcctttgtgtgtgaaaagtcctactattccgtgcgtcagacttcctcacagaactgttgactggttttggttcttagtactattgagatctttcgcgtcgatcccaacggccttagcggcggcagactggaataacaccttacacctttctggcctgcatttctgtagacttcactctcaagggaggagttttcttttcttacgttttgacttttgcacaccatatgcactagggattctggaaacttctagcatgactgcaaagtggccaagagaataaagtccttgatgataaatcacagtatatcccttgagcctcaccttattgccagtgctagattttttctttttaatctctccgtttttgctaacgaaaacttgaaaagcttatttggaagcttaaatgttttatcttttctccatggactaaacctctccaggactctctcggcacctggatgtccagctctcgaagcagccagtcagatgggacatcacagttctctcatcctccttgaggcatgatgacctcagctcatagtgatcaaccgttgtgctgtgtgtcattgctaccccataaccagttacagcatagatgtcgctagtctcagagggcagctgcgtatttaatttaactctggtttatgacctgacaaaaagccaaaaatatcactctttccaggagtggggaaaactgaggatgcctcccaagtctagtggcttcacaaaagatcatcctgtcttctctgtcatgcccactgagctcctattcccctacgtgttacaatacacaatttaaaacgccattgtgggagtgaagggttgacatttaaggaaaaggttgaggtgtttctctcatgggctgtctaaaaggagagacacgtttctttctttcctttttttttggctaggcccaccatgacttgtgacctagaacccccaggattaacagaggcctcacatttactctgcaagctgactccaaaggagtctacagtccttacttgtcatgccacactcacacatccagtagtggtctctatctacccgcattcctagctagctggcactggcctcaactccaaagactgcctttaggaccatcaaatggcctatgcaagcaagcggggtggttattaggacagattgtatattttgtatattctgggaccatcccttcaagacacgtctataaaacaaaaatggcgcttggtccacacacggttgctgctccctcctaccagctggctcccctcctgtcctcctttgactgtttgactcattgactgttaaaatgccaccccatacatatttgggatgcaaaactgaagtcaaaaggaaataatataagaaacacaaacacatatatgacagcaaccttcaagatctgggttttcagctttctgcaacctttgttttcactgaaatgttgaaactactcgtctgagggcaaaggaacctcctcacaaatgctatagctgccaattggacacttggggcatttcgaggtctggccctaagaatttactttctccttttccttttttctatttagaccaaaaaaaacaaaaacaaaaacaaaaaaaaaaaaacaaaattattacaaaatcgaaaaaaaaagaaagaacacccgttaacacacacgcgcacacacacacaaaatctgtccatttgccggaggcaattgtatgtatgttagttggagggtattaaaaatcagttttattccaaagatttaaaactagacatgacttaaaaacaatttctggagcactgcttgctgacaatctcgtagttctctgctgcatttgagtgcattttgtggccagtccatcagggcgtaccatgggattatatttgaatgtgtggtgcatccttcctggatgaaggatgtgtgagggaccttgaacctcagctgtattaaactgtagcgcctccagtcagtgcactagatgaaacttttagacaccctgaattctgttggttcctttcttttcctttatgtagcagcctccagcatgaatgcacgcacacgccagtgatggcattaagccatggccaccacgatttgcaaatgttctctcccaagctggagctgctcttgcctctcgaatgctattattaagggtttataatacttaatttaattttcgaactgaccaatgcaaggctctattaaaaagaaagtttaaaaaatgcaaaagagtaatcattgcttgtttgctccctatgtttcatctgtggtctcatttgaatgtggcagaacaaaggccctttggtcctcatcagtgtctgaaatgttcagtaatttctctctcttttgtatcagtgaggtcctttgtaatctgctcctgacctttcttggagcagggtgcattgaaactcaatggtggtgcttgcttgcttcagagtcatttgttgactgtgagaattggcctaagaatttggtgggtgctaagtggatggctttgaaactgttcttctttagcccagttgacacctgtgaatgatgaccagtcctgatcattttggaaatggatttgtaataaaacgtccatcacctctgcagtggcagagatggttactaagagccgctagagcgagcaggttttccaagaagtaacctgaagacattttgctcccaagaggactggttatttaaaacagtgcattaatggacatttgaaacacattaaacccctttctcatttcagttgttacctcctaaccctccaggggatcccaaatttgaaaggaaaaa

SEQ ID NO: 310652 - DNA, 4556 bp, Homo sapiens
gggggaagagaagcgatcgcgagagaaaaaaatgcaacctcccaaaataaagagcaaagattgcattaggagcgaacagcgctgcagaaatagatggcagcttcgtgtcagtgagtttgcatcccccttcctgatccacgagctggagtgattagagccctggaagggaattgttactcccgtggagaagtccccttttcctggcagtcgtctgcactgtacacgctggatgcctctctccatccaccccactcactcgctcctctctcacctcctctctccctctcctgcattgatttttttttttcctttttagttgactgaaacaaaacaaaacaaaagggccactggatgtctgccttcttggggggtgagccagacagactgacaaacaaacagccccaactgtgttcgggggagggtttcgcctcccgttttgcccggcagcagcagcatggacgtgttggctagttatagtatattccaggagctacaacttgtccacgacaccggctacttctcagctttaccatccctggaggagacctggcagcagacatgccttgaattggaacgctacctacagacggagccccggaggatctcagagacctttggtgaggacttggactgtttcctccacgcttcccctcccccgtgcattgaggaaagcttccgtcgcttagaccccctgctgctccccgtggaagcggccatctgtgagaagagctcggcagtggacatcttgctctctcgggacaagttgctatctgagacctgcctcagcctccagccggccagctcttctctagacagctacacagccgtcaaccaggcccagctcaacgcagtgacctcattaacgcccccatcgtcccctgagctcagccgccatctggtcaaaacctcacaaactctctctgccgtggatggcacggtgacgttgaaactggtggccaagaaggctgctctcagctccgtaaaggtgggaggggtcgcaacagctgcagcagccgtgacggctgcgggggccgttaagagtggacagagcgacagtgaccaaggagggctaggggctgaagcatgtcccgaaaacaagaagagggttcaccgctgtcagtttaacgggtgccggaaagtttatacaaaaagctcccacttaaaggcccaccagaggactcacacaggtgtttttccaggtctgaccatcttgccctccacatgaagagacatatctaaaaaaccgaaaggccagagttgccatggcatcggctagtgtctaaaggaaacgccatgaggcagggggctggacttcaggcggggacccattgcctcgcagaagaaagttctcacttataaacctctgtacacacacacacacacacacacatatacacacactcacagacccacacacatacacactgtcatgcactcaactatatttaaaatatatacgtctattctttatgccttgccctagccagatggaagaagatgaagaaggaaaccaggtgaactcagcaaggcagactggctgcttacttcagcactattggaattatttcccgctgttgccaatggaaatcaaagaaaatggatgtgacgtctgtgcaggtggacggcagtccgaggggcttatttcacttgcttctcagtgcaacttgataggagaatccagcatcttaaagttgcatatgtgtagcactaatgtttctttttaaatagttgggggaaaatgacctagaaaaccaaattgcagtttggtagccaaaattaactcttggtttatttgtcctttgtgtgtgaaaagtcctactattccgtgcgtcagacttcctcacagaactgttgactggttttggttcttagtactattgagatctttcgcgtcgatcccaacggccttagcggcggcagactggaataacaccttacacctttctggcctgcatttctgtagacttcactctcaagggaggagttttcttttcttacgttttgacttttgcacaccatatgcactagggattctggaaacttctagcatgactgcaaagtggccaagagaataaagtccttgatgataaatcacagtatatcccttgagcctcaccttattgccagtgctagattttttctttttaatctctccgtttttgctaacgaaaacttgaaaagcttatttggaagcttaaatgttttatcttttctccatggactaaacctctccaggactctctcggcacctggatgtccagctctcgaagcagccagtcagatgggacatcacagttctctcatcctccttgaggcatgatgacctcagctcatagtgatcaaccgttgtgctgtgtgtcattgctaccccataaccagttacagcatagatgtcgctagtctcagagggcagctgcgtatttaatttaactctggtttatgacctgacaaaaagccaaaaatatcactctttccaggagtggggaaaactgaggatgcctcccaagtctagtggcttcacaaaagatcatcctgtcttctctgtcatgcccactgagctcctattcccctacgtgttacaatacacaatttaaaacgccattgtgggagtgaagggttgacatttaaggaaaaggttgaggtgtttctctcatgggctgtctaaaaggagagacacgtttctttctttcctttttttttggctaggcccaccatgacttgtgacctagaacccccaggattaacagaggcctcacatttactctgcaagctgactccaaaggagtctacagtccttacttgtcatgccacactcacacatccagtagtggtctctatctacccgcattcctagctagctggcactggcctcaactccaaagactgcctttaggaccatcaaatggcctatgcaagcaagcggggtggttattaggacagattgtatattttgtatattctgggaccatcccttcaagacacgtctataaaacaaaaatggcgcttggtccacacacggttgctgctccctcctaccagctggctcccctcctgtcctcctttgactgtttgactcattgactgttaaaatgccaccccatacatatttgggatgcaaaactgaagtcaaaaggaaataatataagaaacacaaacacatatatgacagcaaccttcaagatctgggttttcagctttctgcaacctttgttttcactgaaatgttgaaactactcgtctgagggcaaaggaacctcctcacaaatgctatagctgccaattggacacttggggcatttcgaggtctggccctaagaatttactttctccttttccttttttctatttagaccaaaaaaaacaaaaacaaaaacaaaaaaaaaaaaacaaaattattacaaaatcgaaaaaaaaagaaagaacacccgttaacacacacgcgcacacacacacaaaatctgtccatttgccggaggcaattgtatgtatgttagttggagggtattaaaaatcagttttattccaaagatttaaaactagacatgacttaaaaacaatttctggagcactgcttgctgacaatctcgtagttctctgctgcatttgagtgcattttgtggccagtccatcagggcgtaccatgggattatatttgaatgtgtggtgcatccttcctggatgaaggatgtgtgagggaccttgaacctcagctgtattaaactgtagcgcctccagtcagtgcactagatgaaacttttagacaccctgaattctgttggttcctttcttttcctttatgtagcagcctccagcatgaatgcacgcacacgccagtgatggcattaagccatggccaccacgatttgcaaatgttctctcccaagctggagctgctcttgcctctcgaatgctattattaagggtttataatacttaatttaattttcgaactgaccaatgcaaggctctattaaaaagaaagtttaaaaaatgcaaaagagtaatcattgcttgtttgctccctatgtttcatctgtggtctcatttgaatgtggcagaacaaaggccctttggtcctcatcagtgtctgaaatgttcagtaatttctctctcttttgtatcagtgaggtcctttgtaatctgctcctgacctttcttggagcagggtgcattgaaactcaatggtggtgcttgcttgcttcagagtcatttgttgactgtgagaattggcctaagaatttggtgggtgctaagtggatggctttgaaactgttcttctttagcccagttgacacctgtgaatgatgaccagtcctgatcattttggaaatggatttgtaataaaacgtccatcacctctgcagtggcagagatggttactaagagccgctagagcgagcaggttttccaagaagtaacctgaagacattttgctcccaagaggactggttatttaaaacagtgcattaatggacatttgaaacacattaaacccctttctcatttcagttgttacctcctaaccctccaggggatcccaaatttgaaaggaaaaa

SEQ ID NO: 310653 - DNA, 4051 bp, Homo sapiens
gagaggaaggggagatgatgtaactggttcggcatgttcccgtcttggccaacatgccttgaattggaacgctacctacagacggagccccggaggatctcagagacctttggtgaggacttggactgtttcctccacgcttcccctcccccgtgcattgaggaaagcttccgtcgcttagaccccctgctgctccccgtggaagcggccatctgtgagaagagctcggcagtggacatcttgctctctcgggacaagttgctatctgagacctgcctcagcctccagccggccagctcttctctagacagctacacagccgtcaaccaggcccagctcaacgcagtgacctcattaacgcccccatcgtcccctgagctcagccgccatctggtcaaaacctcacaaactctctctgccgtggatggcacggtgacgttgaaactggtggccaagaaggctgctctcagctccgtaaaggtgggaggggtcgcaacagctgcagcagccgtgacggctgcgggggccgttaagagtggacagagcgacagtgaccaaggagggctaggggctgaagcatgtcccgaaaacaagaagagggttcaccgctgtcagtttaacgggtgccggaaagtttatacaaaaagctcccacttaaaggcccaccagaggactcacacaggtgtttttccaggtctgaccatcttgccctccacatgaagagacatatctaaaaaaccgaaaggccagagttgccatggcatcggctagtgtctaaaggaaacgccatgaggcagggggctggacttcaggcggggacccattgcctcgcagaagaaagttctcacttataaacctctgtacacacacacacacacacacacatatacacacactcacagacccacacacatacacactgtcatgcactcaactatatttaaaatatatacgtctattctttatgccttgccctagccagatggaagaagatgaagaaggaaaccaggtgaactcagcaaggcagactggctgcttacttcagcactattggaattatttcccgctgttgccaatggaaatcaaagaaaatggatgtgacgtctgtgcaggtggacggcagtccgaggggcttatttcacttgcttctcagtgcaacttgataggagaatccagcatcttaaagttgcatatgtgtagcactaatgtttctttttaaatagttgggggaaaatgacctagaaaaccaaattgcagtttggtagccaaaattaactcttggtttatttgtcctttgtgtgtgaaaagtcctactattccgtgcgtcagacttcctcacagaactgttgactggttttggttcttagtactattgagatctttcgcgtcgatcccaacggccttagcggcggcagactggaataacaccttacacctttctggcctgcatttctgtagacttcactctcaagggaggagttttcttttcttacgttttgacttttgcacaccatatgcactagggattctggaaacttctagcatgactgcaaagtggccaagagaataaagtccttgatgataaatcacagtatatcccttgagcctcaccttattgccagtgctagattttttctttttaatctctccgtttttgctaacgaaaacttgaaaagcttatttggaagcttaaatgttttatcttttctccatggactaaacctctccaggactctctcggcacctggatgtccagctctcgaagcagccagtcagatgggacatcacagttctctcatcctccttgaggcatgatgacctcagctcatagtgatcaaccgttgtgctgtgtgtcattgctaccccataaccagttacagcatagatgtcgctagtctcagagggcagctgcgtatttaatttaactctggtttatgacctgacaaaaagccaaaaatatcactctttccaggagtggggaaaactgaggatgcctcccaagtctagtggcttcacaaaagatcatcctgtcttctctgtcatgcccactgagctcctattcccctacgtgttacaatacacaatttaaaacgccattgtgggagtgaagggttgacatttaaggaaaaggttgaggtgtttctctcatgggctgtctaaaaggagagacacgtttctttctttcctttttttttggctaggcccaccatgacttgtgacctagaacccccaggattaacagaggcctcacatttactctgcaagctgactccaaaggagtctacagtccttacttgtcatgccacactcacacatccagtagtggtctctatctacccgcattcctagctagctggcactggcctcaactccaaagactgcctttaggaccatcaaatggcctatgcaagcaagcggggtggttattaggacagattgtatattttgtatattctgggaccatcccttcaagacacgtctataaaacaaaaatggcgcttggtccacacacggttgctgctccctcctaccagctggctcccctcctgtcctcctttgactgtttgactcattgactgttaaaatgccaccccatacatatttgggatgcaaaactgaagtcaaaaggaaataatataagaaacacaaacacatatatgacagcaaccttcaagatctgggttttcagctttctgcaacctttgttttcactgaaatgttgaaactactcgtctgagggcaaaggaacctcctcacaaatgctatagctgccaattggacacttggggcatttcgaggtctggccctaagaatttactttctccttttccttttttctatttagaccaaaaaaaacaaaaacaaaaacaaaaaaaaaaaaacaaaattattacaaaatcgaaaaaaaaagaaagaacacccgttaacacacacgcgcacacacacacaaaatctgtccatttgccggaggcaattgtatgtatgttagttggagggtattaaaaatcagttttattccaaagatttaaaactagacatgacttaaaaacaatttctggagcactgcttgctgacaatctcgtagttctctgctgcatttgagtgcattttgtggccagtccatcagggcgtaccatgggattatatttgaatgtgtggtgcatccttcctggatgaaggatgtgtgagggaccttgaacctcagctgtattaaactgtagcgcctccagtcagtgcactagatgaaacttttagacaccctgaattctgttggttcctttcttttcctttatgtagcagcctccagcatgaatgcacgcacacgccagtgatggcattaagccatggccaccacgatttgcaaatgttctctcccaagctggagctgctcttgcctctcgaatgctattattaagggtttataatacttaatttaattttcgaactgaccaatgcaaggctctattaaaaagaaagtttaaaaaatgcaaaagagtaatcattgcttgtttgctccctatgtttcatctgtggtctcatttgaatgtggcagaacaaaggccctttggtcctcatcagtgtctgaaatgttcagtaatttctctctcttttgtatcagtgaggtcctttgtaatctgctcctgacctttcttggagcagggtgcattgaaactcaatggtggtgcttgcttgcttcagagtcatttgttgactgtgagaattggcctaagaatttggtgggtgctaagtggatggctttgaaactgttcttctttagcccagttgacacctgtgaatgatgaccagtcctgatcattttggaaatggatttgtaataaaacgtccatcacctctgcagtggcagagatggttactaagagccgctagagcgagcaggttttccaagaagtaacctgaagacattttgctcccaagaggactggttatttaaaacagtgcattaatggacatttgaaacacattaaacccctttctcatttcagttgttacctcctaaccctccaggggatcccaaatttgaaaggaaaaa

SEQ ID NO: 310654 - DNA, 3239 bp, Homo sapiens
tcacacacagacacacacgcacgcacacacacacacacacccacacacacacacacacacacacacacacacatatacacacactcacagacccacacacatacacactgtcatgcactcaactatatttaaaatatatacgtctattctttatgccttgccctagccagatggaagaagatgaagaaggaaaccaggtgaactcagcaaggcagactggctgcttacttcagcactattggaattatttcccgctgttgccaatggaaatcaaagaaaatggatgtgacgtctgtgcaggtggacggcagtccgaggggcttatttcacttgcttctcagtgcaacttgataggagaatccagcatcttaaagttgcatatgtgtagcactaatgtttctttttaaatagttgggggaaaatgacctagaaaaccaaattgcagtttggtagccaaaattaactcttggtttatttgtcctttgtgtgtgaaaagtcctactattccgtgcgtcagacttcctcacagaactgttgactggttttggttcttagtactattgagatctttcgcgtcgatcccaacggccttagcggcggcagactggaataacaccttacacctttctggcctgcatttctgtagacttcactctcaagggaggagttttcttttcttacgttttgacttttgcacaccatatgcactagggattctggaaacttctagcatgactgcaaagtggccaagagaataaagtccttgatgataaatcacagtatatcccttgagcctcaccttattgccagtgctagattttttctttttaatctctccgtttttgctaacgaaaacttgaaaagcttatttggaagcttaaatgttttatcttttctccatggactaaacctctccaggactctctcggcacctggatgtccagctctcgaagcagccagtcagatgggacatcacagttctctcatcctccttgaggcatgatgacctcagctcatagtgatcaaccgttgtgctgtgtgtcattgctaccccataaccagttacagcatagatgtcgctagtctcagagggcagctgcgtatttaatttaactctggtttatgacctgacaaaaagccaaaaatatcactctttccaggagtggggaaaactgaggatgcctcccaagtctagtggcttcacaaaagatcatcctgtcttctctgtcatgcccactgagctcctattcccctacgtgttacaatacacaatttaaaacgccattgtgggagtgaagggttgacatttaaggaaaaggttgaggtgtttctctcatgggctgtctaaaaggagagacacgtttctttctttcctttttttttggctaggcccaccatgacttgtgacctagaacccccaggattaacagaggcctcacatttactctgcaagctgactccaaaggagtctacagtccttacttgtcatgccacactcacacatccagtagtggtctctatctacccgcattcctagctagctggcactggcctcaactccaaagactgcctttaggaccatcaaatggcctatgcaagcaagcggggtggttattaggacagattgtatattttgtatattctgggaccatcccttcaagacacgtctataaaacaaaaatggcgcttggtccacacacggttgctgctccctcctaccagctggctcccctcctgtcctcctttgactgtttgactcattgactgttaaaatgccaccccatacatatttgggatgcaaaactgaagtcaaaaggaaataatataagaaacacaaacacatatatgacagcaaccttcaagatctgggttttcagctttctgcaacctttgttttcactgaaatgttgaaactactcgtctgagggcaaaggaacctcctcacaaatgctatagctgccaattggacacttggggcatttcgaggtctggccctaagaatttactttctccttttccttttttctatttagaccaaaaaaaacaaaaacaaaaacaaaaaaaaaaaaacaaaattattacaaaatcgaaaaaaaaagaaagaacacccgttaacacacacgcgcacacacacacaaaatctgtccatttgccggaggcaattgtatgtatgttagttggagggtattaaaaatcagttttattccaaagatttaaaactagacatgacttaaaaacaatttctggagcactgcttgctgacaatctcgtagttctctgctgcatttgagtgcattttgtggccagtccatcagggcgtaccatgggattatatttgaatgtgtggtgcatccttcctggatgaaggatgtgtgagggaccttgaacctcagctgtattaaactgtagcgcctccagtcagtgcactagatgaaacttttagacaccctgaattctgttggttcctttcttttcctttatgtagcagcctccagcatgaatgcacgcacacgccagtgatggcattaagccatggccaccacgatttgcaaatgttctctcccaagctggagctgctcttgcctctcgaatgctattattaagggtttataatacttaatttaattttcgaactgaccaatgcaaggctctattaaaaagaaagtttaaaaaatgcaaaagagtaatcattgcttgtttgctccctatgtttcatctgtggtctcatttgaatgtggcagaacaaaggccctttggtcctcatcagtgtctgaaatgttcagtaatttctctctcttttgtatcagtgaggtcctttgtaatctgctcctgacctttcttggagcagggtgcattgaaactcaatggtggtgcttgcttgcttcagagtcatttgttgactgtgagaattggcctaagaatttggtgggtgctaagtggatggctttgaaactgttcttctttagcccagttgacacctgtgaatgatgaccagtcctgatcattttggaaatggatttgtaataaaacgtccatcacctctgcagtggcagagatggttactaagagccgctagagcgagcaggttttccaagaagtaacctgaagacattttgctcccaagaggactggttatttaaaacagtgcattaatggacatttgaaacacattaaacccctttctcatttcagttgttacctcctaaccctccaggggatcccaaatttgaaaggaaaaa

SEQ ID NO: 310655 - DNA, 3477 bp, Homo sapiens
gggggaagagaagcgatcgcgagagaaaaaaatgcaacctcccaaaataaagagcaaagattgcattaggagcgaacagcgctgcagaaatagatggcagcttcgtgtcagtgagtttgcatcccccttcctgatccacgagctggagtgattagagccctggaagggaattgttactcccgtggagaagtccccttttcctggcagtcgtctgcactgtacacgctggatgcctctctccatccaccccactcactcgctcctctctcacctcctctctccctctcctgcattgatttttttttttcctttttagttgactgaaacaaaacaaaacaaaagggccactggatgtctgccttcttggggggtgagccagacagactgacaaacaaacagccccaactgtgttcgggggagggtttcgcctcccgttttgcccggcagcagcagcatggacgtgttggctagttatagtatattccaggagctacaacttgtccacgacaccggctacttctcagctttaccatccctggaggagacctggcagcagacatgccttgaattggaacgctacctacagacggagccccggaggatctcagagacctttggtgaggacttggactgtttcctccacgcttcccctcccccgtgcattgaggaaagcttccgtcgcttagaccccctgctgctccccgtggaagcggccatctgtgagaagagctcggcagtggacatcttgctctctcgggacaagttgctatctgagacctgcctcagcctccagccggccagctcttctctagacagctacacagccgtcaaccaggcccagctcaacgcagtgacctcattaacgcccccatcgtcccctgagctcagccgccatctggtcaaaacctcacaaactctctctgccgtggatggcacggtgacgttgaaactggtggccaagaaggctgctctcagctccgtaaaggtgggaggggtcgcaacagctgcagcagccgtgacggctgcgggggccgttaagagtggacagagcgacagtgaccaaggagggctaggggctgaagcatgtcccgaaaacaagaagagggttcaccgctgtcagtttaacgggtgccggaaagtttatacaaaaagctcccacttaaaggcccaccagaggactcacacaggtgagaagccttataagtgctcatgggagggatgtgagtggcgttttgcacgaagcgatgagctcacgaggcactacaggaaacacacaggtgcaaagcccttcaaatgcaaccactgcgacaggtgtttttccaggtctgaccatcttgccctccacatgaagagacatatctaaaaaaccgaaaggccagagttgccatggcatcggctagtgtctaaaggaaacgccatgaggcagggggctggacttcaggcggggacccattgcctcgcagaagaaagttctcacttataaacctctgtacacacacacacacacacacacatatacacacactcacagacccacacacatacacactgtcatgcactcaactatatttaaaatatatacgtctattctttatgccttgccctagccagatggaagaagatgaagaaggaaaccaggtgaactcagcaaggcagactggctgcttacttcagcactattggaattatttcccgctgttgccaatggaaatcaaagaaaatggatgtgacgtctgtgcaggtggacggcagtccgaggggcttatttcacttgcttctcagtgcaacttgataggagaatccagcatcttaaagttgcatatgtgtagcactaatgtttctttttaaatagttgggggaaaatgacctagaaaaccaaattgcagtttggtagccaaaattaactcttggtttatttgtcctttgtgtgtgaaaagtcctactattccgtgcgtcagacttcctcacagaactgttgactggttttggttcttagtactattgagatctttcgcgtcgatcccaacggccttagcggcggcagactggaataacaccttacacctttctggcctgcatttctgtagacttcactctcaagggaggagttttcttttcttacgttttgacttttgcacaccatatgcactagggattctggaaacttctagcatgactgcaaagtggccaagagaataaagtcggacacttggggcatttcgaggtctggccctaagaatttactttctccttttccttttttctatttagaccaaaaaaaacaaaaacaaaaacaaaaaaaaaaaaacaaaattattacaaaatcgaaaaaaaaagaaagaacacccgttaacacacacgcgcacacacacacaaaatctgtccatttgccggaggcaattgtatgtatgttagttggagggtattaaaaatcagttttattccaaagatttaaaactagacatgacttaaaaacaatttctggagcactgcttgctgacaatctcgtagttctctgctgcatttgagtgcattttgtggccagtccatcagggcgtaccatgggattatatttgaatgtgtggtgcatccttcctggatgaaggatgtgtgagggaccttgaacctcagctgtattaaactgtagcgcctccagtcagtgcactagatgaaacttttagacaccctgaattctgttggttcctttcttttcctttatgtagcagcctccagcatgaatgcacgcacacgccagtgatggcattaagccatggccaccacgatttgcaaatgttctctcccaagctggagctgctcttgcctctcgaatgctattattaagggtttataatacttaatttaattttcgaactgaccaatgcaaggctctattaaaaagaaagtttaaaaaatgcaaaagagtaatcattgcttgtttgctccctatgtttcatctgtggtctcatttgaatgtggcagaacaaaggccctttggtcctcatcagtgtctgaaatgttcagtaatttctctctcttttgtatcagtgaggtcctttgtaatctgctcctgacctttcttggagcagggtgcattgaaactcaatggtggtgcttgcttgcttcagagtcatttgttgactgtgagaattggcctaagaatttggtgggtgctaagtggatggctttgaaactgttcttctttagcccagttgacacctgtgaatgatgaccagtcctgatcattttggaaatggatttgtaataaaacgtccatcacctctgcagtggcagagatggttactaagagccgctagagcgagcaggttttccaagaagtaacctgaagacattttgctcccaagaggactggttatttaaaacagtgcattaatggacatttgaaacacattaaacccctttctcatttcagttgttacctcctaaccctccaggggatcccaaatttgaaaggaaaaa

SEQ ID NO: 310656 - DNA, 1958 bp, Homo sapiens
gggggaagagaagcgatcgcgagagaaaaaaatgcaacctcccaaaataaagagcaaagattgcattaggagcgaacagcgctgcagaaatagatggcagcttcgtgtcagtgagtttgcatcccccttcctgatccacgagctggagtgattagagccctggaagggaattgttactcccgtggagaagtccccttttcctggcagtcgtctgcactgtacacgctggatgcctctctccatccaccccactcactcgctcctctctcacctcctctctccctctcctgcattgatttttttttttcctttttagttgactgaaacaaaacaaaacaaaagggccactggatgtctgccttcttggggggtgagccagacagactgacaaacaaacagccccaactgtgttcgggggagggtttcgcctcccgttttgcccggcagcagcagcatggacgtgttggctagttatagtatattccaggagctacaacttgtccacgacaccggctacttctcagctttaccatccctggaggagacctggcagcagacatgccttgaattggaacgctacctacagacggagccccggaggatctcagagacctttggtgaggacttggactgtttcctccacgcttcccctcccccgtgcattgaggaaagcttccgtcgcttagaccccctgctgctccccgtggaagcggccatctgtgagaagagctcggcagtggacatcttgctctctcgggacaagttgctatctgagacctgcctcagcctccagccggccagctcttctctagacagctacacagccgtcaaccaggcccagctcaacgcagtgacctcattaacgcccccatcgtcccctgagctcagccgccatctggtcaaaacctcacaaactctctctgccgtggatggcacggtgacgttgaaactggtggccaagaaggctgctctcagctccgtaaaggtgggaggggtcgcaacagctgcagcagccgtgacggctgcgggggccgttaagagtggacagagcgacagtgaccaaggagggctaggggctgaagcatgtcccgaaaacaagaagagggttcaccgctgtcagtttaacgggtgccggaaagtttatacaaaaagctcccacttaaaggcccaccagaggactcacacaggtgagaagccttataagtgctcatgggagggatgtgagtggcgttttgcacgaagcgatgagctcacgaggcactacaggaaacacacaggtgcaaagcccttcaaatgcaaccactgcgacaggtgtttttccaggtctgaccatcttgccctccacatgaagagacatatctaaaaaaccgaaaggccagagttgccatggcatcggctagtgtctaaaggaaacgccatgaggcagggggctggacttcaggcggggacccattgcctcgcagaagaaagttctcacttataaacctctgtacacacacacacacacacacacatatacacacactcacagacccacacacatacacactgtcatgcactcaactatatttaaaatatatacgtctattctttatgccttgccctagccagatggaagaagatgaagaaggaaaccaggtgaactcagcaaggcagactggctgcttacttcagcactattggaattatttcccgctgttgccaatggaaatcaaagaaaatggatgtgacgtctgtgcaggtggacggcagtccgaggggcttatttcacttgcttctcagtgcaacttgataggagaatccagcatcttaaagttgcatatgtgtagcactaatgtttctttttaaatagttgggggaaaatgacctagaaaaccaaattgcagttgtacactctgtttattgtcctttgtgtgtgagctcacagactgtgctgcttaggatgctgtcgggatctc

SEQ ID NO: 310657 - DNA, 429 bp, Homo sapiens
  misc_feature (23)..(23): n is a, c, g, or t
  misc_feature (37)..(37): n is a, c, g, or t
  misc_feature (39)..(39): n is a, c, g, or t
  misc_feature (44)..(44): n is a, c, g, or t
cacataccatggtcaaccattcnacccaaaaaccacncngttangggcaacgagccagcttttcaatgctggagccaagcttgcacattctaggcagccatttggaagattcttctctgcgcatgaccagctgaaaaggaaaaaccccgaaacattggcactgtgatttctccatgtgaacagtttagttcgccgaggtggacatgcctcattcatgcttatggagtgaccgaccagcctttagtgacaccccctgaaatgtgagtcatccatgggtcactagtcattggagaagagccccttatacaaaacttggagctcagaccacaaacaacaacaacaatccaaaaaataaaaaaatgaaaaattaggagcagagactaaatggaaagatggaaatattaaaataaaaatattattttaaaaatt

SEQ ID NO: 310658 - DNA, 514 bp, Homo sapiens
acctgtaggcaggtggagaggggatgggggaggtctcaggtcctcttgctcacccatcagctgtgtagtgtctgaagtgattaaggagcttggggaggcctcccaggctggtctgctccactggccctcagaaagacttgtcgcctcgccgagcctcagtgttctcatctgaagaatagagtgggcaaggcctttctcctacacactcagagccctgaatgggaagaaatgggttccatgtgcagcaagccaggagagatttaggcaacgagaacctccagttctgtcttagggttcccagctttctccttgtcctgagggagccgctgagcctgtgggagatgaggggtgcccattccccagtgcttctcaccctcccccacctgccctcctggggtacctttgtctgccacttgcatcctattggaagctgtccccaagtgcgtgttaggcaggtggcaggtgctggagcagagtgcaccaccctccggcgatcactgtgagttggggtaag

SEQ ID NO: 310659 - DNA, 462 bp, Homo sapiens
acctgtaggcaggtggagaggggatgggggaggtctcaggtcctcttgctcacccatcagctgtgtagtgtctgaagtgattaaggagcttggggagaatgctggagccaagcttgcacattctaggcagccatttggaagattcttctctgcgcatgaccagctgaaaaggaaaaaccccgaaacattggcactgtgatttctccatgtgaacagtttagttcgccgaggtggacatgcctcattcatgcttatggagtgaccgaccagcctttagtgacaccccctgaaatgtgagtcatccatgggtcactagtcattggagaagagccccttatacaaaacttggagctcagaccacaaacaacaacaacaatccaaaaaataaaaaaatgaaaaattaggagcagagactaaatggaaagatggaaatattaaaataaaaatattattttaaaaatt

SEQ ID NO: 310660 - DNA, 416 bp, Homo sapiens
cagagaatacgatcaacccacaacaatccgaacaccaaaccaaaaaactttaatgctggagccaagcttgcacattctaggcagccatttggaagattcttctctgcgcatgaccagctgaaaaggaaaaaccccgaaacattggcactgtgatttctccatgtgaacagtttagttcgccgaggtggacatgcctcattcatgcttatggagtgaccgaccagcctttagtgacaccccctgaaatgtgagtcatccatgggtcactagtcattggagaagagccccttatacaaaacttggagctcagaccacaaacaacaacaacaatccaaaaaataaaaaaatgaaaaattaggagcagagactaaatggaaagatggaaatattaaaataaaaatattattttaaaaatt

SEQ ID NO: 310661 - DNA, 436 bp, Homo sapiens
attcccggtatgttgatttatttgatcccgcccggcacatttggttgttatagattggtgtggggctaatgaatgctggagccaagcttgcacattctaggcagccatttggaagattcttctctgcgcatgaccagctgaaaaggaaaaaccccgaaacattggcactgtgatttctccatgtgaacagtttagttcgccgaggtggacatgcctcattcatgcttatggagtgaccgaccagcctttagtgacaccccctgaaatgtgagtcatccatgggtcactagtcattggagaagagccccttatacaaaacttggagctcagaccacaaacaacaacaacaatccaaaaaataaaaaaatgaaaaattaggagcagagactaaatggaaagatggaaatattaaaataaaaatattattttaaaaatt

SEQ ID NO: 310662 - DNA, 525 bp, Homo sapiens
acctgtaggcaggtggagaggggatgggggaggtctcaggtcctcttgctcacccatcagctgtgtagtgtctgaagtgattaaggagcttggggagaatgctggagccaagcttgcacattctaggcagccatttggaagattcttctctgcgcatgaccagctgaaaaggaaaaaccccgaaacattggcactgtgatttctccatgtgaacagtttagttcgccgaggtggacatgcctcattcatgcttatggagtgaccgaccagcctttagtgacaccccctgaaatgtgagtcatccatgggtcactagtcattggagaagagccccttatacaaaacttggagctcagaccacaaacaacaacaacaatccaaaaaataaaaaaatgaaaaattaggagcagagactaaatggaaagatggaaatattaaaataaaaatattattttaaaaattaatatgtattaaaattttatttaaagtaaaaataaataaaataaaaaaattaatattaattaa

SEQ ID NO: 310663 - DNA, 284 bp, Homo sapiens
ggtgagaaactgcctcccatcatcaatatttattgagcatttacagtgtactaggcacaatagaacatacagaaaacatgtccctgctcttgaggagcttacactgtaaatgctcaataaatattgatgatgggaggcagtgagtcttgatgataagggtgagaaactgaaatcccaaacactgttttgttgcttgttttattatgacctcagattaaattgggaaatattggcccttttgaataattgtcccaaatattacattcaaataaaagtgcaatgga

SEQ ID NO: 310664 - DNA, 1346 bp, Homo sapiens
  misc_feature (6)..(6): n is a, c, g, or t
  misc_feature (10)..(10): n is a, c, g, or t
  misc_feature (24)..(24): n is a, c, g, or t
  misc_feature (46)..(46): n is a, c, g, or t
ggtcantagnctcgctgtcagtgnagcgtcttcgtggagcccgggntgagactcaaggggcaaaccacactcctgtcatatccgcccatcaaactcgcagcaccaccacaccacccactccggacacagaacatccagtcatggataaaaatgagctggttcagaaggccaaactggccgagcaggctgagcgatatgatgacatggcagcctgcatgaagtctgtaactgagcaaggagctgaattatccaatgaggagaggaatcttctctcagttgcttataaaaatgttgtaggagcccgtaggtcatcttggagggtcgtctcaagtattgaacaaaagacggaaggtgctgagaaaaaacagcagatggctcgagaatacagagagaaaattgagacggagctaagagatatctgcaatgatgtactgtctcttttggaaaagttcttgatccccaatgcttcacaagcagagagcaaagtcttctatttgaaaatgaaaggagattactaccgttacttggctgaggttgccgctggtgatgacaagaaagggattgtcgatcagtcacaacaagcataccaagaagcttttgaaatcagcaaaaaggaaatgcaaccaacacatcctatcagactgggtctggcccttaacttctctgtgttctattatgagattctgaactccccagagaaagcctgctctcttgcaaagacagcttttgatgaagccattgctgaacttgatacattaagtgaagagtcatacaaagacagcacgctaataatgcaattactgagagacaacttgacagtaagtacataacagcatcattagtgatgaatgtggttgaagaggttatgttttactctagggaatttttttttttattaaatacatcttttaaaattttttctcaacacatttcataggctctcataaatatatctcagctactattaaagtcctatgaaggaaaattacagaaactgaaatattagactgagaactaaaaaatacacacattgatgagttacctgtcttgttaaaatttgttagtatcaaaagtgtgctgagactctacatgttttagttcctttaagaatgattttcttgcccatcaagttgcctccatattggtaaagataatggtagggaattaataacttgagttacaaaatctcaggtatctacagaatccaagtggaagtctattttgcctagcttcttattttaaatgacttaatatgaaaggtcgtgattgtccttgggatactgcagatgtataaaaagaaacagtgtcactatcacaccaggaacatcaacataattccctaataa

SEQ ID NO: 310665 - DNA, 934 bp, Homo sapiens
  misc_feature (64)..(64): n is a, c, g, or t
  misc_feature (755)..(755): n is a, c, g, or t
  misc_feature (757)..(757): n is a, c, g, or t
  misc_feature (762)..(762): n is a, c, g, or t
  misc_feature (772)..(772): n is a, c, g, or t
  misc_feature (774)..(774): n is a, c, g, or t
  misc_feature (779)..(780): n is a, c, g, or t
  misc_feature (782)..(782): n is a, c, g, or t
  misc_feature (791)..(791): n is a, c, g, or t
  misc_feature (798)..(798): n is a, c, g, or t
  misc_feature (807)..(807): n is a, c, g, or t
  misc_feature (811)..(812): n is a, c, g, or t
  misc_feature (817)..(817): n is a, c, g, or t
  misc_feature (820)..(820): n is a, c, g, or t
  misc_feature (827)..(827): n is a, c, g, or t
  misc_feature (832)..(832): n is a, c, g, or t
cggttggacgacgtcgtagaggatcccccactatgttgattgttgccgctggtgatgacaaganagggattgtcgatcagtcacaacaagcataccaagaagcttttgaaatcagcaaaaaggaaatgcaaccaacacatcctatcagactgggtctggcccttaacttctctgtgttctattatgagattctgaactccccagagaaagcctgctctcttgcaaagacagcttttgatgaagccattgctgaacttgatacattaagtgaagagtcatacaaagacagcacgctaataatgcaattactgagagacaacttgacattgtggacatcggatacccaaggagacgaagctgaagcaggagaaggaggggaaaattaaccggccttccaacttttgtctgcctcattctaaaatttacacagtagaccatttgtcatccatgctgtcccacaaatagttttttgtttacgatttatgacaggtttatgttacttctatttgaatttctatatttcccatgtggtttttatgtttaatattaggggagtagagccagttaacatttagggagttatctgttttcatcttgaggtggccaatatggggatgtggaatttttatacaagttataagtgtttggcatagtacttttggtacattgtggcttcaaaagggccagtgtaaaactgcttccatgtctaagcaaagaaaactgcctacatactggtttgtcctggcggggaacananggtcnttggtccgcncnaggtnnantggggactnaggttgngcctcaagngggnnatttnccnggttccnttacngtttccggaccccttgcccgttaccggacaggctttacagtgccctctggatgggacccccacgggcgcggctaggcactgttagtgccaacaaagaaggtt

SEQ ID NO: 310666 - DNA, 492 bp, Homo sapiens
cgcatcgacgccccggcgccgatcggtgctcgctcccccgtcctgcccccgggggtgggtagggcgcccacacgcgagatccctggggatctccctgtcgccggctcccgaaggtggacgaggcatggccggggcgccgccggccgcgatccatccccaccctcgcctgggacctagagctgaatttcctgggctccgcggtgggaggaaggacttgaattttcctggtgggggtgggggatgggtctgactttttttgctccttgtgaacgggcgggggaggtgtggacgggggctgcaagtccaggtcggggtagagaacagggtggtgagcccgcagtcggctcccgtgcttgatggactagaactggagggtccctgcgctcggtttggggacgcatatcctgctttgggggcgggtgagcctgagcatagccgctggtggcccgctcggctgggtgtggctctcgtcccctcccccacctgcagctg

SEQ ID NO: 310667 - DNA, 1010 bp, Homo sapiens
gattctcctgcctcggcctcctgagtagctgggattacaggcatgcaccaccacgcccagctgatttttgtattttagtagagatggggtttctccatgttggtaaggctggtcttgaactcctgacctcagatgatccacccgcctcggcctccaaagtgggattgattacaggtgtgagccaccgtgcccagcgttagatgttcttaaaacactgattccttctaggattattttgctagcattcatgattcggagggagacaattctctgaacctgatttaatttggcagtttttattctcacttcctgctagccctttcacccagttgattaaaaaaaaaaagttttagaacagaacagatggggctttctatcagcattgtttagtgtaggtatcttttgttttggggtaaatatcagggagcagctactcttttaacaggaattatattaataaagttttaggctggctttaacagttcttgaacatcaggaacatcttgcttggccagatttcttgttgattaaaagtgcagatttgccatctattaatggaaaatgcgttaagtgattaggcacaagcctgcttatagatgaccttatttatagaacatatgttcacagcttaaaatcttattctgttaggccacattgcatagaaaggtaataatttaaagtcaaaatgtctaaaagacttaataaattagttcttgacacctcctaatcattagcatttctggtggagcacttttctaattggttgaaagcaagtgaggaaattgcaaatcaaagaatggaagccactccggccacaagggggagtaagagattaaatctatgggcccctaatgtgtgacagattatgggcttcttgcatgatttctttttaaaattttaagagatctaggatttatacaaggcccagtgtctctacagaataaaaattataggaaaattatctctgcataagagaattgtacaagaccagaaatttgaactacactatg

SEQ ID NO: 310668 - DNA, 939 bp, Homo sapiens
catgacaaaggaggagagtcggggacttgagccgtggctccgacttgggcggagcctggaggggggtggttgcgatacgcggaccggagaatttgcactttaaagtccgggtctgcccgttttcgtttcacagtaaccgacgtctcaagtcaggtaagggttaaatgggtgcggtgagtcctgcccgcagtgtagaggcgaggccttggagcactcgttactgtgtgagaaaccttatccacttcctcttgtaccgaagtgattggggagagaatcctttgtactggcttaaatcattttttgttagaagcagaaataaccagagagcgtttctgagatcctaagggaaaaatcagtaatttagagacctgacgaaaataatgccgtcataaaggttaaatagtttacgtattgagccagtaccttgcatccaaagtggttaattatttgtttaaaatgtggcgacctgttctctcatttggttaaaaaaatattgtgggatttccctgggaaggtaaaagatgattaatattcgggagccagctgccaaggtggactcttctgttcaccttctaacttaaaagtgcacttcattcagggtgtgtattttcctctgaagtcatttattctgtggtgtcactgtgtggattagtatctttgtgctgttcggcaacttgcaaaagggtatctttccagaaaaatgtagctgaggtaaatcgaaaaggtccaggaaactaaaatgcgagggaaagagaattagatgggtagtcatggtaaaggacagcttgagtggtaacatccaattacattatgatggctagaagcaaaatgcagcacttctgcatttcaactggagcgatgacattggaaacacttataaattaagtacttccaatgtgatatattctagtactcacagtaagagttgaagtgtcatga

SEQ ID NO: 310669 - DNA, 2712 bp, Homo sapiens
gatctagagatccccgtgtatatcgatgccactaaaaaacagcagatggctcgagaatacagagagaaaattgagacggagctaagagatatctgcaatgatgtactgtctcttttggaaaagttcttgatccccaatgcttcacaagcagagagcaaagtcttctatttgaaaatgaaaggagattactaccgttacttggctgaggttgccgctggtgatgacaagaaagggattgtcgatcagtcacaacaagcataccaagaagcttttgaaatcagcaaaaaggaaatgcaaccaacacatcctatcagactgggtctggcccttaacttctctgtgttctattatgagattctgaactccccagagaaagcctgctctcttgcaaagacagcttttgatgaagccattgctgaacttgatacattaagtgaagagtcatacaaagacagcacgctaataatgcaattactgagagacaacttgacattgtggacatcggatacccaaggagacgaagctgaagcaggagaaggaggggaaaattaaccggccttccaacttttgtctgcctcattctaaaatttacacagtagaccatttgtcatccatgctgtcccacaaatagttttttgtttacgatttatgacaggtttatgttacttctatttgaatttctatatttcccatgtggtttttatgtttaatattaggggagtagagccagttaacatttagggagttatctgttttcatcttgaggtggccaatatggggatgtggaatttttatacaagttataagtgtttggcatagtacttttggtacattgtggcttcaaaagggccagtgtaaaactgcttccatgtctaagcaaagaaaactgcctacatactggtttgtcctggcggggaataaaagggatcattggttccagtcacaggtgtagtaattgtgggtactttaaggtttggagcacttacaaggctgtggtagaatcataccccatggataccacatattaaaccatgtatatctgtggaatactcaatgtgtacacctttgactacagctgcagaagtgttcctttagacaaagttgtgacccattttactctggataagggcagaaacggttcacattccattatttgtaaagttacctgctgttagctttcattatttttgctacactcattttatttgtatttaaatgttttaggcaacctaagaacaaatgtaaaagtaaagatgcaggaaaaatgaattgcttggtattcattacttcatgtatatcaagcacagcagtaaaacaaaaacccatgtatttaacttttttttaggatttttgcttttgtgatttttttttttttttttgatacttgcctaacatgcatgtgctgtaaaaatagttaacagggaaataacttgagatgatggctagctttgtttaatgtcttatgaaattttcatgaacaatccaagcataattgttaagaacacgtgtattaaattcatgtaagtggaataaaagttttatgaatggacttttcaactactttctctacagcttttcatgtaaattagtcttggttctgaaacttctctaaaggaaattgtacattttttgaaatttattccttattccctcttggcagctaatgggctcttaccaagtttaaacacaaaatttatcataacaaaaatactactaatataactactgtttccatgtcccatgatcccctctcttcctccccaccctgaaaaaaatgagttcctattttttctgggagagggggggattgattagaaaaaaatgtagtgtgttccatttaaaattttggcatatggcattttctaacttaggaagccacaatgttcttggcccatcatgacattgggtagcattaactgtaagttttgtgcttccaaatcactttttggtttttaagaatttcttgatactcttatagcctgccttcaattttgatcctttattctttctatttgtcaggtgcacaagattaccttcctgttttagccttctgtcttgtcaccaaccattcttacttggtggccatgtacttggaaaaaggccgcatgatctttctggctccactcagtgtctaaggcaccctgcttcctttgcttgcatcccacagactatttccctcatcctatttactgcagcaaatctctccttagttgatgagactgtgtttatctccctttaaaaccctacctatcctgaatggtctgtcattgtctgcctttaaaatccttcctctttcttcctcctctattctctaaataatgatggggctaagttatacccaaagctcactttacaaaatatttcctcagtactttgcagaaaacaccaaacaaaaatgccattttaaaaaaggtgtattttttcttttagaatgtaagctcctcaagagcagggacaatgttttctgtatgttctattgtgcctagtacactgtaaatgctcaataaatattgatgatgggaggcagtgagtcttgatgataagggtgagaaactgaaatcccaaacactgttttgttgcttgttttattatgacctcagattaaattgggaaatattggcccttttgaataattgtcccaaatattacattcaaataaaagtgcaatggagaccttggggtctttatttccaggagaaaagataccttctg

SEQ ID NO: 310670 - DNA, 2613 bp, Homo sapiens
cttctattgtgaaactgaaaggagacttgctctctgcttgtgaagcatggggatagcaaagtcttctatttgaaaatgaaaggagattactaccgttacttggctgaggttgccgctggtgatgacaagaaagggattgtcgatcagtcacaacaagcataccaagaagcttttgaaatcagcaaaaaggaaatgcaaccaacacatcctatcagactgggtctggcccttaacttctctgtgttctattatgagattctgaactccccagagaaagcctgctctcttgcaaagacagcttttgatgaagccattgctgaacttgatacattaagtgaagagtcatacaaagacagcacgctaataatgcaattactgagagacaacttgacattgtggacatcggatacccaaggagacgaagctgaagcaggagaaggaggggaaaattaaccggccttccaacttttgtctgcctcattctaaaatttacacagtagaccatttgtcatccatgctgtcccacaaatagttttttgtttacgatttatgacaggtttatgttacttctatttgaatttctatatttcccatgtggtttttatgtttaatattaggggagtagagccagttaacatttagggagttatctgttttcatcttgaggtggccaatatggggatgtggaatttttatacaagttataagtgtttggcatagtacttttggtacattgtggcttcaaaagggccagtgtaaaactgcttccatgtctaagcaaagaaaactgcctacatactggtttgtcctggcggggaataaaagggatcattggttccagtcacaggtgtagtaattgtgggtactttaaggtttggagcacttacaaggctgtggtagaatcataccccatggataccacatattaaaccatgtatatctgtggaatactcaatgtgtacacctttgactacagctgcagaagtgttcctttagacaaagttgtgacccattttactctggataagggcagaaacggttcacattccattatttgtaaagttacctgctgttagctttcattatttttgctacactcattttatttgtatttaaatgttttaggcaacctaagaacaaatgtaaaagtaaagatgcaggaaaaatgaattgcttggtattcattacttcatgtatatcaagcacagcagtaaaacaaaaacccatgtatttaacttttttttaggatttttgcttttgtgatttttttttttttttttgatacttgcctaacatgcatgtgctgtaaaaatagttaacagggaaataacttgagatgatggctagctttgtttaatgtcttatgaaattttcatgaacaatccaagcataattgttaagaacacgtgtattaaattcatgtaagtggaataaaagttttatgaatggacttttcaactactttctctacagcttttcatgtaaattagtcttggttctgaaacttctctaaaggaaattgtacattttttgaaatttattccttattccctcttggcagctaatgggctcttaccaagtttaaacacaaaatttatcataacaaaaatactactaatataactactgtttccatgtcccatgatcccctctcttcctccccaccctgaaaaaaatgagttcctattttttctgggagagggggggattgattagaaaaaaatgtagtgtgttccatttaaaattttggcatatggcattttctaacttaggaagccacaatgttcttggcccatcatgacattgggtagcattaactgtaagttttgtgcttccaaatcactttttggtttttaagaatttcttgatactcttatagcctgccttcaattttgatcctttattctttctatttgtcaggtgcacaagattaccttcctgttttagccttctgtcttgtcaccaaccattcttacttggtggccatgtacttggaaaaaggccgcatgatctttctggctccactcagtgtctaaggcaccctgcttcctttgcttgcatcccacagactatttccctcatcctatttactgcagcaaatctctccttagttgatgagactgtgtttatctccctttaaaaccctacctatcctgaatggtctgtcattgtctgcctttaaaatccttcctctttcttcctcctctattctctaaataatgatggggctaagttatacccaaagctcactttacaaaatatttcctcagtactttgcagaaaacaccaaacaaaaatgccattttaaaaaaggtgtattttttcttttagaatgtaagctcctcaagagcagggacaatgttttctgtatgttctattgtgcctagtacactgtaaatgctcaataaatattgatgatgggaggcagtgagtcttgatgataagggtgagaaactgaaatcccaaacactgttttgttgcttgttttattatgacctcagattaaattgggaaatattggcccttttgaataattgtcccaaatattacattcaaataaaagtgcaatggagaccttggggtctttatttccaggagaaaagataccttctg

SEQ ID NO: 310671 - DNA, 2671 bp, Homo sapiens
gatctagagatccccgtgtatatcgatgccactaaaaaacagcagatggctcgagaatacagagagaaaattgagacggagctaagagatatctgcaatgatgtactgtctcttttggaaaagttcttgatccccaatgcttcacaagcagagagcaaagtcttctatttgaaaatgaaaggagattactaccgttacttggctgaggttgccgctggtgatgacaagaaagggattgtcgatcagtcacaacaagcataccaagaagcttttgaaatcagcaaaaaggaaatgcaaccaacacatcctatcagactgggtctggcccttaacttctctgtgttctattatgagattctgaactccccagagaaagcctgctctcttgcaaagacagcttttgatgaagccattgctgaacttgatacattaagtgaagagtcatacaaagacagcacgctaataatgcaattactgagagacaacttgacattgtggacatcggatacccaaggagacgaagctgaagcaggagaaggaggggaaaattaaccggccttccaacttttgtctgcctcattctaaaatttacacagtagaccatttgtcatccatgctgtcccacaaatagttttttgtttacgatttatgacaggtttatgttacttctatttgaatttctatatttcccatgtggtttttatgtttaatattaggggagtagagccagttaacatttagggagttatctgttttcatcttgaggtggccaatatggggatgtggaatttttatacaagttataagtgtttggcatagtacttttggtacattgtggcttcaaaagggccagtgtaaaactgcttccatgtctaagcaaagaaaactgcctacatactggtttgtcctggcggggaataaaagggatcattggttccagtcacaggtgtagtaattgtgggtactttaaggtttggagcacttacaaggctgtggtagaatcataccccatggataccacatattaaaccatgtatatctgtggaatactcaatgtgtacacctttgactacagctgcagaagtgttcctttagacaaagttgtgacccattttactctggataagggcagaaacggttcacattccattatttgtaaagttacctgctgttagctttcattatttttgctacactcattttatttgtatttaaatgttttaggcaacctaagaacaaatgtaaaagtaaagatgcaggaaaaatgaattgcttggtattcattacttcatgtatatcaagcacagcagtaaaacaaaaacccatgtatttaacttttttttaggatttttgcttttgtgatttttttttttttttttgatacttgcctaacatgcatgtgctgtaaaaatagttaacagggaaataacttgagatgatggctagctttgtttaatgtcttatgaaattttcatgaacaatccaagcataattgttaagaacacgtgtattaaattcatgtaagtggaataaaagttttatgaatggacttttcaactactttctctacagcttttcatgtaaattagtcttggttctgaaacttctctaaaggaaattgtacattttttgaaatttattccttattccctcttggcagctaatgggctcttaccaagtttaaacacaaaatttatcataacaaaaatactactaatataactactgtttccatgtcccatgatcccctctcttcctccccaccctgaaaaaaatgagttcctattttttctgggagagggggggattgattagaaaaaaatgtagtgtgttccatttaaaattttggcatatggcattttctaacttaggaagccacaatgttcttggcccatcatgacattgggtagcattaactgtaagttttgtgcttccaaatcactttttggtttttaagaatttcttgatactcttatagcctgccttcaattttgatcctttattctttctatttgtcaggtgcacaagattaccttcctgttttagccttctgtcttgtcaccaaccattcttacttggtggccatgtacttggaaaaaggccgcatgatctttctggctccactcagtgtctaaggcaccctgcttcctttgcttgcatcccacagactatttccctcatcctatttactgcagcaaatctctccttagttgatgagactgtgtttatctccctttaaaaccctacctatcctgaatggtctgtcattgtctgcctttaaaatccttcctctttcttcctcctctattctctaaataatgatggggctaagttatacccaaagctcactttacaaaatatttcctcagtactttgcagaaaacaccaaacaaaaatgccattttaaaaaaggtgtattttttcttttagaatgtaagctcctcaagagcagggacaatgttttctgtatgttctattgtgcctagtacactgtaaatgctcaataaatattgatgatgggaggcagtgagtcttgatgataagggtgagaaactgaaatcccaaacactgttttgttgcttgttttattatgacctcagattaaattgggaaatattggcccttttgaataattgtcccaaatattacattcaaataaaagtgcaatgga

SEQ ID NO: 310672 - DNA, 2523 bp, Homo sapiens
gatctagagatccccgtgtatatcgatgccactaaaaaacagcagatggctcgagaatacagagagaaaattgagacggagctaagagatatctgcaatgatgtactgtctcttttggaaaagttcttgatccccaatgcttcacaagcagagagcaaagtcttctatttgaaaatgaaaggagattactaccgttacttggctgaggttgccgctggtgatgacaagaaagggattgtcgatcagtcacaacaagcataccaagaagcttttgaaatcagcaaaaaggaaatgcaaccaacacatcctatcagactgggtctggcccttaacttctctgtgttctattatgagattctgaactccccagagaaagcctgctctcttgcaaagacagcttttgatgaagccattgctgaacttgatacattaagtgaagagtcatacaaagacagcacgctaataatgcaattactgagagacaacttgacattgtggacatcggatacccaaggagacgaagctgaagcaggagaaggaggggaaaattaaccggccttccaacttttgtctgcctcattctaaaatttacacagtagaccatttgtcatccatgctgtcccacaaatagttttttgtttacgatttatgacaggtttatgttacttctatttgaatttctatatttcccatgtggtttttatgtttaatattaggggagtagagccagttaacatttagggagttatctgttttcatcttgaggtggccaatatggggatgtggaatttttatacaagttataagtgtttggcatagtacttttggtacattgtggcttcaaaagggccagtgtaaaactgcttccatgtctaagcaaagaaaactgcctacatactggtttgtcctggcggggaataaaagggatcattggttccagtcacaggtgtagtaattgtgggtactttaaggtttggagcacttacaaggctgtggtagaatcataccccatggataccacatattaaaccatgtatatctgtggaatactcaatgtgtacacctttgactacagctgcagaagtgttcctttagacaaagttgtgacccattttactctggataagggcagaaacggttcacattccattatttgtaaagttacctgctgttagctttcattatttttgctacactcattttatttgtatttaaatgttttaggcaacctaagaacaaatgtaaaagtaaagatgcaggaaaaatgaattgcttggtattcattacttcatgtatatcaagcacagcagtaaaacaaaaacccatgtatttaacttttttttaggatttttgcttttgtgatttttttttttttttttgatacttgcctaacatgcatgtgctgtaaaaatagttaacagggaaataacttgagatgatggctagctttgtttaatgtcttatgaaattttcatgaacaatccaagcataattgttaagaacacgtgtattaaattcatgtaagtggaataaaagttttatgaatggacttttcaactactttctctacagcttttcatgtaaattagtcttggttctgaaacttctctaaaggaaattgtacattttttgaaatttattccttattccctcttggcagctaatgggctcttaccaagtttaaacacaaaatttatcataacaaaaatactactaatataactactgtttccatgtcccatgatcccctctcttcctccccaccctgaaaaaaatgagttcctattttttctgggagagggggggattgattagaaaaaaatgtagtgtgttccatttaaaattttggcatatggcattttctaacttaggaagccacaatgttcttggcccatcatgacattgggtagcattaactgtaagttttgtgcttccaaatcactttttggtttttaagaatttcttgatactcttatagcctgccttcaattttgatcctttattctttctatttgtcaggtgcacaagattaccttcctgttttagccttctgtcttgtcaccaaccattcttacttggtggccatgtacttggaaaaaggccgcatgatctttctggctccactcagtgtctaaggcaccctgcttcctttgcttgcatcccacagactatttccctcatcctatttactgcagcaaatctctccttagttgatgagactgtgtttatctccctttaaaaccctacctatcctgaatggtctgtcattgtctgcctttaaaatccttcctctttcttcctcctctattctctaaataatgatggggctaagttatacccaaagctcactttacaaaatatttcctcagtactttgcagaaaacaccaaacaaaaatgccattttaaaaaaggtgtattttttcttttagaatgtaagctcctcaagagcagggacaatgttttctgtatgttctattgtgcctagtacactgtaaatgctcaataaatattgatgatgggag

SEQ ID NO: 310673 - DNA, 3099 bp, Homo sapiens
  misc_feature (3099)..(3099): n is a, c, g, or t
gatctagagatccccgtgtatatcgatgccactaaaaaacagcagatggctcgagaatacagagagaaaattgagacggagctaagagatatctgcaatgatgtactgtctcttttggaaaagttcttgatccccaatgcttcacaagcagagagcaaagtcttctatttgaaaatgaaaggagattactaccgttacttggctgaggttgccgctggtgatgacaagaaagggattgtcgatcagtcacaacaagcataccaagaagcttttgaaatcagcaaaaaggaaatgcaaccaacacatcctatcagactgggtctggcccttaacttctctgtgttctattatgagattctgaactccccagagaaagcctgctctcttgcaaagacagcttttgatgaagccattgctgaacttgatacattaagtgaagagtcatacaaagacagcacgctaataatgcaattactgagagacaacttgacattgtggacatcggatacccaaggagacgaagctgaagcaggagaaggaggggaaaattaaccggccttccaacttttgtctgcctcattctaaaatttacacagtagaccatttgtcatccatgctgtcccacaaatagttttttgtttacgatttatgacaggtttatgttacttctatttgaatttctatatttcccatgtggtttttatgtttaatattaggggagtagagccagttaacatttagggagttatctgttttcatcttgaggtggccaatatggggatgtggaatttttatacaagttataagtgtttggcatagtacttttggtacattgtggcttcaaaagggccagtgtaaaactgcttccatgtctaagcaaagaaaactgcctacatactggtttgtcctggcggggaataaaagggatcattggttccagtcacaggtgtagtaattgtgggtactttaaggtttggagcacttacaaggctgtggtagaatcataccccatggataccacatattaaaccatgtatatctgtggaatactcaatgtgtacacctttgactacagctgcagaagtgttcctttagacaaagttgtgacccattttactctggataagggcagaaacggttcacattccattatttgtaaagttacctgctgttagctttcattatttttgctacactcattttatttgtatttaaatgttttaggcaacctaagaacaaatgtaaaagtaaagatgcaggaaaaatgaattgcttggtattcattacttcatgtatatcaagcacagcagtaaaacaaaaacccatgtatttaacttttttttaggatttttgcttttgtgatttttttttttttttttgatacttgcctaacatgcatgtgctgtaaaaatagttaacagggaaataacttgagatgatggctagctttgtttaatgtcttatgaaattttcatgaacaatccaagcataattgttaagaacacgtgtattaaattcatgtaagtggaataaaagttttatgaatggacttttcaactactttctctacagcttttcatgtaaattagtcttggttctgaaacttctctaaaggaaattgtacattttttgaaatttattccttattccctcttggcagctaatgggctcttaccaagtttaaacacaaaatttatcataacaaaaatactactaatataactactgtttccatgtcccatgatcccctctcttcctccccaccctgaaaaaaatgagttcctattttttctgggagagggggggattgattagaaaaaaatgtagtgtgttccatttaaaattttggcatatggcattttctaacttaggaagccacaatgttcttggcccatcatgacattgggtagcattaactgtaagttttgtgcttccaaatcactttttggtttttaagaatttcttgatactcttatagcctgccttcaattttgatcctttattctttctatttgtcaggtgcacaagattaccttcctgttttagccttctgtcttgtcaccaaccattcttacttggtggccatgtacttggaaaaaggccgcatgatctttctggctccactcagtgtctaaggcaccctgcttcctttgcttgcatcccacagactatttccctcatcctatttactgcagcaaatctctccttagttgatgagactgtgtttatctccctttaaaaccctacctatcctgaatggtctgtcattgtctgcctttaaaatccttcctctttcttcctcctctattctctaaataatgatggggctaagttatacccaaagctcactttacaaaatatttcctcagtactttgcagaaaacaccaaacaaaaatgccattttaaaaaaggtgtattttttcttttagaatgtaagctcctcaagagcagggacaatgttttctgtatgttctattgtgcctagtacactgtaaatgctcaataaatattgatgatgggaggcagtgagtcttgatgataagggtgagaaactgaaatcccaaacactgttttgttgcttgttttattatgacctcagattaaattgggaaatattggcccttttgaataattgtcccaaatattacattcaaataaaagtgcaatggaaaaaaagacaagaaaacaagaaaacgacacacacacacttgtcgccagcaacagaccacacaaacagctcagagaccaatcggttgggcccgcggcacagaggaatcgtgacactgggcaagaggagacaaagagaccggacagaacacggggagaccacacaaaaaaaccggggggaccagcggtagacaaccccacagggggtcagcaggcaacggagcgccacacgagccagaggctaaatacgcccctgcctgctgagaggaccaagcacaccgacgagaagacaaagcagcacaccgcgcagcagcacacacgacacgagcactgaaccaccgacgagacgaacaaagaaccagcacggacaagcagcaagcgaccacagacgaacaaacgcagaactagaagcacagacgcaccacagagan

SEQ ID NO: 310674 - DNA, 2724 bp, Homo sapiens
gatctagagatccccgtgtatatcgatgccactaaaaaacagcagatggctcgagaatacagagagaaaattgagacggagctaagagatatctgcaatgatgtactgtctcttttggaaaagttcttgatccccaatgcttcacaagcagagagcaaagtcttctatttgaaaatgaaaggagattactaccgttacttggctgaggttgccgctggtgatgacaagaaagggattgtcgatcagtcacaacaagcataccaagaagcttttgaaatcagcaaaaaggaaatgcaaccaacacatcctatcagactgggtctggcccttaacttctctgtgttctattatgagattctgaactccccagagaaagcctgctctcttgcaaagacagcttttgatgaagccattgctgaacttgatacattaagtgaagagtcatacaaagacagcacgctaataatgcaattactgagagacaacttgacattgtggacatcggatacccaaggagacgaagctgaagcaggagaaggaggggaaaattaaccggccttccaacttttgtctgcctcattctaaaatttacacagtagaccatttgtcatccatgctgtcccacaaatagttttttgtttacgatttatgacaggtttatgttacttctatttgaatttctatatttcccatgtggtttttatgtttaatattaggggagtagagccagttaacatttagggagttatctgttttcatcttgaggtggccaatatggggatgtggaatttttatacaagttataagtgtttggcatagtacttttggtacattgtggcttcaaaagggccagtgtaaaactgcttccatgtctaagcaaagaaaactgcctacatactggtttgtcctggcggggaataaaagggatcattggttccagtcacaggtgtagtaattgtgggtactttaaggtttggagcacttacaaggctgtggtagaatcataccccatggataccacatattaaaccatgtatatctgtggaatactcaatgtgtacacctttgactacagctgcagaagtgttcctttagacaaagttgtgacccattttactctggataagggcagaaacggttcacattccattatttgtaaagttacctgctgttagctttcattatttttgctacactcattttatttgtatttaaatgttttaggcaacctaagaacaaatgtaaaagtaaagatgcaggaaaaatgaattgcttggtattcattacttcatgtatatcaagcacagcagtaaaacaaaaacccatgtatttaacttttttttaggatttttgcttttgtgatttttttttttttttttgatacttgcctaacatgcatgtgctgtaaaaatagttaacagggaaataacttgagatgatggctagctttgtttaatgtcttatgaaattttcatgaacaatccaagcataattgttaagaacacgtgtattaaattcatgtaagtggaataaaagttttatgaatggacttttcaactactttctctacagcttttcatgtaaattagtcttggttctgaaacttctctaaaggaaattgtacattttttgaaatttattccttattccctcttggcagctaatgggctcttaccaagtttaaacacaaaatttatcataacaaaaatactactaatataactactgtttccatgtcccatgatcccctctcttcctccccaccctgaaaaaaatgagttcctattttttctgggagagggggggattgattagaaaaaaatgtagtgtgttccatttaaaattttggcatatggcattttctaacttaggaagccacaatgttcttggcccatcatgacattgggtagcattaactgtaagttttgtgcttccaaatcactttttggtttttaagaatttcttgatactcttatagcctgccttcaattttgatcctttattctttctatttgtcaggtgcacaagattaccttcctgttttagccttctgtcttgtcaccaaccattcttacttggtggccatgtacttggaaaaaggccgcatgatctttctggctccactcagtgtctaaggcaccctgcttcctttgcttgcatcccacagactatttccctcatcctatttactgcagcaaatctctccttagttgatgagactgtgtttatctccctttaaaaccctacctatcctgaatggtctgtcattgtctgcctttaaaatccttcctctttcttcctcctctattctctaaataatgatggggctaagttatacccaaagctcactttacaaaatatttcctcagtactttgcagaaaacaccaaacaaaaatgccattttaaaaaaggtgtattttttcttttagaatgtaagctcctcaagagcagggacaatgttttctgtatgttctattgtgcctagtacactgtaaatgctcaataaatattgatgatgggaggcagtgagtcttgatgataagggtgagaaactgaaatcccaaacactgttttgttgcttgttttattatgacctcagattaaattgggaaatattggcccttttgaataattgtcccaaatattacattcaaataaaagtgcaatggaaaaaaaaaaagtcgacgcggccgcgaatttagtagtagtagtaggcggccgct

SEQ ID NO: 310675 - DNA, 2777 bp, Homo sapiens
gatctagagatccccgtgtatatcgatgccactaaaaaacagcagatggctcgagaatacagagagaaaattgagacggagctaagagatatctgcaatgatgtactgtctcttttggaaaagttcttgatccccaatgcttcacaagcagagagcaaagtcttctatttgaaaatgaaaggagattactaccgttacttggctgaggttgccgctggtgatgacaagaaagggattgtcgatcagtcacaacaagcataccaagaagcttttgaaatcagcaaaaaggaaatgcaaccaacacatcctatcagactgggtctggcccttaacttctctgtgttctattatgagattctgaactccccagagaaagcctgctctcttgcaaagacagcttttgatgaagccattgctgaacttgatacattaagtgaagagtcatacaaagacagcacgctaataatgcaattactgagagacaacttgacattgtggacatcggatacccaaggagacgaagctgaagcaggagaaggaggggaaaattaaccggccttccaacttttgtctgcctcattctaaaatttacacagtagaccatttgtcatccatgctgtcccacaaatagttttttgtttacgatttatgacaggtttatgttacttctatttgaatttctatatttcccatgtggtttttatgtttaatattaggggagtagagccagttaacatttagggagttatctgttttcatcttgaggtggccaatatggggatgtggaatttttatacaagttataagtgtttggcatagtacttttggtacattgtggcttcaaaagggccagtgtaaaactgcttccatgtctaagcaaagaaaactgcctacatactggtttgtcctggcggggaataaaagggatcattggttccagtcacaggtgtagtaattgtgggtactttaaggtttggagcacttacaaggctgtggtagaatcataccccatggataccacatattaaaccatgtatatctgtggaatactcaatgtgtacacctttgactacagctgcagaagtgttcctttagacaaagttgtgacccattttactctggataagggcagaaacggttcacattccattatttgtaaagttacctgctgttagctttcattatttttgctacactcattttatttgtatttaaatgttttaggcaacctaagaacaaatgtaaaagtaaagatgcaggaaaaatgaattgcttggtattcattacttcatgtatatcaagcacagcagtaaaacaaaaacccatgtatttaacttttttttaggatttttgcttttgtgatttttttttttttttttgatacttgcctaacatgcatgtgctgtaaaaatagttaacagggaaataacttgagatgatggctagctttgtttaatgtcttatgaaattttcatgaacaatccaagcataattgttaagaacacgtgtattaaattcatgtaagtggaataaaagttttatgaatggacttttcaactactttctctacagcttttcatgtaaattagtcttggttctgaaacttctctaaaggaaattgtacattttttgaaatttattccttattccctcttggcagctaatgggctcttaccaagtttaaacacaaaatttatcataacaaaaatactactaatataactactgtttccatgtcccatgatcccctctcttcctccccaccctgaaaaaaatgagttcctattttttctgggagagggggggattgattagaaaaaaatgtagtgtgttccatttaaaattttggcatatggcattttctaacttaggaagccacaatgttcttggcccatcatgacattgggtagcattaactgtaagttttgtgcttccaaatcactttttggtttttaagaatttcttgatactcttatagcctgccttcaattttgatcctttattctttctatttgtcaggtgcacaagattaccttcctgttttagccttctgtcttgtcaccaaccattcttacttggtggccatgtacttggaaaaaggccgcatgatctttctggctccactcagtgtctaaggcaccctgcttcctttgcttgcatcccacagactatttccctcatcctatttactgcagcaaatctctccttagttgatgagactgtgtttatctccctttaaaaccctacctatcctgaatggtctgtcattgtctgcctttaaaatccttcctctttcttcctcctctattctctaaataatgatggggctaagttatacccaaagctcactttacaaaatatttcctcagtactttgcagaaaacaccaaacaaaaatgccattttaaaaaaggtgtattttttcttttagaatgtaagctcctcaagagcagggacaatgttttctgtatgttctattgtgcctagtacactgtaaatgctcaataaatattgatgatgggaggcagtgagtcttgatgataagggtgagaaactgaaatcccaaacactgttttgttgcttgttttattatgacctcagattaaattgggaaatattggcccttttgaataattgtcccaaatattacattcaaataaaagtgcaatggaacaacaaacacacaacaacacaacaaacaacacaacacaggccggccccccccccccccccccccccccccccccccccaccccccccgccccctcctcaccacgc

SEQ ID NO: 310676 - DNA, 2701 bp, Homo sapiens
gatctagagatccccgtgtatatcgatgccactaaaaaacagcagatggctcgagaatacagagagaaaattgagacggagctaagagatatctgcaatgatgtactgtctcttttggaaaagttcttgatccccaatgcttcacaagcagagagcaaagtcttctatttgaaaatgaaaggagattactaccgttacttggctgaggttgccgctggtgatgacaagaaagggattgtcgatcagtcacaacaagcataccaagaagcttttgaaatcagcaaaaaggaaatgcaaccaacacatcctatcagactgggtctggcccttaacttctctgtgttctattatgagattctgaactccccagagaaagcctgctctcttgcaaagacagcttttgatgaagccattgctgaacttgatacattaagtgaagagtcatacaaagacagcacgctaataatgcaattactgagagacaacttgacattgtggacatcggatacccaaggagacgaagctgaagcaggagaaggaggggaaaattaaccggccttccaacttttgtctgcctcattctaaaatttacacagtagaccatttgtcatccatgctgtcccacaaatagttttttgtttacgatttatgacaggtttatgttacttctatttgaatttctatatttcccatgtggtttttatgtttaatattaggggagtagagccagttaacatttagggagttatctgttttcatcttgaggtggccaatatggggatgtggaatttttatacaagttataagtgtttggcatagtacttttggtacattgtggcttcaaaagggccagtgtaaaactgcttccatgtctaagcaaagaaaactgcctacatactggtttgtcctggcggggaataaaagggatcattggttccagtcacaggtgtagtaattgtgggtactttaaggtttggagcacttacaaggctgtggtagaatcataccccatggataccacatattaaaccatgtatatctgtggaatactcaatgtgtacacctttgactacagctgcagaagtgttcctttagacaaagttgtgacccattttactctggataagggcagaaacggttcacattccattatttgtaaagttacctgctgttagctttcattatttttgctacactcattttatttgtatttaaatgttttaggcaacctaagaacaaatgtaaaagtaaagatgcaggaaaaatgaattgcttggtattcattacttcatgtatatcaagcacagcagtaaaacaaaaacccatgtatttaacttttttttaggatttttgcttttgtgatttttttttttttttttgatacttgcctaacatgcatgtgctgtaaaaatagttaacagggaaataacttgagatgatggctagctttgtttaatgtcttatgaaattttcatgaacaatccaagcataattgttaagaacacgtgtattaaattcatgtaagtggaataaaagttttatgaatggacttttcaactactttctctacagcttttcatgtaaattagtcttggttctgaaacttctctaaaggaaattgtacattttttgaaatttattccttattccctcttggcagctaatgggctcttaccaagtttaaacacaaaatttatcataacaaaaatactactaatataactactgtttccatgtcccatgatcccctctcttcctccccaccctgaaaaaaatgagttcctattttttctgggagagggggggattgattagaaaaaaatgtagtgtgttccatttaaaattttggcatatggcattttctaacttaggaagccacaatgttcttggcccatcatgacattgggtagcattaactgtaagttttgtgcttccaaatcactttttggtttttaagaatttcttgatactcttatagcctgccttcaattttgatcctttattctttctatttgtcaggtgcacaagattaccttcctgttttagccttctgtcttgtcaccaaccattcttacttggtggccatgtacttggaaaaaggccgcatgatctttctggctccactcagtgtctaaggcaccctgcttcctttgcttgcatcccacagactatttccctcatcctatttactgcagcaaatctctccttagttgatgagactgtgtttatctccctttaaaaccctacctatcctgaatggtctgtcattgtctgcctttaaaatccttcctctttcttcctcctctattctctaaataatgatggggctaagttatacccaaagctcactttacaaaatatttcctcagtactttgcagaaaacaccaaacaaaaatgccattttaaaaaaggtgtattttttcttttagaatgtaagctcctcaagagcagggacaatgttttctgtatgttctattgtgcctagtacactgtaaatgctcaataaatattgatgatgggaggcagtgagtcttgatgataagggtgagaaactgaaatcccaaacactgttttgttgcttgttttattatgacctcagattaaattgggaaatattggcccttttgaataattgtcccaaatattacattcaaataaaagtgcaatggaaaaataaaaaaacatagccgaataaacaac

SEQ ID NO: 310677 - DNA, 2836 bp, Homo sapiens
gatctagagatccccgtgtatatcgatgccactaaaaaacagcagatggctcgagaatacagagagaaaattgagacggagctaagagatatctgcaatgatgtactgtctcttttggaaaagttcttgatccccaatgcttcacaagcagagagcaaagtcttctatttgaaaatgaaaggagattactaccgttacttggctgaggttgccgctggtgatgacaagaaagggattgtcgatcagtcacaacaagcataccaagaagcttttgaaatcagcaaaaaggaaatgcaaccaacacatcctatcagactgggtctggcccttaacttctctgtgttctattatgagattctgaactccccagagaaagcctgctctcttgcaaagacagcttttgatgaagccattgctgaacttgatacattaagtgaagagtcatacaaagacagcacgctaataatgcaattactgagagacaacttgacattgtggacatcggatacccaaggagacgaagctgaagcaggagaaggaggggaaaattaaccggccttccaacttttgtctgcctcattctaaaatttacacagtagaccatttgtcatccatgctgtcccacaaatagttttttgtttacgatttatgacaggtttatgttacttctatttgaatttctatatttcccatgtggtttttatgtttaatattaggggagtagagccagttaacatttagggagttatctgttttcatcttgaggtggccaatatggggatgtggaatttttatacaagttataagtgtttggcatagtacttttggtacattgtggcttcaaaagggccagtgtaaaactgcttccatgtctaagcaaagaaaactgcctacatactggtttgtcctggcggggaataaaagggatcattggttccagtcacaggtgtagtaattgtgggtactttaaggtttggagcacttacaaggctgtggtagaatcataccccatggataccacatattaaaccatgtatatctgtggaatactcaatgtgtacacctttgactacagctgcagaagtgttcctttagacaaagttgtgacccattttactctggataagggcagaaacggttcacattccattatttgtaaagttacctgctgttagctttcattatttttgctacactcattttatttgtatttaaatgttttaggcaacctaagaacaaatgtaaaagtaaagatgcaggaaaaatgaattgcttggtattcattacttcatgtatatcaagcacagcagtaaaacaaaaacccatgtatttaacttttttttaggatttttgcttttgtgatttttttttttttttttgatacttgcctaacatgcatgtgctgtaaaaatagttaacagggaaataacttgagatgatggctagctttgtttaatgtcttatgaaattttcatgaacaatccaagcataattgttaagaacacgtgtattaaattcatgtaagtggaataaaagttttatgaatggacttttcaactactttctctacagcttttcatgtaaattagtcttggttctgaaacttctctaaaggaaattgtacattttttgaaatttattccttattccctcttggcagctaatgggctcttaccaagtttaaacacaaaatttatcataacaaaaatactactaatataactactgtttccatgtcccatgatcccctctcttcctccccaccctgaaaaaaatgagttcctattttttctgggagagggggggattgattagaaaaaaatgtagtgtgttccatttaaaattttggcatatggcattttctaacttaggaagccacaatgttcttggcccatcatgacattgggtagcattaactgtaagttttgtgcttccaaatcactttttggtttttaagaatttcttgatactcttatagcctgccttcaattttgatcctttattctttctatttgtcaggtgcacaagattaccttcctgttttagccttctgtcttgtcaccaaccattcttacttggtggccatgtacttggaaaaaggccgcatgatctttctggctccactcagtgtctaaggcaccctgcttcctttgcttgcatcccacagactatttccctcatcctatttactgcagcaaatctctccttagttgatgagactgtgtttatctccctttaaaaccctacctatcctgaatggtctgtcattgtctgcctttaaaatccttcctctttcttcctcctctattctctaaataatgatggggctaagttatacccaaagctcactttacaaaatatttcctcagtactttgcagaaaacaccaaacaaaaatgccattttaaaaaaggtgtattttttcttttagaatgtaagctcctcaagagcagggacaatgttttctgtatgttctattgtgcctagtacactgtaaatgctcaataaatattgatgatgggaggcagtgagtcttgatgataagggtgagaaactgaaatcccaaacactgttttgttgcttgttttattatgacctcagattaaattgggaaatattggcccttttgaataattgtcccaaatattacattcaaataaaagtgcaatggacaaaaccacaccacaagacaacaacacaaaacacacactgcgggcgcgcacggagccccagagaaagccactacaaaacaccagcgggcggccccgcggccacagccggaacgcgtaacaacgggcgccacacacgggcccccagggagaccgcgggcacaacaa

SEQ ID NO: 310678 - DNA, 2745 bp, Homo sapiens
  misc_feature (2629)..(2629): n is a, c, g, or t
  misc_feature (2638)..(2639): n is a, c, g, or t
  misc_feature (2643)..(2643): n is a, c, g, or t
  misc_feature (2645)..(2645): n is a, c, g, or t
  misc_feature (2647)..(2647): n is a, c, g, or t
  misc_feature (2650)..(2650): n is a, c, g, or t
  misc_feature (2659)..(2659): n is a, c, g, or t
gatctagagatccccgtgtatatcgatgccactaaaaaacagcagatggctcgagaatacagagagaaaattgagacggagctaagagatatctgcaatgatgtactgtctcttttggaaaagttcttgatccccaatgcttcacaagcagagagcaaagtcttctatttgaaaatgaaaggagattactaccgttacttggctgaggttgccgctggtgatgacaagaaagggattgtcgatcagtcacaacaagcataccaagaagcttttgaaatcagcaaaaaggaaatgcaaccaacacatcctatcagactgggtctggcccttaacttctctgtgttctattatgagattctgaactccccagagaaagcctgctctcttgcaaagacagcttttgatgaagccattgctgaacttgatacattaagtgaagagtcatacaaagacagcacgctaataatgcaattactgagagacaacttgacattgtggacatcggatacccaaggagacgaagctgaagcaggagaaggaggggaaaattaaccggccttccaacttttgtctgcctcattctaaaatttacacagtagaccatttgtcatccatgctgtcccacaaatagttttttgtttacgatttatgacaggtttatgttacttctatttgaatttctatatttcccatgtggtttttatgtttaatattaggggagtagagccagttaacatttagggagttatctgttttcatcttgaggtggccaatatggggatgtggaatttttatacaagttataagtgtttggcatagtacttttggtacattgtggcttcaaaagggccagtgtaaaactgcttccatgtctaagcaaagaaaactgcctacatactggtttgtcctggcggggaataaaagggatcattggttccagtcacaggtgtagtaattgtgggtactttaaggtttggagcacttacaaggctgtggtagaatcataccccatggataccacatattaaaccatgtatatctgtggaatactcaatgtgtacacctttgactacagctgcagaagtgttcctttagacaaagttgtgacccattttactctggataagggcagaaacggttcacattccattatttgtaaagttacctgctgttagctttcattatttttgctacactcattttatttgtatttaaatgttttaggcaacctaagaacaaatgtaaaagtaaagatgcaggaaaaatgaattgcttggtattcattacttcatgtatatcaagcacagcagtaaaacaaaaacccatgtatttaacttttttttaggatttttgcttttgtgatttttttttttttttttgatacttgcctaacatgcatgtgctgtaaaaatagttaacagggaaataacttgagatgatggctagctttgtttaatgtcttatgaaattttcatgaacaatccaagcataattgttaagaacacgtgtattaaattcatgtaagtggaataaaagttttatgaatggacttttcaactactttctctacagcttttcatgtaaattagtcttggttctgaaacttctctaaaggaaattgtacattttttgaaatttattccttattccctcttggcagctaatgggctcttaccaagtttaaacacaaaatttatcataacaaaaatactactaatataactactgtttccatgtcccatgatcccctctcttcctccccaccctgaaaaaaatgagttcctattttttctgggagagggggggattgattagaaaaaaatgtagtgtgttccatttaaaattttggcatatggcattttctaacttaggaagccacaatgttcttggcccatcatgacattgggtagcattaactgtaagttttgtgcttccaaatcactttttggtttttaagaatttcttgatactcttatagcctgccttcaattttgatcctttattctttctatttgtcaggtgcacaagattaccttcctgttttagccttctgtcttgtcaccaaccattcttacttggtggccatgtacttggaaaaaggccgcatgatctttctggctccactcagtgtctaaggcaccctgcttcctttgcttgcatcccacagactatttccctcatcctatttactgcagcaaatctctccttagttgatgagactgtgtttatctccctttaaaaccctacctatcctgaatggtctgtcattgtctgcctttaaaatccttcctctttcttcctcctctattctctaaataatgatggggctaagttatacccaaagctcactttacaaaatatttcctcagtactttgcagaaaacaccaaacaaaaatgccattttaaaaaaggtgtattttttcttttagaatgtaagctcctcaagagcagggacaatgttttctgtatgttctattgtgcctagtacactgtaaatgctcaataaatattgatgatgggaggcagtgagtcttgatgataagggtgagaaactgaaatcccaaacactgttttgttgcttgttttattatgacctcagattaaattgggaaatattggttgatattngccaatttnnttcntnanggnggggaacanaaaaaaaacgacaaaaaaacaaaaaaacaccggcttttggggaaaaagggggttttcctttaggccctgtatttctagcaaaaaag

SEQ ID NO: 310679 - DNA, 2987 bp, Homo sapiens
gatctagagatccccgtgtatatcgatgccactaaaaaacagcagatggctcgagaatacagagagaaaattgagacggagctaagagatatctgcaatgatgtactgtctcttttggaaaagttcttgatccccaatgcttcacaagcagagagcaaagtcttctatttgaaaatgaaaggagattactaccgttacttggctgaggttgccgctggtgatgacaagaaagggattgtcgatcagtcacaacaagcataccaagaagcttttgaaatcagcaaaaaggaaatgcaaccaacacatcctatcagactgggtctggcccttaacttctctgtgttctattatgagattctgaactccccagagaaagcctgctctcttgcaaagacagcttttgatgaagccattgctgaacttgatacattaagtgaagagtcatacaaagacagcacgctaataatgcaattactgagagacaacttgacattgtggacatcggatacccaaggagacgaagctgaagcaggagaaggaggggaaaattaaccggccttccaacttttgtctgcctcattctaaaatttacacagtagaccatttgtcatccatgctgtcccacaaatagttttttgtttacgatttatgacaggtttatgttacttctatttgaatttctatatttcccatgtggtttttatgtttaatattaggggagtagagccagttaacatttagggagttatctgttttcatcttgaggtggccaatatggggatgtggaatttttatacaagttataagtgtttggcatagtacttttggtacattgtggcttcaaaagggccagtgtaaaactgcttccatgtctaagcaaagaaaactgcctacatactggtttgtcctggcggggaataaaagggatcattggttccagtcacaggtgtagtaattgtgggtactttaaggtttggagcacttacaaggctgtggtagaatcataccccatggataccacatattaaaccatgtatatctgtggaatactcaatgtgtacacctttgactacagctgcagaagtgttcctttagacaaagttgtgacccattttactctggataagggcagaaacggttcacattccattatttgtaaagttacctgctgttagctttcattatttttgctacactcattttatttgtatttaaatgttttaggcaacctaagaacaaatgtaaaagtaaagatgcaggaaaaatgaattgcttggtattcattacttcatgtatatcaagcacagcagtaaaacaaaaacccatgtatttaacttttttttaggatttttgcttttgtgatttttttttttttttttgatacttgcctaacatgcatgtgctgtaaaaatagttaacagggaaataacttgagatgatggctagctttgtttaatgtcttatgaaattttcatgaacaatccaagcataattgttaagaacacgtgtattaaattcatgtaagtggaataaaagttttatgaatggacttttcaactactttctctacagcttttcatgtaaattagtcttggttctgaaacttctctaaaggaaattgtacattttttgaaatttattccttattccctcttggcagctaatgggctcttaccaagtttaaacacaaaatttatcataacaaaaatactactaatataactactgtttccatgtcccatgatcccctctcttcctccccaccctgaaaaaaatgagttcctattttttctgggagagggggggattgattagaaaaaaatgtagtgtgttccatttaaaattttggcatatggcattttctaacttaggaagccacaatgttcttggcccatcatgacattgggtagcattaactgtaagttttgtgcttccaaatcactttttggtttttaagaatttcttgatactcttatagcctgccttcaattttgatcctttattctttctatttgtcaggtgcacaagattaccttcctgttttagccttctgtcttgtcaccaaccattcttacttggtggccatgtacttggaaaaaggccgcatgatctttctggctccactcagtgtctaaggcaccctgcttcctttgcttgcatcccacagactatttccctcatcctatttactgcagcaaatctctccttagttgatgagactgtgtttatctccctttaaaaccctacctatcctgaatggtctgtcattgtctgcctttaaaatccttcctctttcttcctcctctattctctaaataatgatggggctaagttatacccaaagctcactttacaaaatatttcctcagtactttgcagaaaacaccaaacaaaaatgccattttaaaaaaggtgtattttttcttttagaatgtaagctcctcaagagcagggacaatgttttctgtatgttctattgtgcctagtacactgtaaatgctcaataaatattgatgatgggaggcagtgagtcttgatgataagggtgagaaactgaaatcccaaacactgttttgttgcttgttttattatgacctcagattaaattgggaaatattggcccttttgaataattgtcccaaatattacattcaaataaaagtgcaatggaaaaaaaaaaaaaaaaaaaaaaaaaaatttttggggccggcttcggcctcgaaaaaagttttttaagaacctatcttgttgggggcgcgcgggcccccagtgtagttaatgtggcacattggtgccctacaagctcgtgtcccaagggagatcccggtcactgggacaggttgttggttttcttcaccaattaaaaaaacgccggggggaacccgggtttttttggaacaaatccagatgggctgtccggaggcatacaagggttctatcaacccgggatcccaggcgactcgatatccaattagcggcctctgtgc

SEQ ID NO: 310680 - DNA, 2650 bp, Homo sapiens
gatctagagatccccgtgtatatcgatgccactaaaaaacagcagatggctcgagaatacagagagaaaattgagacggagctaagagatatctgcaatgatgtactgtctcttttggaaaagttcttgatccccaatgcttcacaagcagagagcaaagtcttctatttgaaaatgaaaggagattactaccgttacttggctgaggttgccgctggtgatgacaagaaagggattgtcgatcagtcacaacaagcataccaagaagcttttgaaatcagcaaaaaggaaatgcaaccaacacatcctatcagactgggtctggcccttaacttctctgtgttctattatgagattctgaactccccagagaaagcctgctctcttgcaaagacagcttttgatgaagccattgctgaacttgatacattaagtgaagagtcatacaaagacagcacgctaataatgcaattactgagagacaacttgacattgtggacatcggatacccaaggagacgaagctgaagcaggagaaggaggggaaaattaaccggccttccaacttttgtctgcctcattctaaaatttacacagtagaccatttgtcatccatgctgtcccacaaatagttttttgtttacgatttatgacaggtttatgttacttctatttgaatttctatatttcccatgtggtttttatgtttaatattaggggagtagagccagttaacatttagggagttatctgttttcatcttgaggtggccaatatggggatgtggaatttttatacaagttataagtgtttggcatagtacttttggtacattgtggcttcaaaagggccagtgtaaaactgcttccatgtctaagcaaagaaaactgcctacatactggtttgtcctggcggggaataaaagggatcattggttccagtcacaggtgtagtaattgtgggtactttaaggtttggagcacttacaaggctgtggtagaatcataccccatggataccacatattaaaccatgtatatctgtggaatactcaatgtgtacacctttgactacagctgcagaagtgttcctttagacaaagttgtgacccattttactctggataagggcagaaacggttcacattccattatttgtaaagttacctgctgttagctttcattatttttgctacactcattttatttgtatttaaatgttttaggcaacctaagaacaaatgtaaaagtaaagatgcaggaaaaatgaattgcttggtattcattacttcatgtatatcaagcacagcagtaaaacaaaaacccatgtatttaacttttttttaggatttttgcttttgtgatttttttttttttttttgatacttgcctaacatgcatgtgctgtaaaaatagttaacagggaaataacttgagatgatggctagctttgtttaatgtcttatgaaattttcatgaacaatccaagcataattgttaagaacacgtgtattaaattcatgtaagtggaataaaagttttatgaatggacttttcaactactttctctacagcttttcatgtaaattagtcttggttctgaaacttctctaaaggaaattgtacattttttgaaatttattccttattccctcttggcagctaatgggctcttaccaagtttaaacacaaaatttatcataacaaaaatactactaatataactactgtttccatgtcccatgatcccctctcttcctccccaccctgaaaaaaatgagttcctattttttctgggagagggggggattgattagaaaaaaatgtagtgtgttccatttaaaattttggcatatggcattttctaacttaggaagccacaatgttcttggcccatcatgacattgggtagcattaactgtaagttttgtgcttccaaatcactttttggtttttaagaatttcttgatactcttatagcctgccttcaattttgatcctttattctttctatttgtcaggtgcacaagattaccttcctgttttagccttctgtcttgtcaccaaccattcttacttggtggccatgtacttggaaaaaggccgcatgatctttctggctccactcagtgtctaaggcaccctgcttcctttgcttgcatcccacagactatttccctcatcctatttactgcagcaaatctctccttagttgatgagactgtgtttatctccctttaaaaccctacctatcctgaatggtctgtcattgtctgcctttaaaatccttcctctttcttcctcctctattctctaaataatgatggggctaagttatacccaaagctcactttacaaaatatttcctcagtactttgcagaaaacaccaaacaaaaatgccattttaaaaaaggtgtattttttcttttagaatgtaagctcctcaagagcagggacaatgttttctgtatgttctattgtgcctagtacactgtaaatgctcaataaatattgatgatgggaggcagtgagtcttgatgataagggtgagaaactgaaatcccaaacactgttttgttgcttgttttattatgacctcagattaaattgggaaatattggcgctcgtaggatcagactcctggtagagtc

SEQ ID NO: 310681 - DNA, 2447 bp, Homo sapiens
ctgactagaggacccgtgatgttatcctgcaaccaacacatcctatcagactgggtctggcccttaacttctctgtgttctattatgagattctgaactccccagagaaagcctgctctcttgcaaagacagcttttgatgaagccattgctgaacttgatacattaagtgaagagtcatacaaagacagcacgctaataatgcaattactgagagacaacttgacattgtggacatcggatacccaaggagacgaagctgaagcaggagaaggaggggaaaattaaccggccttccaacttttgtctgcctcattctaaaatttacacagtagaccatttgtcatccatgctgtcccacaaatagttttttgtttacgatttatgacaggtttatgttacttctatttgaatttctatatttcccatgtggtttttatgtttaatattaggggagtagagccagttaacatttagggagttatctgttttcatcttgaggtggccaatatggggatgtggaatttttatacaagttataagtgtttggcatagtacttttggtacattgtggcttcaaaagggccagtgtaaaactgcttccatgtctaagcaaagaaaactgcctacatactggtttgtcctggcggggaataaaagggatcattggttccagtcacaggtgtagtaattgtgggtactttaaggtttggagcacttacaaggctgtggtagaatcataccccatggataccacatattaaaccatgtatatctgtggaatactcaatgtgtacacctttgactacagctgcagaagtgttcctttagacaaagttgtgacccattttactctggataagggcagaaacggttcacattccattatttgtaaagttacctgctgttagctttcattatttttgctacactcattttatttgtatttaaatgttttaggcaacctaagaacaaatgtaaaagtaaagatgcaggaaaaatgaattgcttggtattcattacttcatgtatatcaagcacagcagtaaaacaaaaacccatgtatttaacttttttttaggatttttgcttttgtgatttttttttttttttttgatacttgcctaacatgcatgtgctgtaaaaatagttaacagggaaataacttgagatgatggctagctttgtttaatgtcttatgaaattttcatgaacaatccaagcataattgttaagaacacgtgtattaaattcatgtaagtggaataaaagttttatgaatggacttttcaactactttctctacagcttttcatgtaaattagtcttggttctgaaacttctctaaaggaaattgtacattttttgaaatttattccttattccctcttggcagctaatgggctcttaccaagtttaaacacaaaatttatcataacaaaaatactactaatataactactgtttccatgtcccatgatcccctctcttcctccccaccctgaaaaaaatgagttcctattttttctgggagagggggggattgattagaaaaaaatgtagtgtgttccatttaaaattttggcatatggcattttctaacttaggaagccacaatgttcttggcccatcatgacattgggtagcattaactgtaagttttgtgcttccaaatcactttttggtttttaagaatttcttgatactcttatagcctgccttcaattttgatcctttattctttctatttgtcaggtgcacaagattaccttcctgttttagccttctgtcttgtcaccaaccattcttacttggtggccatgtacttggaaaaaggccgcatgatctttctggctccactcagtgtctaaggcaccctgcttcctttgcttgcatcccacagactatttccctcatcctatttactgcagcaaatctctccttagttgatgagactgtgtttatctccctttaaaaccctacctatcctgaatggtctgtcattgtctgcctttaaaatccttcctctttcttcctcctctattctctaaataatgatggggctaagttatacccaaagctcactttacaaaatatttcctcagtactttgcagaaaacaccaaacaaaaatgccattttaaaaaaggtgtattttttcttttagaatgtaagctcctcaagagcagggacaatgttttctgtatgttctattgtgcctagtacactgtaaatgctcaataaatattgatgatgggaggcagtgagtcttgatgataagggtgagaaactgaaatcccaaacactgttttgttgcttgttttattatgacctcagattaaattgggaaatattggcccttttgaataattgtcccaaatattacattcaaataaaagtgcaatggagaccttggggtctttatttccaggagaaaagataccttctg

SEQ ID NO: 310682 - DNA, 3105 bp, Homo sapiens
gatctagagatccccgtgtatatcgatgccactaaaaaacagcagatggctcgagaatacagagagaaaattgagacggagctaagagatatctgcaatgatgtactgtctcttttggaaaagttcttgatccccaatgcttcacaagcagagagcaaagtcttctatttgaaaatgaaaggagattactaccgttacttggctgaggttgccgctggtgatgacaagaaagggattgtcgatcagtcacaacaagcataccaagaagcttttgaaatcagcaaaaaggaaatgcaaccaacacatcctatcagactgggtctggcccttaacttctctgtgttctattatgagattctgaactccccagagaaagcctgctctcttgcaaagacagcttttgatgaagccattgctgaacttgatacattaagtgaagagtcatacaaagacagcacgctaataatgcaattactgagagacaacttgacattgtggacatcggatacccaaggagacgaagctgaagcaggagaaggaggggaaaattaaccggccttccaacttttgtctgcctcattctaaaatttacacagtagaccatttgtcatccatgctgtcccacaaatagttttttgtttacgatttatgacaggtttatgttacttctatttgaatttctatatttcccatgtggtttttatgtttaatattaggggagtagagccagttaacatttagggagttatctgttttcatcttgaggtggccaatatggggatgtggaatttttatacaagttataagtgtttggcatagtacttttggtacattgtggcttcaaaagggccagtgtaaaactgcttccatgtctaagcaaagaaaactgcctacatactggtttgtcctggcggggaataaaagggatcattggttccagtcacaggtgtagtaattgtgggtactttaaggtttggagcacttacaaggctgtggtagaatcataccccatggataccacatattaaaccatgtatatctgtggaatactcaatgtgtacacctttgactacagctgcagaagtgttcctttagacaaagttgtgacccattttactctggataagggcagaaacggttcacattccattatttgtaaagttacctgctgttagctttcattatttttgctacactcattttatttgtatttaaatgttttaggcaacctaagaacaaatgtaaaagtaaagatgcaggaaaaatgaattgcttggtattcattacttcatgtatatcaagcacagcagtaaaacaaaaacccatgtatttaacttttttttaggatttttgcttttgtgatttttttttttttttttgatacttgcctaacatgcatgtgctgtaaaaatagttaacagggaaataacttgagatgatggctagctttgtttaatgtcttatgaaattttcatgaacaatccaagcataattgttaagaacacgtgtattaaattcatgtaagtggaataaaagttttatgaatggacttttcaactactttctctacagcttttcatgtaaattagtcttggttctgaaacttctctaaaggaaattgtacattttttgaaatttattccttattccctcttggcagctaatgggctcttaccaagtttaaacacaaaatttatcataacaaaaatactactaatataactactgtttccatgtcccatgatcccctctcttcctccccaccctgaaaaaaatgagttcctattttttctgggagagggggggattgattagaaaaaaatgtagtgtgttccatttaaaattttggcatatggcattttctaacttaggaagccacaatgttcttggcccatcatgacattgggtagcattaactgtaagttttgtgcttccaaatcactttttggtttttaagaatttcttgatactcttatagcctgccttcaattttgatcctttattctttctatttgtcaggtgcacaagattaccttcctgttttagccttctgtcttgtcaccaaccattcttacttggtggccatgtacttggaaaaaggccgcatgatctttctggctccactcagtgtctaaggcaccctgcttcctttgcttgcatcccacagactatttccctcatcctatttactgcagcaaatctctccttagttgatgagactgtgtttatctccctttaaaaccctacctatcctgaatggtctgtcattgtctgcctttaaaatccttcctctttcttcctcctctattctctaaataatgatggggctaagttatacccaaagctcactttacaaaatatttcctcagtactttgcagaaaacaccaaacaaaaatgccattttaaaaaaggtgtattttttcttttagaatgtaagctcctcaagagcagggacaatgttttctgtatgttctattgtgcctagtacactgtaaatgctcaataaatattgatgatgggaggcagtgagtcttgatgataagggtgagaaactgaaatcccaaacaggagaaagacaaaatgaagaaaccaaaagaaacaaaaaaagatcggggcgcgcgcgacgcgaagcgcaccagtaaaaatacctgcttgtacacaacctatccagcttagtgcgaggcgccggcggcactcacagagaatggcacgggcgcaagctaggggacgcagctagttgccaccacaagaacactctggggcaaggacgcagaggagtcgcggtgtgcacaccacaggaagacaagcccccgggggcgcgcagagagctcgtctatacaccccatagcgagggcacgggggtggccatggggctgttatacacacgggtgccaaagaaggtcgaacataaagttgacccccccgcgggggtgaccatggtctaaatgcagactccaagaagcgaattcgaatggacagttacacccagttactgcaatgctgtgtctgaccttcactcagcatctgagatagacatgagtgtccaaaggccagagatgggtctaggtgaccgaaaacgaagtaatgctctctagcaagactgt

SEQ ID NO: 310683 - DNA, 2406 bp, Homo sapiens
ggagtatcatatcgtcgaaccaggcgctcgctgtgtactagtgccgagattctgaactccccagagaaagcctgctctcttgcaaagacagcttttgatgaagccattgctgaacttgatacattaagtgaagagtcatacaaagacagcacgctaataatgcaattactgagagacaacttgacattgtggacatcggatacccaaggagacgaagctgaagcaggagaaggaggggaaaattaaccggccttccaacttttgtctgcctcattctaaaatttacacagtagaccatttgtcatccatgctgtcccacaaatagttttttgtttacgatttatgacaggtttatgttacttctatttgaatttctatatttcccatgtggtttttatgtttaatattaggggagtagagccagttaacatttagggagttatctgttttcatcttgaggtggccaatatggggatgtggaatttttatacaagttataagtgtttggcatagtacttttggtacattgtggcttcaaaagggccagtgtaaaactgcttccatgtctaagcaaagaaaactgcctacatactggtttgtcctggcggggaataaaagggatcattggttccagtcacaggtgtagtaattgtgggtactttaaggtttggagcacttacaaggctgtggtagaatcataccccatggataccacatattaaaccatgtatatctgtggaatactcaatgtgtacacctttgactacagctgcagaagtgttcctttagacaaagttgtgacccattttactctggataagggcagaaacggttcacattccattatttgtaaagttacctgctgttagctttcattatttttgctacactcattttatttgtatttaaatgttttaggcaacctaagaacaaatgtaaaagtaaagatgcaggaaaaatgaattgcttggtattcattacttcatgtatatcaagcacagcagtaaaacaaaaacccatgtatttaacttttttttaggatttttgcttttgtgatttttttttttttttttgatacttgcctaacatgcatgtgctgtaaaaatagttaacagggaaataacttgagatgatggctagctttgtttaatgtcttatgaaattttcatgaacaatccaagcataattgttaagaacacgtgtattaaattcatgtaagtggaataaaagttttatgaatggacttttcaactactttctctacagcttttcatgtaaattagtcttggttctgaaacttctctaaaggaaattgtacattttttgaaatttattccttattccctcttggcagctaatgggctcttaccaagtttaaacacaaaatttatcataacaaaaatactactaatataactactgtttccatgtcccatgatcccctctcttcctccccaccctgaaaaaaatgagttcctattttttctgggagagggggggattgattagaaaaaaatgtagtgtgttccatttaaaattttggcatatggcattttctaacttaggaagccacaatgttcttggcccatcatgacattgggtagcattaactgtaagttttgtgcttccaaatcactttttggtttttaagaatttcttgatactcttatagcctgccttcaattttgatcctttattctttctatttgtcaggtgcacaagattaccttcctgttttagccttctgtcttgtcaccaaccattcttacttggtggccatgtacttggaaaaaggccgcatgatctttctggctccactcagtgtctaaggcaccctgcttcctttgcttgcatcccacagactatttccctcatcctatttactgcagcaaatctctccttagttgatgagactgtgtttatctccctttaaaaccctacctatcctgaatggtctgtcattgtctgcctttaaaatccttcctctttcttcctcctctattctctaaataatgatggggctaagttatacccaaagctcactttacaaaatatttcctcagtactttgcagaaaacaccaaacaaaaatgccattttaaaaaaggtgtattttttcttttagaatgtaagctcctcaagagcagggacaatgttttctgtatgttctattgtgcctagtacactgtaaatgctcaataaatattgatgatgggaggcagtgagtcttgatgataagggtgagaaactgaaatcccaaacactgttttgttgcttgttttattatgacctcagattaaattgggaaatattggcccttttgaataattgtcccaaatattacattcaaataaaagtgcaatggagaccttggggtctttatttccaggagaaaagataccttctg

SEQ ID NO: 310684 - DNA, 2568 bp, Homo sapiens
gatctagagatccccgtgtatatcgatgccactaaaaaacagcagatggctcgagaatacagagagaaaattgagacggagctaagagatatctgcaatgatgtactgtctcttttggaaaagttcttgatccccaatgcttcacaagcagagagcaaagtcttctatttgaaaatgaaaggagattactaccgttacttggctgaggttgccgctggtgatgacaagaaagggattgtcgatcagtcacaacaagcataccaagaagcttttgaaatcagcaaaaaggaaatgcaaccaacacatcctatcagactgggtctggcccttaacttctctgtgttctattatgagattctgaactccccagagaaagcctgctctcttgcaaagacagcttttgatgaagccattgctgaacttgatacattaagtgaagagtcatacaaagacagcacgctaataatgcaattactgagagacaacttgacattgtggacatcggatacccaaggagacgaagctgaagcaggagaaggaggggaaaattaaccggccttccaacttttgtctgcctcattctaaaatttacacagtagaccatttgtcatccatgctgtcccacaaatagttttttgtttacgatttatgacaggtttatgttacttctatttgaatttctatatttcccatgtggtttttatgtttaatattaggggagtagagccagttaacatttagggagttatctgttttcatcttgaggtggccaatatggggatgtggaatttttatacaagttataagtgtttggcatagtacttttggtacattgtggcttcaaaagggccagtgtaaaactgcttccatgtctaagcaaagaaaactgcctacatactggtttgtcctggcggggaataaaagggatcattggttccagtcacaggtgtagtaattgtgggtactttaaggtttggagcacttacaaggctgtggtagaatcataccccatggataccacatattaaaccatgtatatctgtggaatactcaatgtgtacacctttgactacagctgcagaagtgttcctttagacaaagttgtgacccattttactctggataagggcagaaacggttcacattccattatttgtaaagttacctgctgttagctttcattatttttgctacactcattttatttgtatttaaatgttttaggcaacctaagaacaaatgtaaaagtaaagatgcaggaaaaatgaattgcttggtattcattacttcatgtatatcaagcacagcagtaaaacaaaaacccatgtatttaacttttttttaggatttttgcttttgtgatttttttttttttttttgatacttgcctaacatgcatgtgctgtaaaaatagttaacagggaaataacttgagatgatggctagctttgtttaatgtcttatgaaattttcatgaacaatccaagcataattgttaagaacacgtgtattaaattcatgtaagtggaataaaagttttatgaatggacttttcaactactttctctacagcttttcatgtaaattagtcttggttctgaaacttctctaaaggaaattgtacattttttgaaatttattccttattccctcttggcagctaatgggctcttaccaagtttaaacacaaaatttatcataacaaaaatactactaatataactactgtttccatgtcccatgatcccctctcttcctccccaccctgaaaaaaatgagttcctattttttctgggagagggggggattgattagaaaaaaatgtagtgtgttccatttaaaattttggcatatggcattttctaacttaggaagccacaatgttcttggcccatcatgacattgggtagcattaactgtaagttttgtgcttccaaatcactttttggtttttaagaatttcttgatactcttatagcctgccttcaattttgatcctttattctttctatttgtcaggtgcacaagattaccttcctgttttagccttctgtcttgtcaccaaccattcttacttggtggccatgtacttggaaaaaggccgcatgatctttctggctccactcagtgtctaaggcaccctgcttcctttgcttgcatcccacagactatttccctcatcctatttactgcagcaaatctctccttagttgatgagactgtgtttatctccctttaaaaccctacctatcctgaatggtctgtcattgtctgcctttaaaatccttcctctttcttcctcctctattctctaaataatgatggggctaagttatacccaaagctcactttacaaaatatttcctcagtactttgcagaaaacaccaaacaaaaatgccattttaaaaaaggtgtattttttcttttagaatgtaagctcctcaagagcagggacaatgttttctgtatgttctattgtgcctagtacactgtaaatgctcaataaatattgatgatgggaggcagtgagtcttgatgataaggtaaggctcccggaggtaaggaga

SEQ ID NO: 310685 - DNA, 2742 bp, Homo sapiens
gatctagagatccccgtgtatatcgatgccactaaaaaacagcagatggctcgagaatacagagagaaaattgagacggagctaagagatatctgcaatgatgtactgtctcttttggaaaagttcttgatccccaatgcttcacaagcagagagcaaagtcttctatttgaaaatgaaaggagattactaccgttacttggctgaggttgccgctggtgatgacaagaaagggattgtcgatcagtcacaacaagcataccaagaagcttttgaaatcagcaaaaaggaaatgcaaccaacacatcctatcagactgggtctggcccttaacttctctgtgttctattatgagattctgaactccccagagaaagcctgctctcttgcaaagacagcttttgatgaagccattgctgaacttgatacattaagtgaagagtcatacaaagacagcacgctaataatgcaattactgagagacaacttgacattgtggacatcggatacccaaggagacgaagctgaagcaggagaaggaggggaaaattaaccggccttccaacttttgtctgcctcattctaaaatttacacagtagaccatttgtcatccatgctgtcccacaaatagttttttgtttacgatttatgacaggtttatgttacttctatttgaatttctatatttcccatgtggtttttatgtttaatattaggggagtagagccagttaacatttagggagttatctgttttcatcttgaggtggccaatatggggatgtggaatttttatacaagttataagtgtttggcatagtacttttggtacattgtggcttcaaaagggccagtgtaaaactgcttccatgtctaagcaaagaaaactgcctacatactggtttgtcctggcggggaataaaagggatcattggttccagtcacaggtgtagtaattgtgggtactttaaggtttggagcacttacaaggctgtggtagaatcataccccatggataccacatattaaaccatgtatatctgtggaatactcaatgtgtacacctttgactacagctgcagaagtgttcctttagacaaagttgtgacccattttactctggataagggcagaaacggttcacattccattatttgtaaagttacctgctgttagctttcattatttttgctacactcattttatttgtatttaaatgttttaggcaacctaagaacaaatgtaaaagtaaagatgcaggaaaaatgaattgcttggtattcattacttcatgtatatcaagcacagcagtaaaacaaaaacccatgtatttaacttttttttaggatttttgcttttgtgatttttttttttttttttgatacttgcctaacatgcatgtgctgtaaaaatagttaacagggaaataacttgagatgatggctagctttgtttaatgtcttatgaaattttcatgaacaatccaagcataattgttaagaacacgtgtattaaattcatgtaagtggaataaaagttttatgaatggacttttcaactactttctctacagcttttcatgtaaattagtcttggttctgaaacttctctaaaggaaattgtacattttttgaaatttattccttattccctcttggcagctaatgggctcttaccaagtttaaacacaaaatttatcataacaaaaatactactaatataactactgtttccatgtcccatgatcccctctcttcctccccaccctgaaaaaaatgagttcctattttttctgggagagggggggattgattagaaaaaaatgtagtgtgttccatttaaaattttggcatatggcattttctaacttaggaagccacaatgttcttggcccatcatgacattgggtagcattaactgtaagttttgtgcttccaaatcactttttggtttttaagaatttcttgatactcttatagcctgccttcaattttgatcctttattctttctatttgtcaggtgcacaagattaccttcctgttttagccttctgtcttgtcaccaaccattcttacttggtggccatgtacttggaaaaaggccgcatgatctttctggctccactcagtgtctaaggcaccctgcttcctttgcttgcatcccacagactatttccctcatcctatttactgcagcaaatctctccttagttgatgagactgtgtttatctccctttaaaaccctacctatcctgaatggtctgtcattgtctgcctttaaaatccttcctctttcttcctcctctattctctaaataatgatggggctaagttatacccaaagctcactttacaaaatatttcctcagtactttgcagaaaacaccaaacaaaaatgccattttaaaaaaggtgtattttttcttttagaatgtaagctcctcaagagcagggacaatgttttctgtatgttctattgtgcctagtacactgtaaatgctcaataaatattgatgatgggagaaaaaaaaaaaaaaaaaaaaaaaaaaaaaaaaaaaaaaaaaaaaaaaaaaaaaaaaacaaaaaaaaaaaaaaaaaaacaacaaaaaaaaacaacaaacaaaaacaaaaaaaacacaacaaacacacaacaacacaacaaacaacacaacacaggccggccccccccccccccccccccccccccccccccccaccccccccgccccctcctcaccacgc

SEQ ID NO: 310686 - DNA, 2566 bp, Homo sapiens
gatctagagatccccgtgtatatcgatgccactaaaaaacagcagatggctcgagaatacagagagaaaattgagacggagctaagagatatctgcaatgatgtactgtctcttttggaaaagttcttgatccccaatgcttcacaagcagagagcaaagtcttctatttgaaaatgaaaggagattactaccgttacttggctgaggttgccgctggtgatgacaagaaagggattgtcgatcagtcacaacaagcataccaagaagcttttgaaatcagcaaaaaggaaatgcaaccaacacatcctatcagactgggtctggcccttaacttctctgtgttctattatgagattctgaactccccagagaaagcctgctctcttgcaaagacagcttttgatgaagccattgctgaacttgatacattaagtgaagagtcatacaaagacagcacgctaataatgcaattactgagagacaacttgacattgtggacatcggatacccaaggagacgaagctgaagcaggagaaggaggggaaaattaaccggccttccaacttttgtctgcctcattctaaaatttacacagtagaccatttgtcatccatgctgtcccacaaatagttttttgtttacgatttatgacaggtttatgttacttctatttgaatttctatatttcccatgtggtttttatgtttaatattaggggagtagagccagttaacatttagggagttatctgttttcatcttgaggtggccaatatggggatgtggaatttttatacaagttataagtgtttggcatagtacttttggtacattgtggcttcaaaagggccagtgtaaaactgcttccatgtctaagcaaagaaaactgcctacatactggtttgtcctggcggggaataaaagggatcattggttccagtcacaggtgtagtaattgtgggtactttaaggtttggagcacttacaaggctgtggtagaatcataccccatggataccacatattaaaccatgtatatctgtggaatactcaatgtgtacacctttgactacagctgcagaagtgttcctttagacaaagttgtgacccattttactctggataagggcagaaacggttcacattccattatttgtaaagttacctgctgttagctttcattatttttgctacactcattttatttgtatttaaatgttttaggcaacctaagaacaaatgtaaaagtaaagatgcaggaaaaatgaattgcttggtattcattacttcatgtatatcaagcacagcagtaaaacaaaaacccatgtatttaacttttttttaggatttttgcttttgtgatttttttttttttttttgatacttgcctaacatgcatgtgctgtaaaaatagttaacagggaaataacttgagatgatggctagctttgtttaatgtcttatgaaattttcatgaacaatccaagcataattgttaagaacacgtgtattaaattcatgtaagtggaataaaagttttatgaatggacttttcaactactttctctacagcttttcatgtaaattagtcttggttctgaaacttctctaaaggaaattgtacattttttgaaatttattccttattccctcttggcagctaatgggctcttaccaagtttaaacacaaaatttatcataacaaaaatactactaatataactactgtttccatgtcccatgatcccctctcttcctccccaccctgaaaaaaatgagttcctattttttctgggagagggggggattgattagaaaaaaatgtagtgtgttccatttaaaattttggcatatggcattttctaacttaggaagccacaatgttcttggcccatcatgacattgggtagcattaactgtaagttttgtgcttccaaatcactttttggtttttaagaatttcttgatactcttatagcctgccttcaattttgatcctttattctttctatttgtcaggtgcacaagattaccttcctgttttagccttctgtcttgtcaccaaccattcttacttggtggccatgtacttggaaaaaggccgcatgatctttctggctccactcagtgtctaaggcaccctgcttcctttgcttgcatcccacagactatttccctcatcctatttactgcagcaaatctctccttagttgatgagactgtgtttatctccctttaaaaccctacctatcctgaatggtctgtcattgtctgcctttaaaatccttcctctttcttcctcctctattctctaaataatgatggggctaagttatacccaaagctcactttacaaaatatttcctcagtactttgcagaaaacaccaaacaaaaatgccattttaaaaaaggtgtattttttcttttagaatgtaagctcctcaagagcagggacaatgttttctgtatgttctattgtgcctagtacactgtaaatgctcaataaatattgatgatgggagcgtggaggattccttttttttggggtggggtttttgggggggc

SEQ ID NO: 310687 - DNA, 2593 bp, Homo sapiens
  misc_feature (2406)..(2406): n is a, c, g, or t
  misc_feature (2422)..(2422): n is a, c, g, or t
  misc_feature (2427)..(2428): n is a, c, g, or t
  misc_feature (2431)..(2431): n is a, c, g, or t
  misc_feature (2440)..(2440): n is a, c, g, or t
  misc_feature (2442)..(2443): n is a, c, g, or t
  misc_feature (2446)..(2446): n is a, c, g, or t
  misc_feature (2448)..(2448): n is a, c, g, or t
gatctagagatccccgtgtatatcgatgccactaaaaaacagcagatggctcgagaatacagagagaaaattgagacggagctaagagatatctgcaatgatgtactgtctcttttggaaaagttcttgatccccaatgcttcacaagcagagagcaaagtcttctatttgaaaatgaaaggagattactaccgttacttggctgaggttgccgctggtgatgacaagaaagggattgtcgatcagtcacaacaagcataccaagaagcttttgaaatcagcaaaaaggaaatgcaaccaacacatcctatcagactgggtctggcccttaacttctctgtgttctattatgagattctgaactccccagagaaagcctgctctcttgcaaagacagcttttgatgaagccattgctgaacttgatacattaagtgaagagtcatacaaagacagcacgctaataatgcaattactgagagacaacttgacattgtggacatcggatacccaaggagacgaagctgaagcaggagaaggaggggaaaattaaccggccttccaacttttgtctgcctcattctaaaatttacacagtagaccatttgtcatccatgctgtcccacaaatagttttttgtttacgatttatgacaggtttatgttacttctatttgaatttctatatttcccatgtggtttttatgtttaatattaggggagtagagccagttaacatttagggagttatctgttttcatcttgaggtggccaatatggggatgtggaatttttatacaagttataagtgtttggcatagtacttttggtacattgtggcttcaaaagggccagtgtaaaactgcttccatgtctaagcaaagaaaactgcctacatactggtttgtcctggcggggaataaaagggatcattggttccagtcacaggtgtagtaattgtgggtactttaaggtttggagcacttacaaggctgtggtagaatcataccccatggataccacatattaaaccatgtatatctgtggaatactcaatgtgtacacctttgactacagctgcagaagtgttcctttagacaaagttgtgacccattttactctggataagggcagaaacggttcacattccattatttgtaaagttacctgctgttagctttcattatttttgctacactcattttatttgtatttaaatgttttaggcaacctaagaacaaatgtaaaagtaaagatgcaggaaaaatgaattgcttggtattcattacttcatgtatatcaagcacagcagtaaaacaaaaacccatgtatttaacttttttttaggatttttgcttttgtgatttttttttttttttttgatacttgcctaacatgcatgtgctgtaaaaatagttaacagggaaataacttgagatgatggctagctttgtttaatgtcttatgaaattttcatgaacaatccaagcataattgttaagaacacgtgtattaaattcatgtaagtggaataaaagttttatgaatggacttttcaactactttctctacagcttttcatgtaaattagtcttggttctgaaacttctctaaaggaaattgtacattttttgaaatttattccttattccctcttggcagctaatgggctcttaccaagtttaaacacaaaatttatcataacaaaaatactactaatataactactgtttccatgtcccatgatcccctctcttcctccccaccctgaaaaaaatgagttcctattttttctgggagagggggggattgattagaaaaaaatgtagtgtgttccatttaaaattttggcatatggcattttctaacttaggaagccacaatgttcttggcccatcatgacattgggtagcattaactgtaagttttgtgcttccaaatcactttttggtttttaagaatttcttgatactcttatagcctgccttcaattttgatcctttattctttctatttgtcaggtgcacaagattaccttcctgttttagccttctgtcttgtcaccaaccattcttacttggtggccatgtacttggaaaaaggccgcatgatctttctggctccactcagtgtctaaggcaccctgcttcctttgcttgcatcccacagactatttccctcatcctatttactgcagcaaatctctccttagttgatgagactgtgtttatctccctttaaaaccctacctatcctgaatggtctgtcattgtctgcctttaaaatccttcctctttcttcctcctctattctctaaataatgatggggctaagttatacccaaagctcactttacaaaatatttcctcagtactttgcagaaaacaccaaagggaaaaccaaaaaangctttaaaagggtttnttttnnagnaggcctcanannggnangtttggtggccatggcagaacggatgcaaattgagggggggttagtaagggaagaccccaacgcgggggttactccaaggaagcgtatgcacatttagggggaaaaaaatgggctattgggggtgtgtttatcctttttattttg

SEQ ID NO: 310688 - DNA, 2600 bp, Homo sapiens
gatctagagatccccgtgtatatcgatgccactaaaaaacagcagatggctcgagaatacagagagaaaattgagacggagctaagagatatctgcaatgatgtactgtctcttttggaaaagttcttgatccccaatgcttcacaagcagagagcaaagtcttctatttgaaaatgaaaggagattactaccgttacttggctgaggttgccgctggtgatgacaagaaagggattgtcgatcagtcacaacaagcataccaagaagcttttgaaatcagcaaaaaggaaatgcaaccaacacatcctatcagactgggtctggcccttaacttctctgtgttctattatgagattctgaactccccagagaaagcctgctctcttgcaaagacagcttttgatgaagccattgctgaacttgatacattaagtgaagagtcatacaaagacagcacgctaataatgcaattactgagagacaacttgacattgtggacatcggatacccaaggagacgaagctgaagcaggagaaggaggggaaaattaaccggccttccaacttttgtctgcctcattctaaaatttacacagtagaccatttgtcatccatgctgtcccacaaatagttttttgtttacgatttatgacaggtttatgttacttctatttgaatttctatatttcccatgtggtttttatgtttaatattaggggagtagagccagttaacatttagggagttatctgttttcatcttgaggtggccaatatggggatgtggaatttttatacaagttataagtgtttggcatagtacttttggtacattgtggcttcaaaagggccagtgtaaaactgcttccatgtctaagcaaagaaaactgcctacatactggtttgtcctggcggggaataaaagggatcattggttccagtcacaggtgtagtaattgtgggtactttaaggtttggagcacttacaaggctgtggtagaatcataccccatggataccacatattaaaccatgtatatctgtggaatactcaatgtgtacacctttgactacagctgcagaagtgttcctttagacaaagttgtgacccattttactctggataagggcagaaacggttcacattccattatttgtaaagttacctgctgttagctttcattatttttgctacactcattttatttgtatttaaatgttttaggcaacctaagaacaaatgtaaaagtaaagatgcaggaaaaatgaattgcttggtattcattacttcatgtatatcaagcacagcagtaaaacaaaaacccatgtatttaacttttttttaggatttttgcttttgtgatttttttttttttttttgatacttgcctaacatgcatgtgctgtaaaaatagttaacagggaaataacttgagatgatggctagctttgtttaatgtcttatgaaattttcatgaacaatccaagcataattgttaagaacacgtgtattaaattcatgtaagtggaataaaagttttatgaatggacttttcaactactttctctacagcttttcatgtaaattagtcttggttctgaaacttctctaaaggaaattgtacattttttgaaatttattccttattccctcttggcagctaatgggctcttaccaagtttaaacacaaaatttatcataacaaaaatactactaatataactactgtttccatgtcccatgatcccctctcttcctccccaccctgaaaaaaatgagttcctattttttctgggagagggggggattgattagaaaaaaatgtagtgtgttccatttaaaattttggcatatggcattttctaacttaggaagccacaatgttcttggcccatcatgacattgggtagcattaactgtaagttttgtgcttccaaatcactttttggtttttaagaatttcttgatactcttatagcctgccttcaattttgatcctttattctttctatttgtcaggtgcacaagattaccttcctgttttagccttctgtcttgtcaccaaccattcttacttggtggccatgtacttggaaaaaggccgcatgatctttctggctccactcagtgtctaaggcaccctgcttcctttgcttgcatcccacagactatttccctcatcctatttactgcagcaaatctctccttagttgatgagactgtgtttatctccctttaaaaccctacctatcctgaatggtctgtcattgtctgcctttaaaatccttcctctttcttcctcctctattctctaaataatgatggggctaagttatacccaaagctcactttacaaaatatttcctcagtactttgcagaaaacaccaaatttctgtatgttctattgtgcctagtacactgtaaatgctcaataaatattgatgatgggaggcagtgagtcttgatgataagggtgagaaactgaaatcccaaacactgttttgttgcttgttttattatgacctcagattaaattgggaaatattggcccttttgaataattgtcccaaatattacattcaaataaaagtgcaatgga

SEQ ID NO: 310689 - DNA, 2658 bp, Homo sapiens
gatctagagatccccgtgtatatcgatgccactaaaaaacagcagatggctcgagaatacagagagaaaattgagacggagctaagagatatctgcaatgatgtactgtctcttttggaaaagttcttgatccccaatgcttcacaagcagagagcaaagtcttctatttgaaaatgaaaggagattactaccgttacttggctgaggttgccgctggtgatgacaagaaagggattgtcgatcagtcacaacaagcataccaagaagcttttgaaatcagcaaaaaggaaatgcaaccaacacatcctatcagactgggtctggcccttaacttctctgtgttctattatgagattctgaactccccagagaaagcctgctctcttgcaaagacagcttttgatgaagccattgctgaacttgatacattaagtgaagagtcatacaaagacagcacgctaataatgcaattactgagagacaacttgacattgtggacatcggatacccaaggagacgaagctgaagcaggagaaggaggggaaaattaaccggccttccaacttttgtctgcctcattctaaaatttacacagtagaccatttgtcatccatgctgtcccacaaatagttttttgtttacgatttatgacaggtttatgttacttctatttgaatttctatatttcccatgtggtttttatgtttaatattaggggagtagagccagttaacatttagggagttatctgttttcatcttgaggtggccaatatggggatgtggaatttttatacaagttataagtgtttggcatagtacttttggtacattgtggcttcaaaagggccagtgtaaaactgcttccatgtctaagcaaagaaaactgcctacatactggtttgtcctggcggggaataaaagggatcattggttccagtcacaggtgtagtaattgtgggtactttaaggtttggagcacttacaaggctgtggtagaatcataccccatggataccacatattaaaccatgtatatctgtggaatactcaatgtgtacacctttgactacagctgcagaagtgttcctttagacaaagttgtgacccattttactctggataagggcagaaacggttcacattccattatttgtaaagttacctgctgttagctttcattatttttgctacactcattttatttgtatttaaatgttttaggcaacctaagaacaaatgtaaaagtaaagatgcaggaaaaatgaattgcttggtattcattacttcatgtatatcaagcacagcagtaaaacaaaaacccatgtatttaacttttttttaggatttttgcttttgtgatttttttttttttttttgatacttgcctaacatgcatgtgctgtaaaaatagttaacagggaaataacttgagatgatggctagctttgtttaatgtcttatgaaattttcatgaacaatccaagcataattgttaagaacacgtgtattaaattcatgtaagtggaataaaagttttatgaatggacttttcaactactttctctacagcttttcatgtaaattagtcttggttctgaaacttctctaaaggaaattgtacattttttgaaatttattccttattccctcttggcagctaatgggctcttaccaagtttaaacacaaaatttatcataacaaaaatactactaatataactactgtttccatgtcccatgatcccctctcttcctccccaccctgaaaaaaatgagttcctattttttctgggagagggggggattgattagaaaaaaatgtagtgtgttccatttatcatgacattgggtagcattaactgtaagttttgtgcttccaaatcactttttggtttttaagaatttcttgatactcttatagcctgccttcaattttgatcctttattctttctatttgtcaggtgcacaagattaccttcctgttttagccttctgtcttgtcaccaaccattcttacttggtggccatgtacttggaaaaaggccgcatgatctttctggctccactcagtgtctaaggcaccctgcttcctttgcttgcatcccacagactatttccctcatcctatttactgcagcaaatctctccttagttgatgagactgtgtttatctccctttaaaaccctacctatcctgaatggtctgtcattgtctgcctttaaaatccttcctctttcttcctcctctattctctaaataatgatggggctaagttatacccaaagctcactttacaaaatatttcctcagtactttgcagaaaacaccaaacaaaaatgccattttaaaaaaggtgtattttttcttttagaatgtaagctcctcaagagcagggacaatgttttctgtatgttctattgtgcctagtacactgtaaatgctcaataaatattgatgatgggaggcagtgagtcttgatgataagggtgagaaactgaaatcccaaacactgttttgttgcttgttttattatgacctcagattaaattgggaaatattggcccttttgaataattgtcccaaatattacattcaaataaaagtgcaatggagaccttggggtctttatttccaggagaaaagataccttctg

SEQ ID NO: 310690 - DNA, 2649 bp, Homo sapiens
gatctagagatccccgtgtatatcgatgccactaaaaaacagcagatggctcgagaatacagagagaaaattgagacggagctaagagatatctgcaatgatgtactgtctcttttggaaaagttcttgatccccaatgcttcacaagcagagagcaaagtcttctatttgaaaatgaaaggagattactaccgttacttggctgaggttgccgctggtgatgacaagaaagggattgtcgatcagtcacaacaagcataccaagaagcttttgaaatcagcaaaaaggaaatgcaaccaacacatcctatcagactgggtctggcccttaacttctctgtgttctattatgagattctgaactccccagagaaagcctgctctcttgcaaagacagcttttgatgaagccattgctgaacttgatacattaagtgaagagtcatacaaagacagcacgctaataatgcaattactgagagacaacttgacattgtggacatcggatacccaaggagacgaagctgaagcaggagaaggaggggaaaattaaccggccttccaacttttgtctgcctcattctaaaatttacacagtagaccatttgtcatccatgctgtcccacaaatagttttttgtttacgatttatgacaggtttatgttacttctatttgaatttctatatttcccatgtggtttttatgtttaatattaggggagtagagccagttaacatttagggagttatctgttttcatcttgaggtggccaatatggggatgtggaatttttatacaagttataagtgtttggcatagtacttttggtacattgtggcttcaaaagggccagtgtaaaactgcttccatgtctaagcaaagaaaactgcctacatactggtttgtcctggcggggaataaaagggatcattggttccagtcacaggtgtagtaattgtgggtactttaaggtttggagcacttacaaggctgtggtagaatcataccccatggataccacatattaaaccatgtatatctgtggaatactcaatgtgtacacctttgactacagctgcagaagtgttcctttagacaaagttgtgacccattttactctggataagggcagaaacggttcacattccattatttgtaaagttacctgctgttagctttcattatttttgctacactcattttatttgtatttaaatgttttaggcaacctaagaacaaatgtaaaagtaaagatgcaggaaaaatgaattgcttggtattcattacttcatgtatatcaagcacagcagtaaaacaaaaacccatgtatttaacttttttttaggatttttgcttttgtgatttttttttttttttttgatacttgcctaacatgcatgtgctgtaaaaatagttaacagggaaataacttgagatgatggctagctttgtttaatgtcttatgaaattttcatgaacaatccaagcataattgttaagaacacgtgtattaaattcatgtaagtggaataaaagttttatgaatggacttttcaactactttctctacagcttttcatgtaaattagtcttggttctgaaacttctctaaaggaaattgtacattttttgaaatttattccttattccctcttggcagctaatgggctcttaccaagtttaaacacaaaatttatcataacaaaaatactactaatataactactgtttccatgtcccatgatcccctctcttcctccccaccctgaaaaaaatgagttcctattttttctgggagagggggggattgattagaaaaaaatgtagtgtgttccatttaaaattttggcatatggcattttctaacttaggaagccacaatgttcttggcccatcatgacattgggtagcattaactgtaagttttgtgcttccaaatcactttttggtttttaagaatttcttgatactcttatagcctgccttcaattttgatcctttattctttctatttgtcaggtgcacaagattaccttcctgttttagccttctgtcttgtcaccaaccattcttacttggtggccatgtacttggaaaaaggccgcatgatctttctggctccactcagtgtctaaggcaccctgcttcctttgcttgcatcccacagactatttccctcatcctatttactgcagcaaatctctccttagttgatgagactgtgtttatctccctttaaaaccctacctatcctgaatggtctgtcattgtctgcctttaaaatccttcctctttcttcctcctctattctctaaataatgatggggctaagttatacccatggccactcaataccggtattgagtggccatgtgacgtcacgaagagatatagcgatggcgtcgtgcagatgcagcacgtcgcacacagacatggggaacttggcatgacgtcacaccgagatgcagcaacgacgtcacgggccatgtcgacgtcacacatattaatgtcacacagacgcggcgatggcatcacacagacggtgatgatgtcacacacagacacagtgacaacacacaccatgacaacgacacctatagatatgcaccaacatcacagcacgcatgcccagtcacatgccgggaccgg

SEQ ID NO: 310691 - DNA, 2232 bp, Homo sapiens
ctcctcaaggagaactaaaaaccactgcttagcgaaataaaagaggactcatacaaatggaagaacattccacgctcatggataggaagaaatcaatattgttaaaatgtctttaccacccccaagcaaaccgcagatacagtgcaactcctctcaaaataccgatgaacatacttgacatgttacttctatttgaatttctatatttcccatgtggtttttatgtttaatattaggggagtagagccagttaacatttagggagttatctgttttcatcttgaggtggccaatatggggatgtggaatttttatacaagttataagtgtttggcatagtacttttggtacattgtggcttcaaaagggccagtgtaaaactgcttccatgtctaagcaaagaaaactgcctacatactggtttgtcctggcggggaataaaagggatcattggttccagtcacaggtgtagtaattgtgggtactttaaggtttggagcacttacaaggctgtggtagaatcataccccatggataccacatattaaaccatgtatatctgtggaatactcaatgtgtacacctttgactacagctgcagaagtgttcctttagacaaagttgtgacccattttactctggataagggcagaaacggttcacattccattatttgtaaagttacctgctgttagctttcattatttttgctacactcattttatttgtatttaaatgttttaggcaacctaagaacaaatgtaaaagtaaagatgcaggaaaaatgaattgcttggtattcattacttcatgtatatcaagcacagcagtaaaacaaaaacccatgtatttaacttttttttaggatttttgcttttgtgatttttttttttttttttgatacttgcctaacatgcatgtgctgtaaaaatagttaacagggaaataacttgagatgatggctagctttgtttaatgtcttatgaaattttcatgaacaatccaagcataattgttaagaacacgtgtattaaattcatgtaagtggaataaaagttttatgaatggacttttcaactactttctctacagcttttcatgtaaattagtcttggttctgaaacttctctaaaggaaattgtacattttttgaaatttattccttattccctcttggcagctaatgggctcttaccaagtttaaacacaaaatttatcataacaaaaatactactaatataactactgtttccatgtcccatgatcccctctcttcctccccaccctgaaaaaaatgagttcctattttttctgggagagggggggattgattagaaaaaaatgtagtgtgttccatttaaaattttggcatatggcattttctaacttaggaagccacaatgttcttggcccatcatgacattgggtagcattaactgtaagttttgtgcttccaaatcactttttggtttttaagaatttcttgatactcttatagcctgccttcaattttgatcctttattctttctatttgtcaggtgcacaagattaccttcctgttttagccttctgtcttgtcaccaaccattcttacttggtggccatgtacttggaaaaaggccgcatgatctttctggctccactcagtgtctaaggcaccctgcttcctttgcttgcatcccacagactatttccctcatcctatttactgcagcaaatctctccttagttgatgagactgtgtttatctccctttaaaaccctacctatcctgaatggtctgtcattgtctgcctttaaaatccttcctctttcttcctcctctattctctaaataatgatggggctaagttatacccaaagctcactttacaaaatatttcctcagtactttgcagaaaacaccaaacaaaaatgccattttaaaaaaggtgtattttttcttttagaatgtaagctcctcaagagcagggacaatgttttctgtatgttctattgtgcctagtacactgtaaatgctcaataaatattgatgatgggaggcagtgagtcttgatgataagggtgagaaactgaaatcccaaacactgttttgttgcttgttttattatgacctcagattaaattgggaaatattggcccttttgaataattgtcccaaatattacattcaaataaaagtgcaatggagaccttggggtctttatttccaggagaaaagataccttctg

SEQ ID NO: 310692 - DNA, 2659 bp, Homo sapiens
gatctagagatccccgtgtatatcgatgccactaaaaaacagcagatggctcgagaatacagagagaaaattgagacggagctaagagatatctgcaatgatgtactgtctcttttggaaaagttcttgatccccaatgcttcacaagcagagagcaaagtcttctatttgaaaatgaaaggagattactaccgttacttggctgaggttgccgctggtgatgacaagaaagggattgtcgatcagtcacaacaagcataccaagaagcttttgaaatcagcaaaaaggaaatgcaaccaacacatcctatcagactgggtctggcccttaacttctctgtgttctattatgagattctgaactccccagagaaagcctgctctcttgcaaagacagcttttgatgaagccattgctgaacttgatacattaagtgaagagtcatacaaagacagcacgctaataatgcaattactgagagacaacttgacattgtggacatcggatacccaaggagacgaagctgaagcaggagaaggaggggaaaattaaccggccttccaacttttgtctgcctcattctaaaatttacacagtagaccatttgtcatccatgctgtcccacaaatagttttttgtttacgatttatgacaggtttatgttacttctatttgaatttctatatttcccatgtggtttttatgtttaatattaggggagtagagccagttaacatttagggagttatctgttttcatcttgaggtggccaatatggggatgtggaatttttatacaagttataagtgtttggcatagtacttttggtacattgtggcttcaaaagggccagtgtaaaactgcttccatgtctaagcaaagaaaactgcctacatactggtttgtcctggcggggaagtttggagcacttacaaggctgtggtagaatcataccccatggataccacatattaaaccatgtatatctgtggaatactcaatgtgtacacctttgactacagctgcagaagtgttcctttagacaaagttgtgacccattttactctggataagggcagaaacggttcacattccattatttgtaaagttacctgctgttagctttcattatttttgctacactcattttatttgtatttaaatgttttaggcaacctaagaacaaatgtaaaagtaaagatgcaggaaaaatgaattgcttggtattcattacttcatgtatatcaagcacagcagtaaaacaaaaacccatgtatttaacttttttttaggatttttgcttttgtgatttttttttttttttttgatacttgcctaacatgcatgtgctgtaaaaatagttaacagggaaataacttgagatgatggctagctttgtttaatgtcttatgaaattttcatgaacaatccaagcataattgttaagaacacgtgtattaaattcatgtaagtggaataaaagttttatgaatggacttttcaactactttctctacagcttttcatgtaaattagtcttggttctgaaacttctctaaaggaaattgtacattttttgaaatttattccttattccctcttggcagctaatgggctcttaccaagtttaaacacaaaatttatcataacaaaaatactactaatataactactgtttccatgtcccatgatcccctctcttcctccccaccctgaaaaaaatgagttcctattttttctgggagagggggggattgattagaaaaaaatgtagtgtgttccatttaaaattttggcatatggcattttctaacttaggaagccacaatgttcttggcccatcatgacattgggtagcattaactgtaagttttgtgcttccaaatcactttttggtttttaagaatttcttgatactcttatagcctgccttcaattttgatcctttattctttctatttgtcaggtgcacaagattaccttcctgttttagccttctgtcttgtcaccaaccattcttacttggtggccatgtacttggaaaaaggccgcatgatctttctggctccactcagtgtctaaggcaccctgcttcctttgcttgcatcccacagactatttccctcatcctatttactgcagcaaatctctccttagttgatgagactgtgtttatctccctttaaaaccctacctatcctgaatggtctgtcattgtctgcctttaaaatccttcctctttcttcctcctctattctctaaataatgatggggctaagttatacccaaagctcactttacaaaatatttcctcagtactttgcagaaaacaccaaacaaaaatgccattttaaaaaaggtgtattttttcttttagaatgtaagctcctcaagagcagggacaatgttttctgtatgttctattgtgcctagtacactgtaaatgctcaataaatattgatgatgggaggcagtgagtcttgatgataagggtgagaaactgaaatcccaaacactgttttgttgcttgttttattatgacctcagattaaattgggaaatattggcccttttgaataattgtcccaaatattacattcaaataaaagtgcaatggagaccttggggtctttatttccaggagaaaagataccttctg

SEQ ID NO: 310693 - DNA, 2264 bp, Homo sapiens
gatctagagatccccgtgtatatcgatgccactaaaaaacagcagatggctcgagaatacagagagaaaattgagacggagctaagagatatctgcaatgatgtactgtctcttttggaaaagttcttgatccccaatgcttcacaagcagagagcaaagtcttctatttgaaaatgaaaggagattactaccgttacttggctgaggttgccgctggtgatgacaagaaagggattgtcgatcagtcacaacaagcataccaagaagcttttgaaatcagcaaaaaggaaatgcaaccaacacatcctatcagactgggtctggcccttaacttctctgtgttctattatgagattctgaactccccagagaaagcctgctctcttgcaaagacagcttttgatgaagccattgctgaacttgatacattaagtgaagagtcatacaaagacagcacgctaataatgcaattactgagagacaacttgacattgtggacatcggatacccaaggagacgaagctgaagcaggagaaggaggggaaaattaaccggccttccaacttttgtctgcctcattctaaaatttacacagtagaccatttgtcatccatgctgtcccacaaatagttttttgtttacgatttatgacaggtttatgttacttctatttgaatttctatatttcccatgtggtttttatgtttaatattaggggagtagagccagttaacatttagggagttatctgttttcatcttgaggtggccaatatggggatgtggaatttttatacaagttataagtgtttggcatagtacttttggtacattgtggcttcaaaagggccagtgtaaaactgcttccatgtctaagcaaagaaaactgcctacatactggtttgtcctggcggggaataaaagggatcattggttccagtcacaggtgtagtaattgtgggtactttaaggtttggagcacttacaaggctgtggtagaatcataccccatggataccacatattaaaccatgtatatctgtggaatactcaatgtgtacacctttgactacagctgcagaagtgttcctttagacaaagttgtgacccattttactctggataagggcagaaacggttcacattccattatttgtaaagttacctgctgttagctttcattatttttgctacactcattttatttgtatttaaatgttttaggcaacctaagaacaaatgtaaaagtaaagatgcaggaaaaatgaattgcttggtattcattacttcatgtatatcaagcacagcagtaaaacaaaaacccatgtatttaacttttttttaggatttttgcttttgtgatttttttttttttttttgatacttgcctaacatgcatgtgctgtaaaaatagttaacagggaaataacttgagatgatggctagctttgtttaatgtcttatgaaattttcatgaacaatccaagcataattgttaagaacacgtgtattaaattcatgtaagtggaataaaagttttatgaatggacttttcaactactttctctacagcttttcatgtaaattagtcttggttctgaaacttctctaaaggaaattgtacattttttgaaatttattccttattccctcttggcagctaatgggctcttaccaagtttaaacacaaaatttatcataacaaaaatactactaatataactactgtttccatgtcccatgatcccctctcttcctccccaccctgaaaaaaatgagttcctattttttctgggagagggggggattgattagaaaaaaatgtagtgtgttccatttaaaattttggcatatggcattttctaacttaggaagccacaatgttcttggcccatcatgacattgggtagcattaactgtaagttttgtgcttccaaatcactttttggtttttaagaatttcttgatactcttatagcctgccttcaattttgatcctttattctttctatttgtcaggtgcacaagattaccttcctgttttagccttctgtcttgtcaccaaccattcttacttggtggccatgtacttggaaaaaggccgcatgatctttctggctccactcagtgtctaaggcaccctgcttcctttgcttgcatcccacagactatttccctcatcctatttactgcagcaaatctctccttagttgatgagactgtgtttatctccctcgaacctatcagggatcctctagaacagc

SEQ ID NO: 310694 - DNA, 2359 bp, Homo sapiens
  misc_feature (2250)..(2250): n is a, c, g, or t
  misc_feature (2273)..(2273): n is a, c, g, or t
gatctagagatccccgtgtatatcgatgccactaaaaaacagcagatggctcgagaatacagagagaaaattgagacggagctaagagatatctgcaatgatgtactgtctcttttggaaaagttcttgatccccaatgcttcacaagcagagagcaaagtcttctatttgaaaatgaaaggagattactaccgttacttggctgaggttgccgctggtgatgacaagaaagggattgtcgatcagtcacaacaagcataccaagaagcttttgaaatcagcaaaaaggaaatgcaaccaacacatcctatcagactgggtctggcccttaacttctctgtgttctattatgagattctgaactccccagagaaagcctgctctcttgcaaagacagcttttgatgaagccattgctgaacttgatacattaagtgaagagtcatacaaagacagcacgctaataatgcaattactgagagacaacttgacattgtggacatcggatacccaaggagacgaagctgaagcaggagaaggaggggaaaattaaccggccttccaacttttgtctgcctcattctaaaatttacacagtagaccatttgtcatccatgctgtcccacaaatagttttttgtttacgatttatgacaggtttatgttacttctatttgaatttctatatttcccatgtggtttttatgtttaatattaggggagtagagccagttaacatttagggagttatctgttttcatcttgaggtggccaatatggggatgtggaatttttatacaagttataagtgtttggcatagtacttttggtacattgtggcttcaaaagggccagtgtaaaactgcttccatgtctaagcaaagaaaactgcctacatactggtttgtcctggcggggaataaaagggatcattggttccagtcacaggtgtagtaattgtgggtactttaaggtttggagcacttacaaggctgtggtagaatcataccccatggataccacatattaaaccatgtatatctgtggaatactcaatgtgtacacctttgactacagctgcagaagtgttcctttagacaaagttgtgacccattttactctggataagggcagaaacggttcacattccattatttgtaaagttacctgctgttagctttcattatttttgctacactcattttatttgtatttaaatgttttaggcaacctaagaacaaatgtaaaagtaaagatgcaggaaaaatgaattgcttggtattcattacttcatgtatatcaagcacagcagtaaaacaaaaacccatgtatttaacttttttttaggatttttgcttttgtgatttttttttttttttttgatacttgcctaacatgcatgtgctgtaaaaatagttaacagggaaataacttgagatgatggctagctttgtttaatgtcttatgaaattttcatgaacaatccaagcataattgttaagaacacgtgtattaaattcatgtaagtggaataaaagttttatgaatggacttttcaactactttctctacagcttttcatgtaaattagtcttggttctgaaacttctctaaaggaaattgtacattttttgaaatttattccttattccctcttggcagctaatgggctcttaccaagtttaaacacaaaatttatcataacaaaaatactactaatataactactgtttccatgtcccatgatcccctctcttcctccccaccctgaaaaaaatgagttcctattttttctgggagagggggggattgattagaaaaaaatgtagtgtgttccatttaaaattttggcatatggcattttctaacttaggaagccacaatgttcttggcccatcatgacattgggtagcattaactgtaagttttgtgcttccaaatcactttttggtttttaagaatttcttgatactcttatagcctgccttcaattttgatcctttattctttctatttgtcaggtgcacaagattaccttcctgttttagccttctgtcttgtcaccaaccattcttacttggtggccatgtacttggaaaaaggccgcatgatctttctggctccactcagtgtctaaggcaccctgcttcctttgcttgcatcccacagactatttccctcatcctattatgggaaactctcttagtgagagacgggtttctccttaaacctaatatcgaggtggctggtgncttaaaactccttttccctatcnaaagggggggttcacacagcttaaatcctctgggacaccagcaaggtttcatccccgcaggtttatcacaccaacgggggactcta

SEQ ID NO: 310695 - DNA, 2193 bp, Homo sapiens
gatctagagatccccgtgtatatcgatgccactaaaaaacagcagatggctcgagaatacagagagaaaattgagacggagctaagagatatctgcaatgatgtactgtctcttttggaaaagttcttgatccccaatgcttcacaagcagagagcaaagtcttctatttgaaaatgaaaggagattactaccgttacttggctgaggttgccgctggtgatgacaagaaagggattgtcgatcagtcacaacaagcataccaagaagcttttgaaatcagcaaaaaggaaatgcaaccaacacatcctatcagactgggtctggcccttaacttctctgtgttctattatgagattctgaactccccagagaaagcctgctctcttgcaaagacagcttttgatgaagccattgctgaacttgatacattaagtgaagagtcatacaaagacagcacgctaataatgcaattactgagagacaacttgacattgtggacatcggatacccaaggagacgaagctgaagcaggagaaggaggggaaaattaaccggccttccaacttttgtctgcctcattctaaaatttacacagtagaccatttgtcatccatgctgtcccacaaatagttttttgtttacgatttatgacaggtttatgttacttctatttgaatttctatatttcccatgtggtttttatgtttaatattaggggagtagagccagttaacatttagggagttatctgttttcatcttgaggtggccaatatggggatgtggaatttttatacaagttataagtgtttggcatagtacttttggtacattgtggcttcaaaagggccagtgtaaaactgcttccatgtctaagcaaagaaaactgcctacatactggtttgtcctggcggggaataaaagggatcattggttccagtcacaggtgtagtaattgtgggtactttaaggtttggagcacttacaaggctgtggtagaatcataccccatggataccacatattaaaccatgtatatctgtggaatactcaatgtgtacacctttgactacagctgcagaagtgttcctttagacaaagttgtgacccattttactctggataagggcagaaacggttcacattccattatttgtaaagttacctgctgttagctttcattatttttgctacactcattttatttgtatttaaatgttttaggcaacctaagaacaaatgtaaaagtaaagatgcaggaaaaatgaattgcttggtattcattacttcatgtatatcaagcacagcagtaaaacaaaaacccatgtatttaacttttttttaggatttttgcttttgtgatttttttttttttttttgatacttgcctaacatgcatgtgctgtaaaaatagttaacagggaaataacttgagatgatggctagctttgtttaatgtcttatgaaattttcatgaacaatccaagcataattgttaagaacacgtgtattaaattcatgtaagtggaataaaagttttatgaatggacttttcaactactttctctacagcttttcatgtaaattagtcttggttctgaaacttctctaaaggaaattgtacattttttgaaatttattccttattccctcttggcagctaatgggctcttaccaagtttaaacacaaaatttatcataacaaaaatactactaatataactactgtttccatgtcccatgatcccctctcttcctccccaccctgaaaaaaatgagttcctattttttctgggagagggggggattgattagaaaaaaatgtagtgtgttccatttaaaattttggcatatggcattttctaacttaggaagccacaatgttcttggcccatcatgacattgggtagcattaactgtaagttttgtgcttccaaatcactttttggtttttaagaatttcttgatactcttatagcctgccttcaattttgatcctttattctttctatttgtcaggtgcacaagattaccttcctgttttagccttctgtcttgtcaccaaccattcttacttggtggccatgtacttggaaaaaggccgcatgatctttctggctccactcagtgtctaaggcaccctgcttcctttgcttgcatccccatgccgccgggattcttcaaaagtcgccc

SEQ ID NO: 310696 - DNA, 2159 bp, Homo sapiens
gatctagagatccccgtgtatatcgatgccactaaaaaacagcagatggctcgagaatacagagagaaaattgagacggagctaagagatatctgcaatgatgtactgtctcttttggaaaagttcttgatccccaatgcttcacaagcagagagcaaagtcttctatttgaaaatgaaaggagattactaccgttacttggctgaggttgccgctggtgatgacaagaaagggattgtcgatcagtcacaacaagcataccaagaagcttttgaaatcagcaaaaaggaaatgcaaccaacacatcctatcagactgggtctggcccttaacttctctgtgttctattatgagattctgaactccccagagaaagcctgctctcttgcaaagacagcttttgatgaagccattgctgaacttgatacattaagtgaagagtcatacaaagacagcacgctaataatgcaattactgagagacaacttgacattgtggacatcggatacccaaggagacgaagctgaagcaggagaaggaggggaaaattaaccggccttccaacttttgtctgcctcattctaaaatttacacagtagaccatttgtcatccatgctgtcccacaaatagttttttgtttacgatttatgacaggtttatgttacttctatttgaatttctatatttcccatgtggtttttatgtttaatattaggggagtagagccagttaacatttagggagttatctgttttcatcttgaggtggccaatatggggatgtggaatttttatacaagttataagtgtttggcatagtacttttggtacattgtggcttcaaaagggccagtgtaaaactgcttccatgtctaagcaaagaaaactgcctacatactggtttgtcctggcggggaataaaagggatcattggttccagtcacaggtgtagtaattgtgggtactttaaggtttggagcacttacaaggctgtggtagaatcataccccatggataccacatattaaaccatgtatatctgtggaatactcaatgtgtacacctttgactacagctgcagaagtgttcctttagacaaagttgtgacccattttactctggataagggcagaaacggttcacattccattatttgtaaagttacctgctgttagctttcattatttttgctacactcattttatttgtatttaaatgttttaggcaacctaagaacaaatgtaaaagtaaagatgcaggaaaaatgaattgcttggtattcattacttcatgtatatcaagcacagcagtaaaacaaaaacccatgtatttaacttttttttaggatttttgcttttgtgatttttttttttttttttgatacttgcctaacatgcatgtgctgtaaaaatagttaacagggaaataacttgagatgatggctagctttgtttaatgtcttatgaaattttcatgaacaatccaagcataattgttaagaacacgtgtattaaattcatgtaagtggaataaaagttttatgaatggacttttcaactactttctctacagcttttcatgtaaattagtcttggttctgaaacttctctaaaggaaattgtacattttttgaaatttattccttattccctcttggcagctaatgggctcttaccaagtttaaacacaaaatttatcataacaaaaatactactaatataactactgtttccatgtcccatgatcccctctcttcctccccaccctgaaaaaaatgagttcctattttttctgggagagggggggattgattagaaaaaaatgtagtgtgttccatttaaaattttggcatatggcattttctaacttaggaagccacaatgttcttggcccatcatgacattgggtagcattaactgtaagttttgtgcttccaaatcactttttggtttttaagaatttcttgatactcttatagcctgccttcaattttgatcctttattctttctatttgtcaggtgcacaagattaccttcctgttttagccttctgtcttgtcaccaaccattcttacttggtggccatgtacttggaaaaaggccgcatgatctttctggctccaaagttaggctccaaagcctgatagggtccgagtcga

SEQ ID NO: 310697 - DNA, 2417 bp, Homo sapiens
gatctagagatccccgtgtatatcgatgccactaaaaaacagcagatggctcgagaatacagagagaaaattgagacggagctaagagatatctgcaatgatgtactgtctcttttggaaaagttcttgatccccaatgcttcacaagcagagagcaaagtcttctatttgaaaatgaaaggagattactaccgttacttggctgaggttgccgctggtgatgacaagaaagggattgtcgatcagtcacaacaagcataccaagaagcttttgaaatcagcaaaaaggaaatgcaaccaacacatcctatcagactgggtctggcccttaacttctctgtgttctattatgagattctgaactccccagagaaagcctgctctcttgcaaagacagcttttgatgaagccattgctgaacttgatacattaagtgaagagtcatacaaagacagcacgctaataatgcaattactgagagacaacttgacattgtggacatcggatacccaaggagacgaagctgaagcaggagaaggaggggaaaattaaccggccttccaacttttgtctgcctcattctaaaatttacacagtagaccatttgtcatccatgctgtcccacaaatagttttttgtttacgatttatgacaggtttatgttacttctatttgaatttctatatttcccatgtggtttttatgtttaatattaggggagtagagccagttaacatttagggagttatctgttttcatcttgaggtggccaatatggggatgtggaatttttatacaagttataagtgtttggcatagtacttttggtacattgtggcttcaaaagggccagtgtaaaactgcttccatgtctaagcaaagaaaactgcctacatactggtttgtcctggcggggaataaaagggatcattggttccagtcacaggtgtagtaattgtgggtactttaaggtttggagcacttacaaggctgtggtagaatcataccccatggataccacatattaaaccatgtatatctgtggaatactcaatgtgtacacctttgactacagctgcagaagtgttcctttagacaaagttgtgacccattttactctggataagggcagaaacggttcacattccattatttgtaaagttacctgctgttagctttcattatttttgctacactcattttatttgtatttaaatgttttaggcaacctaagaacaaatgtaaaagtaaagatgcaggaaaaatgaattgcttggtattcattacttcatgtatatcaagcacagcagtaaaacaaaaacccatgtatttaacttttttttaggatttttgcttttgtgatttttttttttttttttgatacttgcctaacatgcatgtgctgtaaaaatagttaacagggaaataacttgagatgatggctagctttgtttaatgtcttatgaaattttcatgaacaatccaagcataattgttaagaacacgtgtattaaattcatgtaagtggaataaaagttttatgaatggacttttcaactactttctctacagcttttcatgtaaattagtcttggttctgaaacttctctaaaggaaattgtacattttttgaaatttattccttattccctcttggcagctaatgggctcttaccaagtttaaacacaaaatttatcataacaaaaatactactaatataactactgtttccatgtcccatgatcccctctcttcctccccaccctgaaaaaaatgagttcctattttttctgggagagggggggattgattagaaaaaaatgtagtgtgttccatttaaaattttggcatatggcattttctaacttaggaagccacaatgttcttggcccatcatgacattgggtagcattaactgtaagttttgtgcttccaaatcactttttggtttttaagaatttcttgatactcttatagcctgccttcaattttgatcctttattctttctatttgtcaggtgcacaagattaccttcctgttttagccttctgtcttgtcaccaaccattcttacttggtggccatgtacttggaaaaaggccgcatgatctttctggctccaatgggtcaccagtcgtacgactggtgcccatgaaatttcccgaggcactaattttgactttcagaaagtgggagggctgatatgtaaggcaagttattcaggaatgaggagggctgacagttgtaactcagggtggttggcaactgcctacgttagtcccaggtttcccataaaactctgtagaggccatttacatttcgaaaatcctgtaattacaccttactgtatcatgccctagtagtttcacaaacttagatattcacaaaaatgttgtggaatatattcctggggaat

SEQ ID NO: 310698 - DNA, 2366 bp, Homo sapiens
gatctagagatccccgtgtatatcgatgccactaaaaaacagcagatggctcgagaatacagagagaaaattgagacggagctaagagatatctgcaatgatgtactgtctcttttggaaaagttcttgatccccaatgcttcacaagcagagagcaaagtcttctatttgaaaatgaaaggagattactaccgttacttggctgaggttgccgctggtgatgacaagaaagggattgtcgatcagtcacaacaagcataccaagaagcttttgaaatcagcaaaaaggaaatgcaaccaacacatcctatcagactgggtctggcccttaacttctctgtgttctattatgagattctgaactccccagagaaagcctgctctcttgcaaagacagcttttgatgaagccattgctgaacttgatacattaagtgaagagtcatacaaagacagcacgctaataatgcaattactgagagacaacttgacattgtggacatcggatacccaaggagacgaagctgaagcaggagaaggaggggaaaattaaccggccttccaacttttgtctgcctcattctaaaatttacacagtagaccatttgtcatccatgctgtcccacaaatagttttttgtttacgatttatgacaggtttatgttacttctatttgaatttctatatttcccatgtggtttttatgtttaatattaggggagtagagccagttaacatttagggagttatctgttttcatcttgaggtggccaatatggggatgtggaatttttatacaagttataagtgtttggcatagtacttttggtacattgtggcttcaaaagggccagtgtaaaactgcttccatgtctaagcaaagaaaactgcctacatactggtttgtcctggcggggaataaaagggatcattggttccagtcacaggtgtagtaattgtgggtactttaaggtttggagcacttacaaggctgtggtagaatcataccccatggataccacatattaaaccatgtatatctgtggaatactcaatgtgtacacctttgactacagctgcagaagtgttcctttagacaaagttgtgacccattttactctggataagggcagaaacggttcacattccattatttgtaaagttacctgctgttagctttcattatttttgctacactcattttatttgtatttaaatgttttaggcaacctaagaacaaatgtaaaagtaaagatgcaggaaaaatgaattgcttggtattcattacttcatgtatatcaagcacagcagtaaaacaaaaacccatgtatttaacttttttttaggatttttgcttttgtgatttttttttttttttttgatacttgcctaacatgcatgtgctgtaaaaatagttaacagggaaataacttgagatgatggctagctttgtttaatgtcttatgaaattttcatgaacaatccaagcataattgttaagaacacgtgtattaaattcatgtaagtggaataaaagttttatgaatggacttttcaactactttctctacagcttttcatgtaaattagtcttggttctgaaacttctctaaaggaaattgtacattttttgaaatttattccttattccctcttggcagctaatgggctcttaccaagtttaaacacaaaatttatcataacaaaaatactactaatataactactgtttccatgtcccatgatcccctctcttcctccccaccctgaaaaaaatgagttcctattttttctgggagagggggggattgattagaaaaaaatgtagtgtgttccatttaaaattttggcatatggcattttctaacttaggaagccacaatgttcttggcccatcatgacattgggtagcattaactgtaagttttgtgcttccaaatcactttttggtttttaagaatttcttgatactcttatagcctgccttcaattttgatcctctattctctaaataatgatggggctaagttatacccaaagctcactttacaaaatatttcctcagtactttgcagaaaacaccaaacaaaaatgccattttaaaaaaggtgtattttttcttttagaatgtaagctcctcaagagcagggacaatgttttctgtatgttctattgtgcctagtacactgtaaatgctcaataaatattgatgatgggaggcagtgagtcttgatgataagggtgagaaactgaaatcccaaacactgttttgttgcttgttttattatgacctcagattaaattgggaaatattggcccttttgaataattgtcccaaatattacattcaaataaaagtgcaatgga

SEQ ID NO: 310699 - DNA, 2121 bp, Homo sapiens
gatctagagatccccgtgtatatcgatgccactaaaaaacagcagatggctcgagaatacagagagaaaattgagacggagctaagagatatctgcaatgatgtactgtctcttttggaaaagttcttgatccccaatgcttcacaagcagagagcaaagtcttctatttgaaaatgaaaggagattactaccgttacttggctgaggttgccgctggtgatgacaagaaagggattgtcgatcagtcacaacaagcataccaagaagcttttgaaatcagcaaaaaggaaatgcaaccaacacatcctatcagactgggtctggcccttaacttctctgtgttctattatgagattctgaactccccagagaaagcctgctctcttgcaaagacagcttttgatgaagccattgctgaacttgatacattaagtgaagagtcatacaaagacagcacgctaataatgcaattactgagagacaacttgacattgtggacatcggatacccaaggagacgaagctgaagcaggagaaggaggggaaaattaaccggccttccaacttttgtctgcctcattctaaaatttacacagtagaccatttgtcatccatgctgtcccacaaatagttttttgtttacgatttatgacaggtttatgttacttctatttgaatttctatatttcccatgtggtttttatgtttaatattaggggagtagagccagttaacatttagggagttatctgttttcatcttgaggtggccaatatggggatgtggaatttttatacaagttataagtgtttggcatagtacttttggtacattgtggcttcaaaagggccagtgtaaaactgcttccatgtctaagcaaagaaaactgcctacatactggtttgtcctggcggggaataaaagggatcattggttccagtcacaggtgtagtaattgtgggtactttaaggtttggagcacttacaaggctgtggtagaatcataccccatggataccacatattaaaccatgtatatctgtggaatactcaatgtgtacacctttgactacagctgcagaagtgttcctttagacaaagttgtgacccattttactctggataagggcagaaacggttcacattccattatttgtaaagttacctgctgttagctttcattatttttgctacactcattttatttgtatttaaatgttttaggcaacctaagaacaaatgtaaaagtaaagatgcaggaaaaatgaattgcttggtattcattacttcatgtatatcaagcacagcagtaaaacaaaaacccatgtatttaacttttttttaggatttttgcttttgtgatttttttttttttttttgatacttgcctaacatgcatgtgctgtaaaaatagttaacagggaaataacttgagatgatggctagctttgtttaatgtcttatgaaattttcatgaacaatccaagcataattgttaagaacacgtgtattaaattcatgtaagtggaataaaagttttatgaatggacttttcaactactttctctacagcttttcatgtaaattagtcttggttctgaaacttctctaaaggaaattgtacattttttgaaatttattccttattccctcttggcagctaatgggctcttaccaagtttaaacacaaaatttatcataacaaaaatactactaatataactactgtttccatgtcccatgatcccctctcttcctccccaccctgaaaaaaatgagttcctattttttctgggagagggggggattgattagaaaaaaatgtagtgtgttccatttaaaattttggcatatggcattttctaacttaggaagccacaatgttcttggcccatcatgacattgggtagcattaactgtaagttttgtgcttccaaatcactttttggtttttaagaatttcttgatactcttatagcctgccttcaattttgatcctttattctttctatttgtcaggtgcacaagattgggttaccctcggtttgtcacaactcttatgggtgccggtctgggccgtgatcttgggcaccagtgtaggcccggtcttgggtgtccttc

SEQ ID NO: 310700 - DNA, 2179 bp, Homo sapiens
ctcctcaaggagaactaaaaaccactgcttagcgaaataaaagaggactcatacaaatggaagaacattccacgctcatggataggaagaaatcaatattgttaaaatgtctttaccacccccaagcaaaccgcagatacagtgcaactcctctcaaaataccgatgaacatacttgacatgttacttctatttgaatttctatatttcccatgtggtttttatgtttaatattaggggagtagagccagttaacatttagggagttatctgttttcatcttgaggtggccaatatggggatgtggaatttttatacaagttataagtgtttggcatagtacttttggtacattgtggcttcaaaagggccagtgtaaaactgcttccatgtctaagcaaagaaaactgcctacatactggtttgtcctggcggggaagtttggagcacttacaaggctgtggtagaatcataccccatggataccacatattaaaccatgtatatctgtggaatactcaatgtgtacacctttgactacagctgcagaagtgttcctttagacaaagttgtgacccattttactctggataagggcagaaacggttcacattccattatttgtaaagttacctgctgttagctttcattatttttgctacactcattttatttgtatttaaatgttttaggcaacctaagaacaaatgtaaaagtaaagatgcaggaaaaatgaattgcttggtattcattacttcatgtatatcaagcacagcagtaaaacaaaaacccatgtatttaacttttttttaggatttttgcttttgtgatttttttttttttttttgatacttgcctaacatgcatgtgctgtaaaaatagttaacagggaaataacttgagatgatggctagctttgtttaatgtcttatgaaattttcatgaacaatccaagcataattgttaagaacacgtgtattaaattcatgtaagtggaataaaagttttatgaatggacttttcaactactttctctacagcttttcatgtaaattagtcttggttctgaaacttctctaaaggaaattgtacattttttgaaatttattccttattccctcttggcagctaatgggctcttaccaagtttaaacacaaaatttatcataacaaaaatactactaatataactactgtttccatgtcccatgatcccctctcttcctccccaccctgaaaaaaatgagttcctattttttctgggagagggggggattgattagaaaaaaatgtagtgtgttccatttaaaattttggcatatggcattttctaacttaggaagccacaatgttcttggcccatcatgacattgggtagcattaactgtaagttttgtgcttccaaatcactttttggtttttaagaatttcttgatactcttatagcctgccttcaattttgatcctttattctttctatttgtcaggtgcacaagattaccttcctgttttagccttctgtcttgtcaccaaccattcttacttggtggccatgtacttggaaaaaggccgcatgatctttctggctccactcagtgtctaaggcaccctgcttcctttgcttgcatcccacagactatttccctcatcctatttactgcagcaaatctctccttagttgatgagactgtgtttatctccctttaaaaccctacctatcctgaatggtctgtcattgtctgcctttaaaatccttcctctttcttcctcctctattctctaaataatgatggggctaagttatacccaaagctcactttacaaaatatttcctcagtactttgcagaaaacaccaaacaaaaatgccattttaaaaaaggtgtattttttcttttagaatgtaagctcctcaagagcagggacaatgttttctgtatgttctattgtgcctagtacactgtaaatgctcaataaatattgatgatgggaggcagtgagtcttgatgataagggtgagaaactgaaatcccaaacactgttttgttgcttgttttattatgacctcagattaaattgggaaatattggcccttttgaataattgtcccaaatattacattcaaataaaagtgcaatggagaccttggggtctttatttccaggagaaaagataccttctg

SEQ ID NO: 310701 - DNA, 1960 bp, Homo sapiens
gatctagagatccccgtgtatatcgatgccactaaaaaacagcagatggctcgagaatacagagagaaaattgagacggagctaagagatatctgcaatgatgtactgtctcttttggaaaagttcttgatccccaatgcttcacaagcagagagcaaagtcttctatttgaaaatgaaaggagattactaccgttacttggctgaggttgccgctggtgatgacaagaaagggattgtcgatcagtcacaacaagcataccaagaagcttttgaaatcagcaaaaaggaaatgcaaccaacacatcctatcagactgggtctggcccttaacttctctgtgttctattatgagattctgaactccccagagaaagcctgctctcttgcaaagacagcttttgatgaagccattgctgaacttgatacattaagtgaagagtcatacaaagacagcacgctaataatgcaattactgagagacaacttgacattgtggacatcggatacccaaggagacgaagctgaagcaggagaaggaggggaaaattaaccggccttccaacttttgtctgcctcattctaaaatttacacagtagaccatttgtcatccatgctgtcccacaaatagttttttgtttacgatttatgacaggtttatgttacttctatttgaatttctatatttcccatgtggtttttatgtttaatattaggggagtagagccagttaacatttagggagttatctgttttcatcttgaggtggccaatatggggatgtggaatttttatacaagttataagtgtttggcatagtacttttggtacattgtggcttcaaaagggccagtgtaaaactgcttccatgtctaagcaaagaaaactgcctacatactggtttgtcctggcggggaataaaagggatcattggttccagtcacaggtgtagtaattgtgggtactttaaggtttggagcacttacaaggctgtggtagaatcataccccatggataccacatattaaaccatgtatatctgtggaatactcaatgtgtacacctttgactacagctgcagaagtgttcctttagacaaagttgtgacccattttactctggataagggcagaaacggttcacattccattatttgtaaagttacctgctgttagctttcattatttttgctacactcattttatttgtatttaaatgttttaggcaacctaagaacaaatgtaaaagtaaagatgcaggaaaaatgaattgcttggtattcattacttcatgtatatcaagcacagcagtaaaacaaaaacccatgtatttaacttttttttaggatttttgcttttgtgatttttttttttttttttgatacttgcctaacatgcatgtgctgtaaaaatagttaacagggaaataacttgagatgatggctagctttgtttaatgtcttatgaaattttcatgaacaatccaagcataattgttaagaacacgtgtattaaattcatgtaagtggaataaaagttttatgaatggacttttcaactactttctctacagcttttcatgtaaattagtcttggttctgaaacttctctaaaggaaattgtacattttttgaaatttattccttattccctcttggcagctaatgggctcttaccaagtttaaacacaaaatttatcataacaaaaaaaaaacatagataagaaaaaaaaattgtggcgggggcaggcctaaagaagaagttttaaaaccacttccctggggccgggccccaagtggtatattaaacactggggccaaagcgtggtcccagagaaaactcggcccagcgataggggtgtagttcccccataaaagagccgcggcggcgccggggtttgaaacacccaggggtcgcggcctacggggctaccagggccgcgcgagccgccgcggagggcg

SEQ ID NO: 310702 - DNA, 1549 bp, Homo sapiens
gatctagagatccccgtgtatatcgatgccactaaaaaacagcagatggctcgagaatacagagagaaaattgagacggagctaagagatatctgcaatgatgtactgtctcttttggaaaagttcttgatccccaatgcttcacaagcagagagcaaagtcttctatttgaaaatgaaaggagattactaccgttacttggctgaggttgccgctggtgatgacaagaaagggattgtcgatcagtcacaacaagcataccaagaagcttttgaaatcagcaaaaaggaaatgcaaccaacacatcctatcagactgggtctggcccttaacttctctgtgttctattatgagattctgaactccccagagaaagcctgctctcttgcaaagacagcttttgatgaagccattgctgaacttgatacattaagtgaagagtcatacaaagacagcacgctaataatgcaattactgagagacaacttgacattgtggacatcggatacccaaggagacgaagctgaagcaggagaaggaggggaaaattaaccggccttccaacttttgtctgcctcattctaaaatttacacagtagaccatttgtcatccatgctgtcccacaaatagttttttgtttacgatttatgacaggtttatgttacttctatttgaatttctatatttcccatgtggtttttatgtttaatattaggggagtagagccagttaacatttagggagttatctgttttcatcttgaggtggccaatatggggatgtggaatttttatacaagttataagtgtttggcatagtacttttggtacattgtggcttcaaaagggccagtgtaaaactgcttccatgtctaagcaaagaaaactgcctacatactggtttgtcctggcggggaataaaagggatcattggttccagtcacaggtgtagtaattgtgggtactttaaggtttggagcacttacaaggctgtggtagaatcataccccatggataccacatattaaaccatgtatatctgtggaatactcaatgtgtacacctttgactacagctgcagaagtgttcctttagacaaagttgtgacccattttactctggataagggcagaaacggttcacattccattatttgtaaagttacctgctgttagctttcattatttttgctacactcattttatttgtatttaaatgttttaggcaacctaagaacaaatgtaaaagtaaagatgcaggaaaaatgaattgcttggtattcattacttcatgtatatcaagcacagcagtaaaacaaaaacccatgtatttaacttttttttaggatttttgcttttgtgatttttttttttttttttgatacttgcctaacatgcatgtgctgtaaaaatagttaacagggaaataacttgagatgatggctagctttgtttaatgtcttatgaaattttcatgaacaatccaagcataattgttaagaacacgtgtattaaattcatgtaagtggaataaaagttttatgaatgga

SEQ ID NO: 310703 - DNA, 1529 bp, Homo sapiens
gatctagagatccccgtgtatatcgatgccactaaaaaacagcagatggctcgagaatacagagagaaaattgagacggagctaagagatatctgcaatgatgtactgtctcttttggaaaagttcttgatccccaatgcttcacaagcagagagcaaagtcttctatttgaaaatgaaaggagattactaccgttacttggctgaggttgccgctggtgatgacaagaaagggattgtcgatcagtcacaacaagcataccaagaagcttttgaaatcagcaaaaaggaaatgcaaccaacacatcctatcagactgggtctggcccttaacttctctgtgttctattatgagattctgaactccccagagaaagcctgctctcttgcaaagacagcttttgatgaagccattgctgaacttgatacattaagtgaagagtcatacaaagacagcacgctaataatgcaattactgagagacaacttgacattgtggacatcggatacccaaggagacgaagctgaagcaggagaaggaggggaaaattaaccggccttccaacttttgtctgcctcattctaaaatttacacagtagaccatttgtcatccatgctgtcccacaaatagttttttgtttacgatttatgacaggtttatgttacttctatttgaatttctatatttcccatgtggtttttatgtttaatattaggggagtagagccagttaacatttagggagttatctgttttcatcttgaggtggccaatatggggatgtggaatttttatacaagttataagtgtttggcatagtacttttggtacattgtggcttcaaaagggccagtgtaaaactgcttccatgtctaagcaaagaaaactgcctacatactggtttgtcctggcggggaataaaagggatcattggttccagtcacaggtgtagtaattgtgggtactttaaggtttggagcacttacaaggctgtggtagaatcataccccatggataccacatattaaaccatgtatatctgtggaatactcaatgtgtacacctttgactacagctgcagaagtgttcctttagacaaagttgtgacccattttactctggataagggcagaaacggttcacattccattatttgtaaagttacctgctgttagctttcattatttttgctacactcattttatttgtatttaaatgttttaggcaacctaagaacaaatgtaaaagtaaagatgcaggaaaaatgaattgcttggtattcattacttcatgtatatcaagcacagcagtaaaacaaaaacccatgtatttaacttttttttaggatttttgcttttgtgatttttttttttttttttgatacttgcctaacatgcatgtgctgtaaaaatagttaacagggaaataacttgagatgatggctagctttgtttaatgtcttatgaaattttcatgaacaatccaagcataattgttaagaacacgtgtattaaattcatgtaagtgga

SEQ ID NO: 310704 - DNA, 1587 bp, Homo sapiens
gatctagagatccccgtgtatatcgatgccactaaaaaacagcagatggctcgagaatacagagagaaaattgagacggagctaagagatatctgcaatgatgtactgtctcttttggaaaagttcttgatccccaatgcttcacaagcagagagcaaagtcttctatttgaaaatgaaaggagattactaccgttacttggctgaggttgccgctggtgatgacaagaaagggattgtcgatcagtcacaacaagcataccaagaagcttttgaaatcagcaaaaaggaaatgcaaccaacacatcctatcagactgggtctggcccttaacttctctgtgttctattatgagattctgaactccccagagaaagcctgctctcttgcaaagacagcttttgatgaagccattgctgaacttgatacattaagtgaagagtcatacaaagacagcacgctaataatgcaattactgagagacaacttgacattgtggacatcggatacccaaggagacgaagctgaagcaggagaaggaggggaaaattaaccggccttccaacttttgtctgcctcattctaaaatttacacagtagaccatttgtcatccatgctgtcccacaaatagttttttgtttacgatttatgacaggtttatgttacttctatttgaatttctatatttcccatgtggtttttatgtttaatattaggggagtagagccagttaacatttagggagttatctgttttcatcttgaggtggccaatatggggatgtggaatttttatacaagttataagtgtttggcatagtacttttggtacattgtggcttcaaaagggccagtgtaaaactgcttccatgtctaagcaaagaaaactgcctacatactggtttgtcctggcggggaataaaagggatcattggttccagtcacaggtgtagtaattgtgggtactttaaggtttggagcacttacaaggctgtggtagaatcataccccatggataccacatattaaaccatgtatatctgtggaatactcaatgtgtacacctttgactacagctgcagaagtgttcctttagacaaagttgtgacccattttactctggataagggcagaaacggttcacattccattatttgtaaagttacctgctgttagctttcattatttttgctacactcattttatttgtatttaaatgttttaggcaacctaagaacaaatgtaaaagtaaagatgcaggaaaaatgaattgcttggtattcattacttcatgtatatcaagcacagcagtaaaacaaaaacccatgtatttaacttttttttaggatttttgcttttgtgatttttttttttttttttgatacttgcctaacatgcatgtgctgtaaaaatagttaacagggaaataacttgagatgatggctagctttgtttaatgtcttatgaaattttcatgaacaatccaagcataattgttaagaacacgtgtattaaattcatgtaagtggaataaaagttttatgaatggaaaaaaaaatatacaatattcaactgttcaacaataaaa

SEQ ID NO: 310705 - DNA, 1765 bp, Homo sapiens
gatctagagatccccgtgtatatcgatgccactaaaaaacagcagatggctcgagaatacagagagaaaattgagacggagctaagagatatctgcaatgatgtactgtctcttttggaaaagttcttgatccccaatgcttcacaagcagagagcaaagtcttctatttgaaaatgaaaggagattactaccgttacttggctgaggttgccgctggtgatgacaagaaagggattgtcgatcagtcacaacaagcataccaagaagcttttgaaatcagcaaaaaggaaatgcaaccaacacatcctatcagactgggtctggcccttaacttctctgtgttctattatgagattctgaactccccagagaaagcctgctctcttgcaaagacagcttttgatgaagccattgctgaacttgatacattaagtgaagagtcatacaaagacagcacgctaataatgcaattactgagagacaacttgacattgtggacatcggatacccaaggagacgaagctgaagcaggagaaggaggggaaaattaaccggccttccaacttttgtctgcctcattctaaaatttacacagtagaccatttgtcatccatgctgtcccacaaatagttttttgtttacgatttatgacaggtttatgttacttctatttgaatttctatatttcccatgtggtttttatgtttaatattaggggagtagagccagttaacatttagggagttatctgttttcatcttgaggtggccaatatggggatgtggaatttttatacaagttataagtgtttggcatagtacttttggtacattgtggcttcaaaagggccagtgtaaaactgcttccatgtctaagcaaagaaaactgcctacatactggtttgtcctggcggggaataaaagggatcattggttccagtcacaggtgtagtaattgtgggtactttaaggtttggagcacttacaaggctgtggtagaatcataccccatggataccacatattaaaccatgtatatctgtggaatactcaatgtgtacacctttgactacagctgcagaagtgttcctttagacaaagttgtgacccattttactctggataagggcagaaacggttcacattccattatttgtaaagttacctgctgttagctttcattatttttgctacactcattttatttgtatttaaatgttttaggcaacctaagaacaaatgtaaaagtaaagatgcaggaaaaatgaattgcttggtattcattacttcatgtatatcaagcacagcagtaaaacaaaaacccatgtatttaacttttttttaggatttttgcttttgtgatttttttttttttttttgatacttgcctaacatgcatgtgctgtaaaaatagttaacagggaaataacttgagatgatggctagctttgtttaatgtcttatgaaattttcatgaacaatccaagcataattgttaagaacacgtgtattaaattcatgtaagtggaataaaagttttatgaatggaaaaaaatcaaaaagctttggactcacaattttaccaaaaataaagctattccttagctacaaagataccttcggggggggccccgtcccactttgcctttatggtgccatattcaaatccctggcggcttttacaacgttggaatgtgaccctggggttcccaatttaatggcttggagctccccctttgcccagtggcgtatatacggcggccct

SEQ ID NO: 310706 - DNA, 1768 bp, Homo sapiens
gatctagagatccccgtgtatatcgatgccactaaaaaacagcagatggctcgagaatacagagagaaaattgagacggagctaagagatatctgcaatgatgtactgtctcttttggaaaagttcttgatccccaatgcttcacaagcagagagcaaagtcttctatttgaaaatgaaaggagattactaccgttacttggctgaggttgccgctggtgatgacaagaaagggattgtcgatcagtcacaacaagcataccaagaagcttttgaaatcagcaaaaaggaaatgcaaccaacacatcctatcagactgggtctggcccttaacttctctgtgttctattatgagattctgaactccccagagaaagcctgctctcttgcaaagacagcttttgatgaagccattgctgaacttgatacattaagtgaagagtcatacaaagacagcacgctaataatgcaattactgagagacaacttgacattgtggacatcggatacccaaggagacgaagctgaagcaggagaaggaggggaaaattaaccggccttccaacttttgtctgcctcattctaaaatttacacagtagaccatttgtcatccatgctgtcccacaaatagttttttgtttacgatttatgacaggtttatgttacttctatttgaatttctatatttcccatgtggtttttatgtttaatattaggggagtagagccagttaacatttagggagttatctgttttcatcttgaggtggccaatatggggatgtggaatttttatacaagttataagtgtttggcatagtacttttggtacattgtggcttcaaaagggccagtgtaaaactgcttccatgtctaagcaaagaaaactgcctacatactggtttgtcctggcggggaataaaagggatcattggttccagtcacaggtgtagtaattgtgggtactttaaggtttggagcacttacaaggctgtggtagaatcataccccatggataccacatattaaaccatgtatatctgtggaatactcaatgtgtacacctttgactacagctgcagaagtgttcctttagacaaagttgtgacccattttactctggataagggcagaaacggttcacattccattatttgtaaagttacctgctgttagctttcattatttttgctacactcattttatttgtatttaaatgttttaggcaacctaagaacaaatgtaaaagtaaagatgcaggaaaaatgaattgcttggtattcattacttcatgtatatcaagcacagcagtaaaacaaaaacccatgtatttaacttttttttaggatttttgcttttgtgatttttttttttttttttgatacttgcctaacatgcatgtgctgtaaaaatagttaacagggaaataacttgagatgatggctagctttgtttaatgtcttatgaaattttcatgaacaatccaagcataattgttaagaacacgtgtattaaattcatgtaagtggaataaaagttttatgaatggaaaaaaaaaaaaaaaaaaaaaaaaaaaaaaaaaaaaaaaaaaaaaaaaaaaaaaaaaacaaaaaaaaaaaaaaaaaaacaacaaaaaaaaacaacaaacaaaaacaaaaaaaacacaacaaacacacaacaacacaacaaacaacacaacacaggccggccccccccccccccccccccccccccccccccccaccccccccgccccctcctcaccacgc

SEQ ID NO: 310707 - DNA, 2472 bp, Homo sapiens
gatctagagatccccgtgtatatcgatgccactaaaaaacagcagatggctcgagaatacagagagaaaattgagacggagctaagagatatctgcaatgatgtactgtctcttttggaaaagttcttgatccccaatgcttcacaagcagagagcaaagtcttctatttgaaaatgaaaggagattactaccgttacttggctgaggttgccgctggtgatgacaagaaagggattgtcgatcagtcacaacaagcataccaagaagcttttgaaatcagcaaaaaggaaatgcaaccaacacatcctatcagactgggtctggcccttaacttctctgtgttctattatgagattctgaactccccagagaaagcctgctctcttgcaaagacagcttttgatgaagccattgctgaacttgatacattaagtgaagagtcatacaaagacagcacgctaataatgcaattactgagagacaacttgacattgtggacatcggatacccaaggagacgaagctgaagcaggagaaggaggggaaaattaaccggccttccaacttttgtctgcctcattctaaaatttacacagtagaccatttgtcatccatgctgtcccacaaatagttttttgtttacgatttatgacaggtttatgttacttctatttgaatttctatatttcccatgtggtttttatgtttaatattaggggagtagagccagttaacatttagggagttatctgttttcatcttgaggtggccaatatggggatgtggaatttttatacaagttataagtgtttggcatagtacttttggtacattgtggcttcaaaagggccagtgtaaaactgcttccatgtctaagcaaagaaaactgcctacatactggtttgtcctggcggggaataaaagggatcattggttccagtcacaggtgtagtaattgtgggtactttaaggtttggagcacttacaaggctgtggtagaatcataccccatggataccacatattaaaccatgtatatctgtggaatactcaatgtgtacacctttgactacagctgcagaagtgttcctttagacaaagttgtgacccattttactctggataagggcagaaacggttcacattccattatttgtaaagttacctgctgttagctttcattatttttgctacactcattttatttgtatttaaatgttttaggcaacctaagaacaaatgtaaaagtaaagatgcaggaaaaatgaattgcttggtattcattacttcatgtatatcaagcacagcagtaaaacaaaaacccatgtatttaacttttttttaggatttttgcttttgtgatttttttttttttttttgatacttgcctaacatgcatgtgctgtaaaaatagttaacagggaaataacttgagatgatggctagctttgtttaatgtcttatgaaattttcatgaacaatccaagcataattgttaagaacacgtgtattaaattcatgtaagtggaataaaagttttatgaatggaaacaaaaaaaaaaaaaaaaaaacaacaaaaaaaaacaacaaacaaaaacaaaaaaaacaaaaaaaaaaaaaaaaaaaaaaaaaagcgagagccacagaaaaaaaaaaaaaacacaacaagagagagagaacaagaaagaaatggagcgcaccaacatatattcgtacagaggaggggcacaccacatagagtgatgaaaataaataacacgacaagagcggcagcccgtataatataagactacatggagagagacaaacgacggaagacggacaataggaaaagaagaagacacaactcatgctggggtgaacgaaaaaaaaatgtagacacccccacaagatataaagaaccccccacatgccaaaaaaacacaccaagacgaacgaaagcacatacggcccaaaacacacaagcgaaaatatactgtcgcgcaggaacaaaacaagtacagaccaccgaagaacagagagaagaaaccaaaaagatcaaaaacaggcaccgacgaaaaatataccgaaaaaataacaagcaaaaaatcagaaacccaacaaaaagacaagaaaaaacaaagcaaacaacagaagcgcacacgatcagcaccaccactgccaacacgacgatcaaacagaaaagagaaacggacagaccaaagaccacaacaaccacccacagacacaaacacagaaaaagacagccacgcaacggacacacccgacaacagaaggaagaaaagaggagaaaaaaagagacggaaaaaagagaaaggaacagagaaaaaacggaccaaaagaggagcagcaagcgcgacaagacaaagtaaaaagaaaagcaagacacaaagacagcaggagaaagaagagagaggagaagagacaagaagagaaagcagacgaagccgcaagaggaggacgcaacgcata

SEQ ID NO: 310708 - DNA, 1487 bp, Homo sapiens
gatctagagatccccgtgtatatcgatgccactaaaaaacagcagatggctcgagaatacagagagaaaattgagacggagctaagagatatctgcaatgatgtactgtctcttttggaaaagttcttgatccccaatgcttcacaagcagagagcaaagtcttctatttgaaaatgaaaggagattactaccgttacttggctgaggttgccgctggtgatgacaagaaagggattgtcgatcagtcacaacaagcataccaagaagcttttgaaatcagcaaaaaggaaatgcaaccaacacatcctatcagactgggtctggcccttaacttctctgtgttctattatgagattctgaactccccagagaaagcctgctctcttgcaaagacagcttttgatgaagccattgctgaacttgatacattaagtgaagagtcatacaaagacagcacgctaataatgcaattactgagagacaacttgacattgtggacatcggatacccaaggagacgaagctgaagcaggagaaggaggggaaaattaaccggccttccaacttttgtctgcctcattctaaaatttacacagtagaccatttgtcatccatgctgtcccacaaatagttttttgtttacgatttatgacaggtttatgttacttctatttgaatttctatatttcccatgtggtttttatgtttaatattaggggagtagagccagttaacatttagggagttatctgttttcatcttgaggtggccaatatggggatgtggaatttttatacaagttataagtgtttggcatagtacttttggtacattgtggcttcaaaagggccagtgtaaaactgcttccatgtctaagcaaagaaaactgcctacatactggtttgtcctggcggggaataaaagggatcattggttccagtcacaggtgtagtaattgtgggtactttaaggtttggagcacttacaaggctgtggtagaatcataccccatggataccacatattaaaccatgtatatctgtggaatactcaatgtgtacacctttgactacagctgcagaagtgttcctttagacaaagttgtgacccattttactctggataagggcagaaacggttcacattccattatttgtaaagttacctgctgttagctttcattatttttgctacactcattttatttgtatttaaatgttttaggcaacctaagaacaaatgtaaaagtaaagatgcaggaaaaatgaattgcttggtattcattacttcatgtatatcaagcacagcagtaaaacaaaaacccatgtatttaacttttttttaggatttttgcttttgtgatttttttttttttttttgatacttgcctaacatgcatgtgctgtaaaaatagttaacagggaaataacttgagatgatggctagctttgtttaatgtcttatgtgtaagtggtataaagtttttt

SEQ ID NO: 310709 - DNA, 1506 bp, Homo sapiens
  misc_feature (1431)..(1431): n is a, c, g, or t
  misc_feature (1475)..(1475): n is a, c, g, or t
  misc_feature (1482)..(1482): n is a, c, g, or t
gatctagagatccccgtgtatatcgatgccactaaaaaacagcagatggctcgagaatacagagagaaaattgagacggagctaagagatatctgcaatgatgtactgtctcttttggaaaagttcttgatccccaatgcttcacaagcagagagcaaagtcttctatttgaaaatgaaaggagattactaccgttacttggctgaggttgccgctggtgatgacaagaaagggattgtcgatcagtcacaacaagcataccaagaagcttttgaaatcagcaaaaaggaaatgcaaccaacacatcctatcagactgggtctggcccttaacttctctgtgttctattatgagattctgaactccccagagaaagcctgctctcttgcaaagacagcttttgatgaagccattgctgaacttgatacattaagtgaagagtcatacaaagacagcacgctaataatgcaattactgagagacaacttgacattgtggacatcggatacccaaggagacgaagctgaagcaggagaaggaggggaaaattaaccggccttccaacttttgtctgcctcattctaaaatttacacagtagaccatttgtcatccatgctgtcccacaaatagttttttgtttacgatttatgacaggtttatgttacttctatttgaatttctatatttcccatgtggtttttatgtttaatattaggggagtagagccagttaacatttagggagttatctgttttcatcttgaggtggccaatatggggatgtggaatttttatacaagttataagtgtttggcatagtacttttggtacattgtggcttcaaaagggccagtgtaaaactgcttccatgtctaagcaaagaaaactgcctacatactggtttgtcctggcggggaataaaagggatcattggttccagtcacaggtgtagtaattgtgggtactttaaggtttggagcacttacaaggctgtggtagaatcataccccatggataccacatattaaaccatgtatatctgtggaatactcaatgtgtacacctttgactacagctgcagaagtgttcctttagacaaagttgtgacccattttactctggataagggcagaaacggttcacattccattatttgtaaagttacctgctgttagctttcattatttttgctacactcattttatttgtatttaaatgttttaggcaacctaagaacaaatgtaaaagtaaagatgcaggaaaaatgaattgcttggtattcattacttcatgtatatcaagcacagcagtaaaacaaaaacccatgtatttaacttttttttaggatttttgcttttgtgatttttttttttttttttgatacttgcctaacatgcatgtgctgtacttaaatagtacaggaatacttgnatatgctacttgttaagctagaattcagacatcaacatatgtanacctgtntaatcagtagggataaattagatg

SEQ ID NO: 310710 - DNA, 1746 bp, Homo sapiens
gatctagagatccccgtgtatatcgatgccactaaaaaacagcagatggctcgagaatacagagagaaaattgagacggagctaagagatatctgcaatgatgtactgtctcttttggaaaagttcttgatccccaatgcttcacaagcagagagcaaagtcttctatttgaaaatgaaaggagattactaccgttacttggctgaggttgccgctggtgatgacaagaaagggattgtcgatcagtcacaacaagcataccaagaagcttttgaaatcagcaaaaaggaaatgcaaccaacacatcctatcagactgggtctggcccttaacttctctgtgttctattatgagattctgaactccccagagaaagcctgctctcttgcaaagacagcttttgatgaagccattgctgaacttgatacattaagtgaagagtcatacaaagacagcacgctaataatgcaattactgagagacaacttgacattgtggacatcggatacccaaggagacgaagctgaagcaggagaaggaggggaaaattaaccggccttccaacttttgtctgcctcattctaaaatttacacagtagaccatttgtcatccatgctgtcccacaaatagttttttgtttacgatttatgacaggtttatgttacttctatttgaatttctatatttcccatgtggtttttatgtttaatattaggggagtagagccagttaacatttagggagttatctgttttcatcttgaggtggccaatatgatcccctctcttcctccccaccctgaaaaaaatgagttcctattttttctgggagagggggggattgattagaaaaaaatgtagtgtgttccatttaaaattttggcatatggcattttctaacttaggaagccacaatgttcttggcccatcatgacattgggtagcattaactgtaagttttgtgcttccaaatcactttttggtttttaagaatttcttgatactcttatagcctgccttcaattttgatcctttattctttctatttgtcaggtgcacaagattaccttcctgttttagccttctgtcttgtcaccaaccattcttacttggtggccatgtacttggaaaaaggccgcatgatctttctggctccactcagtgtctaaggcaccctgcttcctttgcttgcatcccacagactatttccctcatcctatttactgcagcaaatctctccttagttgatgagactgtgtttatctccctttaaaaccctacctatcctgaatggtctgtcattgtctgcctttaaaatccttcctctttcttcctcctctattctctaaataatgatggggctaagttatacccaaagctcactttacaaaatatttcctcagtactttgcagaaaacaccaaacaaaaatgccattttaaaaaaggtgtattttttcttttagaatgtaagctcctcaagagcagggacaatgttttctgtatgttctattgtgcctagtacactgtaaatgctcaataaatattgatgatgggaggcagtgagtcttgatgataagggtgagaaactgaaatcccaaacactgttttgttgcttgttttattatgacctcagattaaattgggaaatattggcccttttgaataattgtcccaaatattacattcaaataaaagtgcaatggagaccttggggtctttatttccaggagaaaagataccttctg

SEQ ID NO: 310711 - DNA, 1332 bp, Homo sapiens
gatctagagatccccgtgtatatcgatgccactaaaaaacagcagatggctcgagaatacagagagaaaattgagacggagctaagagatatctgcaatgatgtactgtctcttttggaaaagttcttgatccccaatgcttcacaagcagagagcaaagtcttctatttgaaaatgaaaggagattactaccgttacttggctgaggttgccgctggtgatgacaagaaagggattgtcgatcagtcacaacaagcataccaagaagcttttgaaatcagcaaaaaggaaatgcaaccaacacatcctatcagactgggtctggcccttaacttctctgtgttctattatgagattctgaactccccagagaaagcctgctctcttgcaaagacagcttttgatgaagccattgctgaacttgatacattaagtgaagagtcatacaaagacagcacgctaataatgcaattactgagagacaacttgacattgtggacatcggatacccaaggagacgaagctgaagcaggagaaggaggggaaaattaaccggccttccaacttttgtctgcctcattctaaaatttacacagtagaccatttgtcatccatgctgtcccacaaatagttttttgtttacgatttatgacaggtttatgttacttctatttgaatttctatatttcccatgtggtttttatgtttaatattaggggagtagagccagttaacatttagggagttatctgttttcatcttgaggtggccaatatggggatgtggaatttttatacaagttataagtgtttggcatagtacttttggtacattgtggcttcaaaagggccagtgtaaaactgcttccatgtctaagcaaagaaaactgcctacatactggtttgtcctggcggggaataaaagggatcattggttccagtcacaggtgtagtaattgtgggtactttaaggtttggagcacttacaaggctgtggtagaatcataccccatggataccacatattaaaccatgtatatctgtggaatactcaatgtgtacacctttgactacagctgcagaagtgttcctttagacaaagttgtgacccattttactctggataagggcagaaacggttcacattccattatttgaagtagttatactcctgggcttaacgtagtttacgggcctggggacgaaatccattactagaaaacgcttttacactgtaaaaacaaaaataaaaaagaaacctggaaaagggatagggaatacaggaacgtggggcctttggggggtaccggacgctcgaattccggtacaccag

SEQ ID NO: 310712 - DNA, 1158 bp, Homo sapiens
gatctagagatccccgtgtatatcgatgccactaaaaaacagcagatggctcgagaatacagagagaaaattgagacggagctaagagatatctgcaatgatgtactgtctcttttggaaaagttcttgatccccaatgcttcacaagcagagagcaaagtcttctatttgaaaatgaaaggagattactaccgttacttggctgaggttgccgctggtgatgacaagaaagggattgtcgatcagtcacaacaagcataccaagaagcttttgaaatcagcaaaaaggaaatgcaaccaacacatcctatcagactgggtctggcccttaacttctctgtgttctattatgagattctgaactccccagagaaagcctgctctcttgcaaagacagcttttgatgaagccattgctgaacttgatacattaagtgaagagtcatacaaagacagcacgctaataatgcaattactgagagacaacttgacattgtggacatcggatacccaaggagacgaagctgaagcaggagaaggaggggaaaattaaccggccttccaacttttgtctgcctcattctaaaatttacacagtagaccatttgtcatccatgctgtcccacaaatagttttttgtttacgatttatgacaggtttatgttacttctatttgaatttctatatttcccatgtggtttttatgtttaatattaggggagtagagccagttaacatttagggagttatctgttttcatcttgaggtggccaatatggggatgtggaatttttatacaagttataagtgtttggcatagtacttttggtacattgtggcttcaaaagggccagtgtaaaactgcttccatgtctaagcaaagaaaactgcctacatactggtttgtcctggcggggaataaaagggatcattggttccagtcacaggtgtagtaattgtgggtactttaaggtttggagcacttacaaggctgtggtagaatcataccccatggataccacatattaaaccatgtatatctgtggaatactcaatgtgtacacctttgactacagctgcagaagtgttcctttagacaaagttgtgacccattttactctggataagggcagtctaccatgcagcgctacggtaccga

SEQ ID NO: 310713 - DNA, 1145 bp, Homo sapiens
gatctagagatccccgtgtatatcgatgccactaaaaaacagcagatggctcgagaatacagagagaaaattgagacggagctaagagatatctgcaatgatgtactgtctcttttggaaaagttcttgatccccaatgcttcacaagcagagagcaaagtcttctatttgaaaatgaaaggagattactaccgttacttggctgaggttgccgctggtgatgacaagaaagggattgtcgatcagtcacaacaagcataccaagaagcttttgaaatcagcaaaaaggaaatgcaaccaacacatcctatcagactgggtctggcccttaacttctctgtgttctattatgagattctgaactccccagagaaagcctgctctcttgcaaagacagcttttgatgaagccattgctgaacttgatacattaagtgaagagtcatacaaagacagcacgctaataatgcaattactgagagacaacttgacattgtggacatcggatacccaaggagacgaagctgaagcaggagaaggaggggaaaattaaccggccttccaacttttgtctgcctcattctaaaatttacacagtagaccatttgtcatccatgctgtcccacaaatagttttttgtttacgatttatgacaggtttatgttacttctatttgaatttctatatttcccatgtggtttttatgtttaatattaggggagtagagccagttaacatttagggagttatctgttttcatcttgaggtggccaatatggggatgtggaatttttatacaagttataagtgtttggcatagtacttttggtacattgtggcttcaaaagggccagtgtaagctcctcaagagcagggacaatgttttctgtatgttctattgtgcctagtacactgtaaatgctcaataaatattgatgatgggaggcagtgagtcttgatgataagggtgagaaactgaaatcccaaacactgttttgttgcttgttttattatgacctcagattaaattgggaaatattggcccttttgaataattgtcccaaatattacattcaaataaaagtgcaatggaaaaaaaaaaagtcgacgcggccgcgaatttagtagtagtagtaggcggccgct

SEQ ID NO: 310714 - DNA, 653 bp, Homo sapiens
gatctagagatccccgtgtatatcgatgccactaaaaaacagcagatggctcgagaatacagagagaaaattgagacggagctaagagatatctgcaatgatgtactgtctcttttggaaaagttcttgatccccaatgcttcacaagcagagagcaaagtcttctatttgaaaatgaaaggagattactaccgttacttggctgaggttgccgctggtgatgacaagaaagggattgtcgatcagtcacaacaagcataccaagaagcttttgaaatcagcaaaaaggaaatgcaaccaacacatcctatcagactgggtctggcccttaacttctctgtgttctattatgagattctgaactccccagagaaagcctgctctcttgcaaagacagcttttgatgaagccattgctgaacttgatacattaagtgaagagtcatacaaagacagcacgctaataatgcaattactgagagacaacttgacattgtggacatcggatacccaaggagacgaagctgaagcaggagaaggaggggaaaattaaccggccttccaacttttgtctgcctcattctaaaatttacacagtagaccatttgtcatccatgctgtcccacagaaaaataaatgtccctgccaacgtca

SEQ ID NO: 310715 - DNA, 1020 bp, Homo sapiens
gatctagagatccccgtgtatatcgatgccactaaaaaacagcagatggctcgagaatacagagagaaaattgagacggagctaagagatatctgcaatgatgtactgtctcttttggaaaagttcttgatccccaatgcttcacaagcagagagcaaagtcttctatttgaaaatgaaaggagattactaccgttacttggctgaggttgccgctggtgatgacaagaaagggattgtcgatcagtcacaacaagcataccaagaagcttttgaaatcagcaaaaaggaaatgcaaccaacacatcctatcagactgggtctggcccttaacttctctgtgttctattatgagattctgaactccccagagaaagcctgctctcttgcaaagacagcttttgatgaagccattgctgaacttgatacattaagtgaagagtcatacaaagacagcacgctaataatgcaattactgagagacaacttgacagtaagtacataacagcatcattagtgatgaatgtggttgaagaggttatgttttactctagggaatttttttttttattaaatacatcttttaaaattttttctcaacacatttcataggctctcataaatatatctcagctactattaaagtcctatgaaggaaaattacagaaactgaaatattagactgagaactaaaaaatacacacattgatgagttacctgtcttgttaaaatttgttagtatcaaaagtgtgctgagactctacatgttttagttcctttaagaatgattttcttgcccatcaagttgcctccatattggtaaagataatggtagggaattaataacttgagttacaaaatctcaggtatctacagaatccaagtggaagtctattttgcctagcttcttattttaaatgacttaatatgaaaggtcgtgattgtccttgggatactgcagatgtataaaaagaaacagtgtcactatcacaccaggaacatcaacataattccctaataa

SEQ ID NO: 310716 - DNA, 545 bp, Homo sapiens
atcccacacattatgacaaattctgttttaatttccatttagttcaaagtctttttaatatgttacttctatttgaatttctatatttcccatgtggtttttatgtttaatattaggggagtagagccagttaacatttagggagttatctgttttcatcttgaggtggccaatatggggatgtggaatttttatacaagttataagtgtttggcatagtacttttggtacattgtggcttcaaaagggccagtgtaagctcctcaagagcagggacaatgttttctgtatgttctattgtgcctagtacactgtaaatgctcaataaatattgatgatgggaggcagtgagtcttgatgataagggtgagaaactgaaatcccaaacactgttttgttgcttgttttattatgacctcagattaaattgggaaatattggcccttttgaataattgtcccaaatattacattcaaataaaagtgcaatggaaaaaaaaaaagtcgacgcggccgcgaatttagtagtagtagtaggcggccgct

SEQ ID NO: 310717 - DNA, 245 bp, Homo sapiens
gaactttatctgattctttgcaccatctcccagcatctagactagtgtctggcacccatgaatattaggtacccagaaatgttaacatgaattaattttccaaaagtggttaaattagtatatctgaagattaacttactgtagtgagattttaatcatgatctagcttaagacgagttttgaaggcaagaactgtctttttttaggagtttttgtatatcgtttggtatttatttatttatttt

SEQ ID NO: 310718 - DNA, 3654 bp, Homo sapiens
ccctgtgaggctcggagcccgggtgtcaggcgccacggcgcatgctccgcaatcatcttctttaccctggagctgctgctgctgctgctgcttttgcttttggggctgagtttaataagcgagcgagcgagcaagcgagcgcggggggaaaaaggcagagaatgtccgccatctaccctccgctcctgggcgcgctctcattcatagcagcctcttcatgaattacagctgagggggggcggaggaggggggggtaccacacaacaccccagcaaacctccgggcccccaggcatggctagctcgtgtgccgtgcaggtgaagctggagctggggcaccgcgcccaggtgaggaaaaaacccaccgtggagggcttcacccacgactggatggtgttcgtacgcggtccggagcacagtaacatacagcactttgtggagaaagtcgtcttccacttgcacgaaagctttcctaggccaaaaagagtgtgcaaagatccaccttacaaagtagaagaatctgggtatgctggtttcattttgccaattgaagtttattttaaaaacaaggaagaacctaggaaagtccgctttgattatgacttattcctgcatcttgaaggccatccaccagtgaatcacctccgctgtgaaaagctaactttcaacaaccccacagaggactttaggagaaagttgctgaaggcaggaggggaccctaataggagtattcataccagcagcagcagcagcagcagcagtagcagcagcagcagcagcagcagcagcagcagtagcagcagcagcagcagcagcagcagcagcagtagcagcagcagtagcagcagcagcagcagcagtagtaccagtttttcaaagcctcacaaattaatgaaggagcacaaggaaaaaccttctaaagactccagagaacataaaagtgccttcaaagaaccttccagggatcacaacaaatcttccaaagaatcctctaagaaacccaaagaaaataaaccactgaaagaagagaaaatagttcctaagatggccttcaaggaacctaaacccatgtcaaaagagccaaaaccagatagtaacttactcaccatcaccagtggacaagataagaaggctcctagtaaaaggccgcccatttcagattctgaagaactctcagccaaaaaaaggaaaaagagtagctcagaggctttatttaaaagtttttctagcgcaccaccactgatactcacttgttctgctgacaaaaaacagataaaagataaatctcatgtcaagatgggaaaggtcaaaattgaaagtgagacatcagagaagaagaaatcaacgttaccgccatttgatgatattgtggatcccaatgattcagatgtggaggagaatatatcctctaaatctgattctgaacaacccagtcctgccagctccagctccagctccagctccagcttcacaccatcccagaccaggcaacaaggtcctttgaggtctataatgaaagatctgcattctgatgacaatgaggaggaatcagatgaagtggaggataacgacaatgactctgaaatggagaggcctgtaaatagaggaggcagccgaagtcgcagagttagcttaagtgatggcagcgatagtgaaagcagttctgcttcttcacccctacatcacgaacctccaccacccttactaaaaaccaacaacaaccagattcttgaagtgaaaagtccaataaagcaaagcaaatcagataagcaaataaagaatggtgaatgtgacaaggcatacctagatgaactggtagagcttcacagaaggttaatgacattgagagaaagacacattctgcagcagatcgtgaaccttatagaagaaactggacactttcatatcacaaacacaacatttgattttgatctttgctcgctggacaaaaccacagtccgtaaactacagagttacctggaaacatctggaacatcctgaggatataacaactggatgcatcaagaactattgtgttttttttttttggttttttttttttttggttgtgattttttgttcttgttgtttatatgaaaacactcaaaatgatgcaaccaaaagggaaaaaataaaaatcaaacaaccttcagctttatttttctttaaagccagtcatcatctcttgataaaggagaggttaaagcaaaccagcctcagcggaccactcttctctccaaggaaatccccgggaagagttagcctggatagccttgaaaacaaacaaatcaaacacaacacaagaaaactcaaagaatgtgtatggtatcatgtatctctctgtggtggttcattccacaggacgaatgcatattcaacacactgccttattacataactgatctatttattatcgcatacagatattctaagtcgttgagggaatgacaccatcagacattataagtacttggtcccgtggatgctctttcaatgcagcacccttgccatcccaagcccagtgaccttactcgtataccgtgccactttccaccaactttttccaagtcctttaactcgttgcagtctgtattttccaccttttgtttttccagttccaggacacagattatcaactggggggaccaaatagccaccttgattttcttctttgtggtctttttcctgaaagttggggcccagtccttggctgtatccatgtaatgatcttggaccatggtagaaaatgcaccaaataggatcatatgaattgctgtctagccttagtcaataaacttgtaggacttttaaacaaaagtgtacctgtaaatgtcctgaatccagcattgttgagctgtcatcaacattcttgtgtctgttttactgttacaatattaggtgaatatggaagtaaaggcattccacaggatcatcatttaaaaaaaaagaattctggtcctgttttctaaaaaaaaaaaactgttgtagaaattcttaatttggatctatttattagtcagagtttcagctttcttcagctgccagtgtgttactcatctttatcctaaaaatctggaatcagagatttttgtttgttcacatatgattctcttagacacttttatatttgaaaaaattaaaatctttctttggggaaaaattcttggttattctgccataacagattatgtattaacttgtagattcagtggttcaatacctgtttagttgcttgctaatatttccagaaggatttcttgtattggtgaaagacggttggggatggggggatttttttgttcttgttgtacccttgttttgaaactagaaatctgtcctgtggcatgcaaaagaaagcaaattatttttaaaagaaaaaaaccaaagtacttttggtgtcattattccatcttctccataagtggagaaatgaaaagtaagaacagctcatcttcaaagtttttactagaaattcagccgaaaagaagagaaatgaagaaatacttctggatccaaaggttcgtcactggatcagccttaagaaagtctctatgtgtgctaatagaccagtatctcccttgtttgttcccatgccagatgctgtcttttcatacagagattaactagtgtctgtacagaaaatggtctttccaga

SEQ ID NO: 310719 - DNA, 1644 bp, Homo sapiens
gaaaattttatttcagagaaggtgtgtgtgtttcttatagtggtcaaaattttgaaaggcacctttttagaatgtttgccgatttatgagaagaccaaatggcgttcataaagcatcattgaaagctctttctacatgaaacacagatggtcttcctctttaggattttcatatcctttgtatgtgagaagagagaaagaagttggacatccatggtttgtatgtctggctggtgtttgagggatcgatcacttatttgttgataagtgaaagtctgaacaacccagtcctgccagctccagctccagctccagctccagcttcacaccatcccagaccaggcaacaaggtcctttgaggtctataatgaaagatctgcattctgatgacaatgaggaggaatcagatgaagtggaggataacgacaatgactctgaaatggagaggcctgtaaatagaggaggcagccgaagtcgcagagttagcttaagtgatggcagcgatagtgaaagcagttctgcttcttcacccctacatcacgaacctccaccacccttactaaaaaccaacaacaaccagagaaacagattcttgcaagtgaaagtccactaagcacagcaatcagataagcaataaagaatggggatgtggacaggctactagatgaacgcgtgagcttcccgaagttatgacctgtggacgacctctgtcgccaccgcaccctccacaacgggcttcttttcacccctgtttgttttgcctgaaaaccccgctcacatcgaatcgttcggaacagggccaaatggcttatagttgatcgtcggtcgggtaaacagagtctctctctttgtttccgaatatctatttttctcttatcaccacacgcacgacaaaccctcagtaccagtagcacacacgcaccagcacgacctatcgactcacacacgacatcactaacctagtcgacagctccagtcgacagtgcgtaggactcatacaaccaaccacgctatccagaggcagaagcacaactaggcccgacgcgcacgaaggcgcgagtggggacgcggaggcagccgagacgcgaggagcgccgagacgccaatagagagaaggtgagagccagcgcgcacgagggccgaggagacgacacgtcacagtggaaaccggagccaaggccgagaaggcaagcgcgagccggacaacgctgacaacaacgaccacacgcaagcgacacaccggagactgcgcgagagcacacgacacaggagcagaacatgcagcagcgcaggcgagcagacggagagagagagcgagcagcgaacgaacaaacggccaggaggccacacacgagacgccgaagcaaacacccacaggcacaagccaagcgagcagagagcaggggaacgagacggagcagcacgaacgaacagagccacaggcacacaaccgaagccgcacagcgcgagcgcagagcagcgcaacgcagacacccacagcacaccgagacgaaacaaacggcgagacgcctagcagtacgcgcggcgagagcacgcacacgcgagcgagcgcgcgctcgacaccagaccgaacgacaggtcacagagcggagggaccagacggaagccagcacgcagccaccac

SEQ ID NO: 310720 - DNA, 2816 bp, Homo sapiens
ccctgtgaggctcggagcccgggtgtcaggcgccacggcgcatgctccgcaatcatcttctttaccctggagctgctgctgctgctgctgcttttgcttttggggctgagtttaataagcgagcgagcgagcaagcgagcgcggggggaaaaaggcagagaatgtccgccatctaccctccgctcctgggcgcgctctcattcatagcagcctcttcatgaattacagctgagggggggcggaggaggggggggtaccacacaacaccccagcaaacctccgggcccccaggcatggctagctcgtgtgccgtgcaggtgaagctggagctggggcaccgcgcccaggtgaggaaaaaacccaccgtggagggcttcacccacgactggatggtgttcgtacgcggtccggagcacagtaacatacagcactttgtggagaaagtcgtcttccacttgcacgaaagctttcctaggccaaaaagagtgtgcaaagatccaccttacaaagtagaagaatctgggtatgctggtttcattttgccaattgaagtttattttaaaaacaaggaagaacctaggaaagtccgctttgattatgacttattcctgcatcttgaaggccatccaccagtgaatcacctccgctgtgaaaagctaactttcaacaaccccacagaggactttaggagaaagttgctgaaggcaggaggggaccctaataggagtattcataccagcagcagcagcagcagcagcagtagcagcagcagcagcagcagcagcagcagcagtagcagcagcagcagcagcagcagcagcagcagtagcagcagcagtagcagcagcagcagcagcagtagtaccagtttttcaaagcctcacaaattaatgaaggagcacaaggaaaaaccttctaaagactccagagaacataaaagtgccttcaaagaaccttccagggatcacaacaaatcttccaaagaatcctctaagaaacccaaagaaaataaaccactgaaagaagagaaaatagttcctaagatggccttcaaggaacctaaacccatgtcaaaagagccaaaaccagatagtaacttactcaccatcaccagtggacaagataagaaggctcctagtaaaaggccgcccatttcagattctgaagaactctcagccaaaaaaaggaaaaagagtagctcagaggctttatttaaaagtttttctagcgcaccaccactgatactcacttgttctgctgacaaaaaacagataaaagataaatctcatgtcaagatgggaaaggtcaaaattgaaagtgagacatcagagaagaagaaatcaacgttaccgccatttgatgatattgtggatcccaatgattcagatgtggaggagaatatatcctctaaatctgattctgaacaacccagtcctgccagctccagctccagctccagctccagcttcacaccatcccagaccaggcaacaaggtcctttgaggtctataatgaaagatctgcattctgatgacaatgaggaggaatcagatgaagtggaggataacgacaatgactctgaaatggagaggcctgtaaatagaggaggcagccgaagtcgcagagttagcttaagtgatggcagcgatagtgaaagcagttctgcttcttcacccctacatcacgaacctccaccacccttactaaaaaccaacaacaaccagattcttgaagtgaaaagtccaataaagcaaagcaaatcagataagcaaataaagaatggtgaatgtgacaaggcatacctagatgaactggtagagcttcacagaaggttaatgacattgagagaaagacacattctgcagcagatcgtgaaccttatagaagaaactggacactttcatatcacaaacacaacatttgattttgatctttgctcgctggacaaaaccacagtccgtaaactacagagttacctggaaacatctggaacatcctgaggatataacaactggatgcatcaagaactattgtgttttttttttttggttttttttttttttggttgtgattttttgttcttgttgtttatatgaaaacactcaaaatgatgcaaccaaaagggaaaaaataaaaatcaaacaaccttcagctttatttttctttaaagccagtcatcatctcttgataaaggagaggttaaagcaaaccagcctcagcggaccactcttctctccaaggaaatccccgggaagagttagcctggatagccttgaaaacaaacaaatcaaacacaacacaagaaaactcaaagaatgtgtatggtatcatgtatctctctgtggtggttcattccacaggacgaatgcatattcaacacactgccttattacataactgatctatttattatcgcatacagatattctaagtcgttgagggaatgacaccatcagacattataagtacttggtcccgtggatgctctttcaatgcagcacccttgccatcccaagcccagtgaccttactcgtataccgtgccactttccaccaactttttccaagtcctttaactcgttgcagtctgtattttccaccttttgtttttccagttccaggacacagattatcaactggggggaccaaatagccaccttgattttcttctttgtggtctttttcctgaaagttggggcccagtccttggctgtatccatgtaatgatcttggaccatggtagaaaatgcaccaaataggatcatatgaattgctgtctagccttagtcaataaacttgtaggacttttaaacaaaa

SEQ ID NO: 310721 - DNA, 2397 bp, Homo sapiens
gcgccgcgcgggccaggtcccggctcccgcctgcccgcgcgcgcgccacttcggcttggtgaaagtcaccgcagagaaaggaccgtcagtgtgcaaagatccaccttacaaagtagaagaatctgggtatgctggtttcattttgccaattgaagtttattttaaaaacaaggaagaacctaggaaagtccgctttgattatgacttattcctgcatcttgaaggccatccaccagtgaatcacctccgctgtgaaaagctaactttcaacaaccccacagaggactttaggagaaagttgctgaaggcaggaggggaccctaataggagtattcataccagcagcagcagcagcagcagcacagcagcagcagtagcagcagcagcagcagcagcagcagcagcagtagcagcagcagtagcagcagcagcagcagcagtagtaccagtttttcaaagcctcacaaattaatgaaggagcacaaggaaaaaccttctaaagactccagagaacataaaagtgccttcaaagaaccttccagggatcacaacaaatcttccaaagaatcctctaagaaacccaaagaaaataaaccactgaaagaagagaaaatagttcctaagatggccttcaaggaacctaaacccatgtcaaaagagccaaaaccagatagtaacttactcaccatcaccagtggacaagataagaaggctcctagtaaaaggccgcccatttcagattctgaagaactctcagccaaaaaaaggaaaaagagtagctcagaggctttatttaaaagtttttctagcgcaccaccactgatactcacttgttctgctgacaaaaaacagataaaagataaatctcatgtcaagatgggaaaggtcaaaattgaaagtgagacatcagagaagaagaaatcaacgttaccgccatttgatgatattgtggatcccaatgattcagatgtggaggagaatatatcctctaaatctgattctgaacaacccagtcctgccagctccagctccagctccagctccagcttcacaccatcccagaccaggcaacaaggtcctttgaggtctataatgaaagatctgcattctgatgacaatgaggaggaatcagatgaagtggaggataacgacaatgactctgaaatggagaggcctgtaaatagaggaggcagccgaagtcgcagagttagcttaagtgatggcagcgatagtgaaagcagttctgcttcttcacccctacatcacgaacctccaccacccttactaaaaaccaacaacaaccagattcttgaagtgaaaagtccaataaagcaaagcaaatcagataagcaaataaagaatggtgaatgtgacaaggcatacctagatgaactggtagagcttcacagaaggttaatgacattgagagaaagacacattctgcagcagatcgtgaaccttatagaagaaactggacactttcatatcacaaacacaacatttgattttgatctttgctcgctggacaaaaccacagtccgtaaactacagagttacctggaaacatctggaacatcctgaggatataacaactggatgcatcaagaactattgtgttttttttttttggttttttttttttttggttgtgattttttgttcttgttgtttatatgaaaacactcaaaatgatgcaaccaaaagggaaaaaataaaaatcaaacaaccttcagctttatttttctttaaagccagtcatcatctcttgataaaggagaggttaaagcaaaccagcctcagcggaccactcttctctccaaggaaatccccgggaagagttagcctggatagccttgaaaacaaacaaatcaaacacaacacaagaaaactcaaagaatgtgtatggtatcatgtatctctctgtggtggttcattccacaggacgaatgcatattcaacacactgccttattacataactgatctatttattatcgcatacagatattctaagtcgttgagggaatgacaccatcagacattataagtacttggtcccgtggatgctctttcaatgcagcacccttgccatcccaagcccagtgaccttactcgtataccgtgccactttccaccaactttttccaagtcctttaactcgttgcagtctgtattttccaccttttgtttttccagttccaggacacagattatcaactggggggaccaaatagccaccttgattttcttctttgtggtctttttcctgaaagttggggcccagtccttggctgtatccatgtaatgatcttggaccatggtagaaaatgcaccaaataggatcatatgaattgctgtctagccttagtcaataaacttgtaggacttttaaacaaaa

SEQ ID NO: 310722 - DNA, 2950 bp, Homo sapiens
ccctgtgaggctcggagcccgggtgtcaggcgccacggcgcatgctccgcaatcatcttctttaccctggagctgctgctgctgctgctgcttttgcttttggggctgagtttaataagcgagcgagcgagcaagcgagcgcggggggaaaaaggcagagaatgtccgccatctaccctccgctcctgggcgcgctctcattcatagcagcctcttcatgaattacagctgagggggggcggaggaggggggggtaccacacaacaccccagcaaacctccgggcccccaggcatggctagctcgtgtgccgtgcaggtgaagctggagctggggcaccgcgcccaggtgaggaaaaaacccaccgtggagggcttcacccacgactggatggtgttcgtacgcggtccggagcacagtaacatacagcactttgtggagaaagtcgtcttccacttgcacgaaagctttcctaggccaaaaagagtgtgcaaagatccaccttacaaagtagaagaatctgggtatgctggtttcattttgccaattgaagtttattttaaaaacaaggaagaacctaggaaagtccgctttgattatgacttattcctgcatcttgaaggccatccaccagtgaatcacctccgctgtgaaaagctaactttcaacaaccccacagaggactttaggagaaagttgctgaaggcaggaggggaccctaataggagtattcataccagcagcagcagcagcagcagcagtagcagcagcagcagcagcagcagcagcagcagtagcagcagcagcagcagcagcagcagcagcagtagcagcagcagtagcagcagcagcagcagcagtagtaccagtttttcaaagcctcacaaattaatgaaggagcacaaggaaaaaccttctaaagactccagagaacataaaagtgccttcaaagaaccttccagggatcacaacaaatcttccaaagaatcctctaagaaacccaaagaaaataaaccactgaaagaagagaaaatagttcctaagatggccttcaaggaacctaaacccatgtcaaaagagccaaaaccagatagtaacttactcaccatcaccagtggacaagataagaaggctcctagtaaaaggccgcccatttcagattctgaagaactctcagccaaaaaaaggaaaaagagtagctcagaggctttatttaaaagtttttctagcgcaccaccactgatactcacttgttctgctgacaaaaaacagataaaagataaatctcatgtcaagatgggaaaggtcaaaattgaaagtgagacatcagagaagaagaaatcaacgttaccgccatttgatgatattgtggatcccaatgattcagatgtggaggagaatatatcctctaaatctgattctgaacaacccagtcctgccagctccagctccagctccagctccagcttcacaccatcccagaccaggcaacaaggtcctttgaggtctataatgaaagatctgcattctgatgacaatgaggaggaatcagatgaagtggaggataacgacaatgactctgaaatggagaggcctgtaaatagaggaggcagccgaagtcgcagagttagcttaagtgatggcagcgatagtgaaagcagttctgcttcttcacccctacatcacgaacctccaccacccttactaaaaaccaacaacaaccagattcttgaagtgaaaagtccaataaagcaaagcaaatcagataagcaaataaagaatggtgaatgtgacaaggcatacctagatgaactggtagagcttcacagaaggttaatgacattgagagaaagacacattctgcagcagatcgtgaaccttatagaagaaactggacactttcatatcacaaacacaacatttgattttgatctttgctcgctggacaaaaccacagtccgtaaactacagagttacctggaaacatctggaacatcctgaggatataacaactggatgcatcaagaactattgtgttttttttttttggttttttttttttttggttgtgattttttgttcttgttgtttatatgaaaacactcaaaatgatgcaaccaaaagggaaaaaataaaaatcaaacaaccttcagctttatttttctttaaagccagtcatcatctcttgataaaggagaggttaaagcaaaccagcctcagcggaccactcttctctccaaggaaatccccgggaagagttagcctggatagccttgaaaacaaacaaatcaaacacaacacaagaaaactcaaagaatgtgtatggtatcatgtatctctctgtggtggttcattccacaggacgaatgcatattcaacacactgccttattacataactgatctatttattatcgcatacagatattctaagtcgttgagggaatgacaccatcagacattataagtacttggtcccgtggatgctctttcaatgcagcacccttgccatcccaagcccagtgaccttactcgtataccgtgccactttccaccaactttttccaagtcctttaactcgttgcagtctgtattttccaccttttgtttttccagttccaggacacagattatcaactggggggaccaaatagccaccttgattttcttctttgtggtctttttcctgaaagttggggcccagtccttggctgtatccatgtaatgatcttggaccatggtagaaaatgcaccaaataggatcatatgaattgctgtctagccttagtcaataaacttgtaggacttttaaacaaaaaaaaaaacaaaaaaaaaaaaaaaaatctccagggggggcccgggaccaaattcgccctatggggggggggtttacaatccactggccgccattttacaacgtcttagaatggaaaaaccctggggttacccaac

SEQ ID NO: 310723 - DNA, 1805 bp, Homo sapiens
ggggccgcctactactactactgctcgaattcaagcttctaacgatgtacggggccatgtcaaaagagccaaaaccagatagtaacttactcaccatcaccagtggacaagataagaaggctcctagtaaaaggccgcccatttcagattctgaagaactctcagccaaaaaaaggaaaaagagtagctcagaggctttatttaaaagtttttctagcgcaccaccactgatactcacttgttctgctgacaaaaaacagataaaagataaatctcatgtcaagatgggaaaggtcaaaattgaaagtgagacatcagagaagaagaaatcaacgttaccgccatttgatgatattgtggatcccaatgattcagatgtggaggagaatatatcctctaaatctgattctgaacaacccagtcctgccagctccagctccagctccagctccagcttcacaccatcccagaccaggcaacaaggtcctttgaggtctataatgaaagatctgcattctgatgacaatgaggaggaatcagatgaagtggaggataacgacaatgactctgaaatggagaggcctgtaaatagaggaggcagccgaagtcgcagagttagcttaagtgatggcagcgatagtgaaagcagttctgcttcttcacccctacatcacgaacctccaccacccttactaaaaaccaacaacaaccagattcttgaagtgaaaagtccaataaagcaaagcaaatcagataagcaaataaagaatggtgaatgtgacaaggcatacctagatgaactggtagagcttcacagaaggttaatgacattgagagaaagacacattctgcagcagatcgtgaaccttatagaagaaactggacactttcatatcacaaacacaacatttgattttgatctttgctcgctggacaaaaccacagtccgtaaactacagagttacctggaaacatctggaacatcctgaggatataacaactggatgcatcaagaactattgtgttttttttttttggttttttttttttttggttgtgattttttgttcttgttgtttatatgaaaacactcaaaatgatgcaaccaaaagggaaaaaataaaaatcaaacaaccttcagctttatttttctttaaagccagtcatcatctcttgataaaggagaggttaaagcaaaccagcctcagcggaccactcttctctccaaggaaatccccgggaagagttagcctggatagccttgaaaacaaacaaatcaaacacaacacaagaaaactcaaagaatgtgtatggtatcatgtatctctctgtggtggttcattccacaggacgaatgcatattcaacacactgccttattacataactgatctatttattatcgcatacagatattctaagtcgttgagggaatgacaccatcagacattataagtacttggtcccgtggatgctctttcaatgcagcacccttgccatcccaagcccagtgaccttactcgtataccgtgccactttccaccaactttttccaagtcctttaactcgttgcagtctgtattttccaccttttgtttttccagttccaggacacagattatcaactggggggaccaaatagccaccttgattttcttctttgtggtctttttcctgaaagttggggcccagtccttggctgtatccatgtaatgatcttggaccatggtagaaaatgcaccaaataggatcatatgaattgctgtctagccttagtcaataaacttgtaggacttttaaacaaaa

SEQ ID NO: 310724 - DNA, 2672 bp, Homo sapiens
ccctgtgaggctcggagcccgggtgtcaggcgccacggcgcatgctccgcaatcatcttctttaccctggagctgctgctgctgctgctgcttttgcttttggggctgagtttaataagcgagcgagcgagcaagcgagcgcggggggaaaaaggcagagaatgtccgccatctaccctccgctcctgggcgcgctctcattcatagcagcctcttcatgaattacagctgagggggggcggaggaggggggggtaccacacaacaccccagcaaacctccgggcccccaggcatggctagctcgtgtgccgtgcaggtgaagctggagctggggcaccgcgcccaggtgaggaaaaaacccaccgtggagggcttcacccacgactggatggtgttcgtacgcggtccggagcacagtaacatacagcactttgtggagaaagtcgtcttccacttgcacgaaagctttcctaggccaaaaagagtgtgcaaagatccaccttacaaagtagaagaatctgggtatgctggtttcattttgccaattgaagtttattttaaaaacaaggaagaacctaggaaagtccgctttgattatgacttattcctgcatcttgaaggccatccaccagtgaatcacctccgctgtgaaaagctaactttcaacaaccccacagaggactttaggagaaagttgctgaaggcaggaggggaccctaataggagtattcataccagcagcagcagcagcagcagcagtagcagcagcagcagcagcagcagcagcagcagtagcagcagcagcagcagcagcagcagcagcagtagcagcagcagtagcagcagcagcagcagcagtagtaccagtttttcaaagcctcacaaattaatgaaggagcacaaggaaaaaccttctaaagactccagagaacataaaagtgccttcaaagaaccttccagggatcacaacaaatcttccaaagaatcctctaagaaacccaaagaaaataaaccactgaaagaagagaaaatagttcctaagatggccttcaaggaacctaaacccatgtcaaaagagccaaaaccagatagtaacttactcaccatcaccagtggacaagataagaaggctcctagtaaaaggccgcccatttcagattctgaagaactctcagccaaaaaaaggaaaaagagtagctcagaggctttatttaaaagtttttctagcgcaccaccactgatactcacttgttctgctgacaaaaaacagataaaagataaatctcatgtcaagatgggaaaggtcaaaattgaaagtgagacatcagagaagaagaaatcaacgttaccgccatttgatgatattgtggatcccaatgattcagatgtggaggagaatatatcctctaaatctgattctgaacaacccagtcctgccagctccagctccagctccagctccagcttcacaccatcccagaccaggcaacaaggtcctttgaggtctataatgaaagatctgcattctgatgacaatgaggaggaatcagatgaagtggaggataacgacaatgactctgaaatggagaggcctgtaaatagaggaggcagccgaagtcgcagagttagcttaagtgatggcagcgatagtgaaagcagttctgcttcttcacccctacatcacgaacctccaccacccttactaaaaaccaacaacaaccagatcgtgaaccttatagaagaaactggacactttcatatcacaaacacaacatttgattttgatctttgctcgctggacaaaaccacagtccgtaaactacagagttacctggaaacatctggaacatcctgaggatataacaactggatgcatcaagaactattgtgttttttttttttggttttttttttttttggttgtgattttttgttcttgttgtttatatgaaaacactcaaaatgatgcaaccaaaagggaaaaaataaaaatcaaacaaccttcagctttatttttctttaaagccagtcatcatctcttgataaaggagaggttaaagcaaaccagcctcagcggaccactcttctctccaaggaaatccccgggaagagttagcctggatagccttgaaaacaaacaaatcaaacacaacacaagaaaactcaaagaatgtgtatggtatcatgtatctctctgtggtggttcattccacaggacgaatgcatattcaacacactgccttattacataactgatctatttattatcgcatacagatattctaagtcgttgagggaatgacaccatcagacattataagtacttggtcccgtggatgctctttcaatgcagcacccttgccatcccaagcccagtgaccttactcgtataccgtgccactttccaccaactttttccaagtcctttaactcgttgcagtctgtattttccaccttttgtttttccagttccaggacacagattatcaactggggggaccaaatagccaccttgattttcttctttgtggtctttttcctgaaagttggggcccagtccttggctgtatccatgtaatgatcttggaccatggtagaaaatgcaccaaataggatcatatgaattgctgtctagccttagtcaataaacttgtaggacttttaaacaaaa

SEQ ID NO: 310725 - DNA, 1509 bp, Homo sapiens
tctttcttttcaagaagatcattcttaacagctctccattccttgctgacacacatgaacttaggggcacttctgttttcctgagggctacaccgttttcttttgaaagagtctgaacaacccagtcctgccagctccagctccagctccagctccagcttcacaccatcccagaccaggcaacaaggtcctttgaggtctataatgaaagatctgcattctgatgacaatgaggaggaatcagatgaagtggaggataacgacaatgactctgaaatggagaggcctgtaaatagaggaggcagccgaagtcgcagagttagcttaagtgatggcagcgatagtgaaagcagttctgcttcttcacccctacatcacgaacctccaccacccttactaaaaaccaacaacaaccagattcttgaagtgaaaagtccaataaagcaaagcaaatcagataagcaaataaagaatggtgaatgtgacaaggcatacctagatgaactggtagagcttcacagaaggttaatgacattgagagaaagacacattctgcagcagatcgtgaaccttatagaagaaactggacactttcatatcacaaacacaacatttgattttgatctttgctcgctggacaaaaccacagtccgtaaactacagagttacctggaaacatctggaacatcctgaggatataacaactggatgcatcaagaactattgtgttttttttttttggttttttttttttttggttgtgattttttgttcttgttgtttatatgaaaacactcaaaatgatgcaaccaaaagggaaaaaataaaaatcaaacaaccttcagctttatttttctttaaagccagtcatcatctcttgataaaggagaggttaaagcaaaccagcctcagcggaccactcttctctccaaggaaatccccgggaagagttagcctggatagccttgaaaacaaacaaatcaaacacaacacaagaaaactcaaagaatgtgtatggtatcatgtatctctctgtggtggttcattccacaggacgaatgcatattcaacacactgccttattacataactgatctatttattatcgcatacagatattctaagtcgttgagggaatgacaccatcagacattataagtacttggtcccgtggatgctctttcaatgcagcacccttgccatcccaagcccagtgaccttactcgtataccgtgccactttccaccaactttttccaagtcctttaactcgttgcagtctgtattttccaccttttgtttttccagttccaggacacagattatcaactggggggaccaaatagccaccttgattttcttctttgtggtctttttcctgaaagttggggcccagtccttggctgtatccatgtaatgatcttggaccatggtagaaaatgcaccaaataggatcatatgaattgctgtctagccttagtcaataaacttgtaggacttttaaacaaaa

SEQ ID NO: 310726 - DNA, 1630 bp, Homo sapiens
tctttcttttcaagaagatcattcttaacagctctccattccttgctgacacacatgaacttaggggcacttctgttttcctgagggctacaccgttttcttttgaaagagtgtggatctggaccctcactaacttgtctgtaggaagagaaaattgaagagagagaggaagaggctgaggagaagacctttaccggtgctgtcctgagctgccattgttgaaggacatccttctgaacaacccagtcctgccagctccagctccagctccagctccagcttcacaccatcccagaccaggcaacaaggtcctttgaggtctataatgaaagatctgcattctgatgacaatgaggaggaatcagatgaagtggaggataacgacaatgactctgaaatggagaggcctgtaaatagaggaggcagccgaagtcgcagagttagcttaagtgatggcagcgatagtgaaagcagttctgcttcttcacccctacatcacgaacctccaccacccttactaaaaaccaacaacaaccagattcttgaagtgaaaagtccaataaagcaaagcaaatcagataagcaaataaagaatggtgaatgtgacaaggcatacctagatgaactggtagagcttcacagaaggttaatgacattgagagaaagacacattctgcagcagatcgtgaaccttatagaagaaactggacactttcatatcacaaacacaacatttgattttgatctttgctcgctggacaaaaccacagtccgtaaactacagagttacctggaaacatctggaacatcctgaggatataacaactggatgcatcaagaactattgtgttttttttttttggttttttttttttttggttgtgattttttgttcttgttgtttatatgaaaacactcaaaatgatgcaaccaaaagggaaaaaataaaaatcaaacaaccttcagctttatttttctttaaagccagtcatcatctcttgataaaggagaggttaaagcaaaccagcctcagcggaccactcttctctccaaggaaatccccgggaagagttagcctggatagccttgaaaacaaacaaatcaaacacaacacaagaaaactcaaagaatgtgtatggtatcatgtatctctctgtggtggttcattccacaggacgaatgcatattcaacacactgccttattacataactgatctatttattatcgcatacagatattctaagtcgttgagggaatgacaccatcagacattataagtacttggtcccgtggatgctctttcaatgcagcacccttgccatcccaagcccagtgaccttactcgtataccgtgccactttccaccaactttttccaagtcctttaactcgttgcagtctgtattttccaccttttgtttttccagttccaggacacagattatcaactggggggaccaaatagccaccttgattttcttctttgtggtctttttcctgaaagttggggcccagtccttggctgtatccatgtaatgatcttggaccatggtagaaaatgcaccaaataggatcatatgaattgctgtctagccttagtcaataaacttgtaggacttttaaacaaaa

SEQ ID NO: 310727 - DNA, 1042 bp, Homo sapiens
tggtggtcattccacaggacgaaggcatattcaatacactgccttattacataaccgaggaatgacattgagagaaagacacattctgcagcagatcgtgaaccttatagaagaaactggacactttcatatcacaaacacaacatttgattttgatctttgctcgctggacaaaaccacagtccgtaaactacagagttacctggaaacatctggaacatcctgaggatataacaactggatgcatcaagaactattgtgttttttttttttggttttttttttttttggttgtgattttttgttcttgttgtttatatgaaaacactcaaaatgatgcaaccaaaagggaaaaaataaaaatcaaacaaccttcagctttatttttctttaaagccagtcatcatctcttgataaaggagaggttaaagcaaaccagcctcagcggaccactcttctctccaaggaaatccccgggaagagttagcctggatagccttgaaaacaaacaaatcaaacacaacacaagaaaactcaaagaatgtgtatggtatcatgtatctctctgtggtggttcattccacaggacgaatgcatattcaacacactgccttattacataactgatctatttattatcgcatacagatattctaagtcgttgagggaatgacaccatcagacattataagtacttggtcccgtggatgctctttcaatgcagcacccttgccatcccaagcccagtgaccttactcgtataccgtgccactttccaccaactttttccaagtcctttaactcgttgcagtctgtattttccaccttttgtttttccagttccaggacacagattatcaactggggggaccaaatagccaccttgattttcttctttgtggtctttttcctgaaagttggggcccagtccttggctgtatccatgtaatgatcttggaccatggtagaaaatgcaccaaataggatcatatgaattgctgtctagccttagtcaataaacttgtaggacttttaaacaaaa

SEQ ID NO: 310728 - DNA, 456 bp, Homo sapiens
gtgagaacaatttctttgcttgctgtgtttctaatttttaaagataaactatatgtaaagtttatttactatgagtagtaatttcataggcaagatagcttctgggatattatgtaaggtaatgaaaaatggggtgagagggatggaacaaggaaaagccacaggaggttttgatgtatagaaaaattcaggaaaatcttacaattttagatgattaatgtgcatataacatgcattcatctaattaagaaaaaaatagagaaaaagttttaaaataggagccccagtgtgcatttgttctccagagtgatttaaagtaggaaaaaagatacccttctcctctgacttcagcacatttacaagtattttatctaccagtgaatttttaagtgcatgttaaagaaatagaagcattttttaactcatgattatcgtattaaataatttctcttattt

SEQ ID NO: 310729 - DNA, 525 bp, Homo sapiens
ttagttctacttttctgactcagcatttcagatctaagtaattcattttccaaggaaaataagattagagagaagaaggaaaatgtatagaaaagaaatgctatttggaaagcaaatgttactgtacatttcattcagtggatgcctttgtttaggtggctggttagctaagagatgcttgaaataaaatttaacacagcgttctctttgatccctagattcttgaagtgaaaagtccaataaagcaaagcaaatcagataagcaaataaagaatggtgaatgtgacaaggtaggtttctagtctgttactaggagggctccaacactgacaagccttccgtttctttgtgttgcccttgatcatccttgctggttctcctttcattttcttcatcaaagtgtccaagatgcccaaatgatgagtatttcatcccagtgctttgtagtttgttttccatgtgttgtttatatcttcagtattaagcttggccttatgctgtcatttgccatgatgcctacgttgc

SEQ ID NO: 310730 - DNA, 2651 bp, Homo sapiens
cgcaagatggcggcgggaggggcccaggttgctgctctggccgccgagtgaggggcggggggggcccgggggcgcgcggcccgagacccccccggccgccctcctcctttctttgttcctgtggctgggggggtatcccctccctccacaacatggagccatctcctctgtctcccagtggggcagcacttcccctgccgctgtcgctggctccgcccccactacccctgccagcagctgcagtggtacatgtgtccttccctgaggtgaccagtgccctcttggagtccctcaatcagcagcgtctgcagggccagctctgcgatgtatctatcagagtgcagggccgggagttccgggctcatcgggctgtcctggctgcctcctccccttacttccatgatcaggtcctactcaaaggcatgacctccatctcgctgcccagtgtcatggacccaggcgcctttgagactgtcctagcctccgcttacactggccgcctcagcatggctgctgctgacattgtcaacttccttacagtggggtctgtgctccaaatgtggcacattgtggacaagtgcactgaactactccgagaaggccgggcctcagctaccaccaccatcactactgctgcagccacctctgtcactgtccctggtgctggggtgccatccgggagtgggggcactgtggcccctgctaccatgggctctgcgcgctcccatgcctccagccgggccagtgagaatcaatctcccagcagcagcaactacttcagccccagggagtccactgatttctcatcttcctcccaagaggcatttgcagcttctgcagtgggcagtggggagcgtcgaggaggtggccctgtattcccagcccctgtcgttggcagtggaggggccacatctggaaagctgctgctggaggcagatgagctgtgcgatgatggtggggatgggaggggggcagtggttcctggggctgggctccggagacccacctacacaccccctagcatcatgccacagaaacactgggtatacgtgaagcgaggtggtaattgcccagcgccaacacccctggttccccaagacccagatctggaggaggaagaggaggaggaagatctggtgttgacctgtgaggatgatgaagatgaagaactagggggtagctccagggttccagtggggggagggcctgaggctaccctcagcataagtgatgtccgtaccctgagtgagcccccagacaagggggaggagcaggtcaacttctgtgagtcctccaatgactttggcccatatgagggtgggggtcctgtggcaggtcttgatgactcaggggggccaactccctcttcctatgccccctcccaccctcctcgaccgctccttcccttggacatgcagggcaaccagatcctggtcttcccgtcgtcgtcttcatcctcatcctcacaggctcctggccaaccaccagggaaccaagcagaacacggggcagtgaccgtggggggcacgtcggtggggagcctgggtgtgccgggtagcgttggtggggtccctggagggactggcagtggggacgggaataagatctttctgtgccattgtgggaaggccttctcccacaagagcatgcgggaccggcacgtgaacatgcacctcaatctgcggccgtttgactgccccgtgtgcaacaaaaagttcaagatgaagcaccatctgactgagcacatgaagacgcacacaggtctcaagccctacgagtgcggagtctgcgccaagaagttcatgtggcgagacagcttcatgcgccaccgaggacactgtgagcgccggcaccgcctgggcggggtcggggccgtacctgggcctgggactcccacggggccatccttgccgtccaagagagagtctcccggagtgggcgggggcagcggcgacgaagcgagtgcggccacgcccccgtccagcagacgtgtctggtccccacccagagtccacaaggtggagatgggcttcggtggaggtggaggagcaaactgaaggggcaggctactggggtggggtagctttcgggaaagggaataaggagcacgatgcaagggcgctgtggcccccgggtgatctcccaccacacttactgtcttcctttatctctgtggacttgtatatattctggaaggggaaccacagtttcaccatcacccgcccattctactactcaacccctcccccccaaggtatttccagaactaaacccttcctttccctctgatgggtacactgaagcccctgctccacagagtagattgcacatggagggagggagagggggcgtgttgaacatcctgcagtcacagggtcaggggtcaggtggttgtagtctgtgcctgaagtctgtgtttgtgttgtcgtggagacaaggcctttgagccccacccttgtcctagaacctaccccctctcaaggatgcgctctttatttctaccctgtctctccccgccacccccgacttcccgtggaaattcccaactcggttctcatggaggagtgggtggagacaaggagggagtaagtcgtaggagtacaaggtttttattttttttaacagtgattaaaatatttattggtcattta

SEQ ID NO: 310731 - DNA, 2585 bp, Homo sapiens
cgcaagatggcggcgggaggggcccaggttgctgctctggccgccgagtgaggggcggggggggcccgggggcgcgcggcccgagacccccccggccgccctcctcctttctttgttcctgtggctgggggggtatcccctccctccacaacatggagccatctcctctgtctcccagtggggcagcacttcccctgccgctgtcgctggctccgcccccactacccctgccagcagctgcagtggtacatgtgtccttccctgaggtgaccagtgccctcttggagtccctcaatcagcagcgtctgcagggccagctctgcgatgtatctatcagagtgcagggccgggagttccgggctcatcgggctgtcctggctgcctcctccccttacttccatgatcaggtcctactcaaaggcatgacctccatctcgctgcccagtgtcatggacccaggcgcctttgagactgtcctagcctccgcttacactggccgcctcagcatggctgctgctgacattgtcaacttccttacagtggggtctgtgctccaaatgtggcacattgtggacaagtgcactgaactactccgagaaggccgggcctcagctaccaccaccatcactactgctgcagccacctctgtcactgtccctggtgctggggtgccatccgggagtgggggcactgtggcccctgctaccatgggctctgcgcgctcccatgcctccagccgggccagtgagaatcaatctcccagcagcagcaactacttcagccccagggagtccactgatttctcatcttcctcccaagaggcatttgcagcttctgcagtgggcagtggggagcgtcgaggaggtggccctgtattcccagcccctgtcgttggcagtggaggggccacatctggaaagctgctgctggaggcagatgagctgtgcgatgatggtggggatgggaggggggcagtggttcctggggctgggctccggagacccacctacacaccccctagcatcatgccacagaaacactgggtatacgtgaagcgaggtggtaattgcccagcgccaacacccctggttccccaagacccagatctggaggaggaagaggaggaggaagatctggtgttgacctgtgaggatgatgaagatgaagaactagggggtagctccagggttccagtggggggagggcctgaggctaccctcagcataagtgatgtccgtaccctgagtgagcccccagacaagggggaggagcaggtcaacttctgtgagtcctccaatgactttggcccatatgagggtgggggtcctgtggcaggtcttgatgactcaggggggccaactccctcttcctatgccccctcccaccctcctcgaccgctccttcccttggacatgcagggcaaccagatcctggtcttcccgtcgtcgtcttcatcctcatcctcacaggctcctggccaaccaccagggaaccaagcagaacacggggcagtgaccgtggggggcacgtcggtggggagcctgggtgtgccgggtagcgttggtggggtccctggagggactggcagtggggacgggaataagatctttctgtgccattgtgggaaggccttctcccacaagagcatgcgggaccggcacgtgaacatgcacctcaatctgcggccgtttgactgccccgtgtgcaacaaaaagttcaagatgaagcaccatctgactgagcacatgaagacgcacacaggtctcaagccctacgagtgcggagtctgcgccaagaagttcatgtggcgagacagcttcatgcgccaccgaggacactgtgagcgccggcaccgcctgggcggggtcggggccgtacctgggcctgggactcccacggggccatccttgccgtccagcagacgtgtctggtccccacccagagtccacaaggtggagatgggcttcggtggaggtggaggagcaaactgaaggggcaggctactggggtggggtagctttcgggaaagggaataaggagcacgatgcaagggcgctgtggcccccgggtgatctcccaccacacttactgtcttcctttatctctgtggacttgtatatattctggaaggggaaccacagtttcaccatcacccgcccattctactactcaacccctcccccccaaggtatttccagaactaaacccttcctttccctctgatgggtacactgaagcccctgctccacagagtagattgcacatggagggagggagagggggcgtgttgaacatcctgcagtcacagggtcaggggtcaggtggttgtagtctgtgcctgaagtctgtgtttgtgttgtcgtggagacaaggcctttgagccccacccttgtcctagaacctaccccctctcaaggatgcgctctttatttctaccctgtctctccccgccacccccgacttcccgtggaaattcccaactcggttctcatggaggagtgggtggagacaaggagggagtaagtcgtaggagtacaaggtttttattttttttaacagtgattaaaatatttattggtcattta

SEQ ID NO: 310732 - DNA, 600 bp, Homo sapiens
ataaggctagatataagaggtgggaaaaattacagataaagagaaaaaagaggcattatataaaggcacttattgccacagattatttaccaaccacacagatggtattcataaaatatatgtgggacaagaaaaaatttagaaagggaaccacagtttcaccatcacccgcccattctactactcaacccctcccccccaaggtatttccagaactaaacccttcctttccctctgatgggtacactgaagcccctgctccacagagtagattgcacatggagggagggagagggggcgtgttgaacatcctgcagtcacagggtcaggggtcaggtggttgtagtctgtgcctgaagtctgtgtttgtgttgtcgtggagacaaggcctttgagccccacccttgtcctagaacctaccccctctcaaggatgcgctctttatttctaccctgtctctccccgccacccccgacttcccgtggaaattcccaactcggttctcatggaggagtgggtggagacaaggagggagtaagtcgtaggagtacaaggtttttattttttttaacagtgattaaaatatttattggtcattta

SEQ ID NO: 310733 - DNA, 954 bp, Homo sapiens
tggcgtgatctagaggacccccatgcagttatacagactcaatataagaaatttagttaagatatactgcttatgttaaaaattacattttcactgcaaaagcactaaaacattaacaaaaaaatctattcatatttatgctactacaaatattttcatttgtcttcaccaataaacagacaaattttttcatagctttaaaactagaaaagtactttatattttttacttctagtagatttcatattgtcttcataattggaatcaacttaaatatctaacattattgtagctatttcacttagtgagcacactgtaagtttttaaaatggcattcagacaacctgcttataaaaacagactgtgtttacaattcaagcagttaatacagactcagaaggctcagcaagaactggaagaacagacccgtagggctctggaacttgagcaggaacggaagcgtgcccagagcgaggctgaaaagctggccaaggagcgtcaagaagctgaagaggccaaggaggccttgctgcaggcctcccgggaccagaaaaagactcaggaacagctggccttggaaatggcagagctgacagctcgaatctcccagctggagatggcccgacagaagaaggagagtgaggctgtggagtggcagcagaaggcccagatggtacaggaagacttggagaagacccgtgctgagctgaagactgccatgagtacacctcatgtggcagagcctgctgagaatgagcaggatgagcaggatgagaatggggcagaggctagtgctgacctacgggctgatgctatggccaaggaccgcagtgaggaggaacgtaccactgaggcagagaagaatgagcgtgtgcagaagcacctgaaggccctcacttcggagctggccaatgccagagatgagtctgtattactgcttgggggtcctctaga

SEQ ID NO: 310734 - DNA, 540 bp, Homo sapiens
accctggggactctacattgcaggattgccatgatatctgagatggcatgtttaaagcaaaccttgtttataatctagtaggtcttggaggttgggcctgttggtttttctgaaagccattaggactcagttcattgctctgtagccaaaggccatcctttcatttctgagcagtattcttataaacatagagtgttggtcctaagaggatctaggagagagtgtacctgactccatgaggtccatccctactgttagcccctaaagtcagcacaaactcctgacacattactgctatgcttagggaccacagcacatcatttgatttgtggatgaaggtacaaaggaaggtgttccccttgttgtttttgatcatccattcttgtagctctcttacctttcaggcaattccttgtgtctagtttaacaccttcttgctataatttcggtctgcttccagtgtgacctcaattggctgactctacatcctctttgcatcagccccttagaaagctaaatgggcttcccttctctcctgca

SEQ ID NO: 310735 - DNA, 3962 bp, Homo sapiens
gggcggctctttcctgggtggggtttgtgaagtcgtggcccgttagcaggaagcctaacagtcgccccgacgctagtgagggacccaatctgagtccccggccagccgaatccaagccgtgtgtactgcgtgctcagcactgcccgacagtcctagctaaacttcgccaactccgctgcctttgccgccaccatgcccaaaacgatcagtgtgcgtgtgaccaccatggatgcagagctggagtttgccatccagcccaacaccaccgggaagcagctatttgaccaggtggtgaaaactattggcttgagggaagtttggttctttggtctgcagtaccaggacactaaaggtttctccacctggctgaaactcaataagaaggtgactgcccaggatgtgcggaaggaaagccccctgctctttaagttccgtgccaagttctaccctgaggatgtgtccgaggaattgattcaggacatcactcagcgcctgttctttctgcaagtgaaagagggcattctcaatgatgatatttactgcccgcctgagaccgctgtgctgctggcctcgtatgctgtccagtctaagtatggcgacttcaataaggaagtgcataagtctggctacctggccggagacaagttgctcccgcagagagtcctggaacagcacaaactcaacaaggaccagtgggaggagcggatccaggtgtggcatgaggaacaccgtggcatgctcagggaggatgctgtcctggaatatctgaagattgctcaagatctggagatgtatggtgtgaactacttcagcatcaagaacaagaaaggctcagagctgtggctgggggtggatgccctgggtctcaacatctatgagcagaatgacagactaactcccaagataggcttcccctggagtgaaatcaggaacatctctttcaatgataagaaatttgtcatcaagcccattgacaaaaaagccccggacttcgtcttctatgctccccggctgcggattaacaagcggatcttggccttgtgcatggggaaccatgaactatacatgcgccgtcgcaagcctgataccattgaggtgcagcagatgaaggcacaggcccgggaggagaagcaccagaagcagatggagcgtgctatgctggaaaatgagaagaagaagcgtgaaatggcagagaaggagaaagagaagattgaacgggagaaggaggagctgatggagaggctgaagcagatcgaggaacagactaagaaggctcagcaagaactggaagaacagacccgtagggctctggaacttgagcaggaacggaagcgtgcccagagcgaggctgaaaagctggccaaggagcgtcaagaagctgaagaggccaaggaggccttgctgcaggcctcccgggaccagaaaaagactcaggaacagctggccttggaaatggcagagctgacagctcgaatctcccagctggagatggcccgacagaagaaggagagtgaggctgtggagtggcagcagaaggcccagatggtacaggaagacttggagaagacccgtgctgagctgaagactgccatgagtacacctcatgtggcagagcctgctgagaatgagcaggatgagcaggatgagaatggggcagaggctagtgctgacctacgggctgatgctatggccaaggaccgcagtgaggaggaacgtaccactgaggcagagaagaatgagcgtgtgcagaagcacctgaaggccctcacttcggagctggccaatgccagagatgagtccaagaagactgccaatgacatgatccatgctgagaacatgcgactgggccgagacaaatacaagaccctgcgccagatccggcagggcaacaccaagcagcgcattgacgaatttgagtctatgtaatgggcacccagcctctagggacccctcctccctttttccttgtccccacactcctacacctaactcacctaactcatactgtgctggagccactaactagagcagccctggagtcatgccaagcatttaatgtagccatgggaccaaacctagccccttagcccccacccacttccctgggcaaatgaatggctcactatggtgccaatggaacctcctttctcttctctgttccattgaatctgtatggctagaatatcctacttctccagcctagaggtactttccacttgattttgcaaatgcccttacacttactgttgtcctatgggagtcaagtgtggagtaggttggaagctagctcccctcctctcccctaccactgtcttcttcagggtcctgagatttacacggttggagtgttatgcggtctagggaatgagacaggacctaggatatcttctccaggatgtcaactgacctaaaatttgccctcccatcccgtttagagttatttaggctttgtaacgattgggggataaaaagatgttcagtcatttttgtttctacctcccagatcggatctgttgcaaactcagcctcaataagccttgtcgttgactttagggactcaatttctccccagggtggatgggggaaatggtgccttcaagaccttcaccaaacatactagaagggcattggccattctattgtggcaaggctgagtagaagatcctaccccaattccttgtaggagtataggccggtctaaagtgagctctatgggcagatctaccccttacttattattccagatctgcagtcacttcgtgggatctgcccctccctgcttcaatacccaaatcctctccagctataacagtagggatgagtacccaaaagctcagccagccccatcaggactcttgtgaaaagagaggatatgttcacacctagcgtcagtattttccctgctaggggttttaggtctcttcccctctcagagctacttgggccatagctcctgctccacagccatcccagccttggcatctagagcttgatgccagtaggctcaactagggagtgagtgcaaaaagctgagtatggtgagagaagcctgtgccctgatccaagtttactcaaccctctcaggtgaccaaaatccccttctcatcactcccctccaaagaggtgactgggccctgcctctgtttgacaaacctctaacccaggtcttgacaccagctgttctgtcccttggagctgtaaaccagagagctgctggggattctggcctagtcccttccacacccccaccccttgctctcaacccaggagcatccacctccttctctgtctcatgtgtgctcttcttctttctacagtattatgtactctactgatatctaaatattgatttctgccttccttgctaatgcaccattagaagatattagtcttggggcaggatgattttggcctcattactttaccacccccacacctggaaagcatatactatattacaaaatgacattttgccaaaattattaatataagaagctttcagtattagtgatgtcatctgtcactataggtcatacaatccattcttaaagtacttgttatttgtttttattattactgtttgtcttctccccagggttcagtcctcaaggggccatcctgtcccaccatgcagtgcccctagcttagagcctccctcaattccccctggccaccaccccccactctgtgcctgaccttgaggagtcttgtgtgcattgctgtgaattagctcacttggtgatatgtcctatattggctaaattgaaacctggaattgtggggcaatctattaatagctgccttaaagtcagtaacttacccttagggaggctgggggaaaaggttagattttgtattcaggggttttttgtgtactttttgggttttttaaaaattgtttttggaggggtttatgctcaatccatgttctatttcagtgccaataaaatttaggaagactt

SEQ ID NO: 310736 - DNA, 3908 bp, Homo sapiens
gggcggctctttcctgggtggggtttgtgaagtcgtggcccgttagcaggaagcctaacagtcgccccgacgctagtgagggacccaatctgagtccccggccagccgaatccaagccgtgtgtactgcgtgctcagcactgcccgacagtcctagctaaacttcgccaactccgctgcctttgccgccaccatgcccaaaacgatcagtgtgcgtgtgaccaccatggatgcagagctggagtttgccatccagcccaacaccaccgggaagcagctatttgaccaggtggtgaaaactattggcttgagggaagtttggttctttggtctgcagtaccaggacactaaaggtttctccacctggctgaaactcaataagaaggtgactgcccaggatgtgcggaaggaaagccccctgctctttaagttccgtgccaagttctttctgcaagtgaaagagggcattctcaatgatgatatttactgcccgcctgagaccgctgtgctgctggcctcgtatgctgtccagtctaagtatggcgacttcaataaggaagtgcataagtctggctacctggccggagacaagttgctcccgcagagagtcctggaacagcacaaactcaacaaggaccagtgggaggagcggatccaggtgtggcatgaggaacaccgtggcatgctcagggaggatgctgtcctggaatatctgaagattgctcaagatctggagatgtatggtgtgaactacttcagcatcaagaacaagaaaggctcagagctgtggctgggggtggatgccctgggtctcaacatctatgagcagaatgacagactaactcccaagataggcttcccctggagtgaaatcaggaacatctctttcaatgataagaaatttgtcatcaagcccattgacaaaaaagccccggacttcgtcttctatgctccccggctgcggattaacaagcggatcttggccttgtgcatggggaaccatgaactatacatgcgccgtcgcaagcctgataccattgaggtgcagcagatgaaggcacaggcccgggaggagaagcaccagaagcagatggagcgtgctatgctggaaaatgagaagaagaagcgtgaaatggcagagaaggagaaagagaagattgaacgggagaaggaggagctgatggagaggctgaagcagatcgaggaacagactaagaaggctcagcaagaactggaagaacagacccgtagggctctggaacttgagcaggaacggaagcgtgcccagagcgaggctgaaaagctggccaaggagcgtcaagaagctgaagaggccaaggaggccttgctgcaggcctcccgggaccagaaaaagactcaggaacagctggccttggaaatggcagagctgacagctcgaatctcccagctggagatggcccgacagaagaaggagagtgaggctgtggagtggcagcagaaggcccagatggtacaggaagacttggagaagacccgtgctgagctgaagactgccatgagtacacctcatgtggcagagcctgctgagaatgagcaggatgagcaggatgagaatggggcagaggctagtgctgacctacgggctgatgctatggccaaggaccgcagtgaggaggaacgtaccactgaggcagagaagaatgagcgtgtgcagaagcacctgaaggccctcacttcggagctggccaatgccagagatgagtccaagaagactgccaatgacatgatccatgctgagaacatgcgactgggccgagacaaatacaagaccctgcgccagatccggcagggcaacaccaagcagcgcattgacgaatttgagtctatgtaatgggcacccagcctctagggacccctcctccctttttccttgtccccacactcctacacctaactcacctaactcatactgtgctggagccactaactagagcagccctggagtcatgccaagcatttaatgtagccatgggaccaaacctagccccttagcccccacccacttccctgggcaaatgaatggctcactatggtgccaatggaacctcctttctcttctctgttccattgaatctgtatggctagaatatcctacttctccagcctagaggtactttccacttgattttgcaaatgcccttacacttactgttgtcctatgggagtcaagtgtggagtaggttggaagctagctcccctcctctcccctaccactgtcttcttcagggtcctgagatttacacggttggagtgttatgcggtctagggaatgagacaggacctaggatatcttctccaggatgtcaactgacctaaaatttgccctcccatcccgtttagagttatttaggctttgtaacgattgggggataaaaagatgttcagtcatttttgtttctacctcccagatcggatctgttgcaaactcagcctcaataagccttgtcgttgactttagggactcaatttctccccagggtggatgggggaaatggtgccttcaagaccttcaccaaacatactagaagggcattggccattctattgtggcaaggctgagtagaagatcctaccccaattccttgtaggagtataggccggtctaaagtgagctctatgggcagatctaccccttacttattattccagatctgcagtcacttcgtgggatctgcccctccctgcttcaatacccaaatcctctccagctataacagtagggatgagtacccaaaagctcagccagccccatcaggactcttgtgaaaagagaggatatgttcacacctagcgtcagtattttccctgctaggggttttaggtctcttcccctctcagagctacttgggccatagctcctgctccacagccatcccagccttggcatctagagcttgatgccagtaggctcaactagggagtgagtgcaaaaagctgagtatggtgagagaagcctgtgccctgatccaagtttactcaaccctctcaggtgaccaaaatccccttctcatcactcccctccaaagaggtgactgggccctgcctctgtttgacaaacctctaacccaggtcttgacaccagctgttctgtcccttggagctgtaaaccagagagctgctggggattctggcctagtcccttccacacccccaccccttgctctcaacccaggagcatccacctccttctctgtctcatgtgtgctcttcttctttctacagtattatgtactctactgatatctaaatattgatttctgccttccttgctaatgcaccattagaagatattagtcttggggcaggatgattttggcctcattactttaccacccccacacctggaaagcatatactatattacaaaatgacattttgccaaaattattaatataagaagctttcagtattagtgatgtcatctgtcactataggtcatacaatccattcttaaagtacttgttatttgtttttattattactgtttgtcttctccccagggttcagtcctcaaggggccatcctgtcccaccatgcagtgcccctagcttagagcctccctcaattccccctggccaccaccccccactctgtgcctgaccttgaggagtcttgtgtgcattgctgtgaattagctcacttggtgatatgtcctatattggctaaattgaaacctggaattgtggggcaatctattaatagctgccttaaagtcagtaacttacccttagggaggctgggggaaaaggttagattttgtattcaggggttttttgtgtactttttgggttttttaaaaattgtttttggaggggtttatgctcaatccatgttctatttcagtgccaataaaatttaggaagactt

SEQ ID NO: 310737 - DNA, 3545 bp, Homo sapiens
  misc_feature (15)..(15): n is a, c, g, or t
  misc_feature (29)..(30): n is a, c, g, or t
  misc_feature (75)..(75): n is a, c, g, or t
aaggtagacacatanaggatccccgtcgnngaccgctatggttcctgattgaatgcactggattccatgcagcanattgaatgcagtgtaagcggtcgacggaagcggtcgacggaagcggtcgaccgtccgtcgaccgctgtgctgctggcctcgtatgctgtccagtctaagtatggcgacttcaataaggaagtgcataagtctggctacctggccggagacaagttgctcccgcagagagtcctggaacagcacaaactcaacaaggaccagtgggaggagcggatccaggtgtggcatgaggaacaccgtggcatgctcagggaggatgctgtcctggaatatctgaagattgctcaagatctggagatgtatggtgtgaactacttcagcatcaagaacaagaaaggctcagagctgtggctgggggtggatgccctgggtctcaacatctatgagcagaatgacagactaactcccaagataggcttcccctggagtgaaatcaggaacatctctttcaatgataagaaatttgtcatcaagcccattgacaaaaaagccccggacttcgtcttctatgctccccggctgcggattaacaagcggatcttggccttgtgcatggggaaccatgaactatacatgcgccgtcgcaagcctgataccattgaggtgcagcagatgaaggcacaggcccgggaggagaagcaccagaagcagatggagcgtgctatgctggaaaatgagaagaagaagcgtgaaatggcagagaaggagaaagagaagattgaacgggagaaggaggagctgatggagaggctgaagcagatcgaggaacagactaagaaggctcagcaagaactggaagaacagacccgtagggctctggaacttgagcaggaacggaagcgtgcccagagcgaggctgaaaagctggccaaggagcgtcaagaagctgaagaggccaaggaggccttgctgcaggcctcccgggaccagaaaaagactcaggaacagctggccttggaaatggcagagctgacagctcgaatctcccagctggagatggcccgacagaagaaggagagtgaggctgtggagtggcagcagaaggcccagatggtacaggaagacttggagaagacccgtgctgagctgaagactgccatgagtacacctcatgtggcagagcctgctgagaatgagcaggatgagcaggatgagaatggggcagaggctagtgctgacctacgggctgatgctatggccaaggaccgcagtgaggaggaacgtaccactgaggcagagaagaatgagcgtgtgcagaagcacctgaaggccctcacttcggagctggccaatgccagagatgagtccaagaagactgccaatgacatgatccatgctgagaacatgcgactgggccgagacaaatacaagaccctgcgccagatccggcagggcaacaccaagcagcgcattgacgaatttgagtctatgtaatgggcacccagcctctagggacccctcctccctttttccttgtccccacactcctacacctaactcacctaactcatactgtgctggagccactaactagagcagccctggagtcatgccaagcatttaatgtagccatgggaccaaacctagccccttagcccccacccacttccctgggcaaatgaatggctcactatggtgccaatggaacctcctttctcttctctgttccattgaatctgtatggctagaatatcctacttctccagcctagaggtactttccacttgattttgcaaatgcccttacacttactgttgtcctatgggagtcaagtgtggagtaggttggaagctagctcccctcctctcccctaccactgtcttcttcagggtcctgagatttacacggttggagtgttatgcggtctagggaatgagacaggacctaggatatcttctccaggatgtcaactgacctaaaatttgccctcccatcccgtttagagttatttaggctttgtaacgattgggggataaaaagatgttcagtcatttttgtttctacctcccagatcggatctgttgcaaactcagcctcaataagccttgtcgttgactttagggactcaatttctccccagggtggatgggggaaatggtgccttcaagaccttcaccaaacatactagaagggcattggccattctattgtggcaaggctgagtagaagatcctaccccaattccttgtaggagtataggccggtctaaagtgagctctatgggcagatctaccccttacttattattccagatctgcagtcacttcgtgggatctgcccctccctgcttcaatacccaaatcctctccagctataacagtagggatgagtacccaaaagctcagccagccccatcaggactcttgtgaaaagagaggatatgttcacacctagcgtcagtattttccctgctaggggttttaggtctcttcccctctcagagctacttgggccatagctcctgctccacagccatcccagccttggcatctagagcttgatgccagtaggctcaactagggagtgagtgcaaaaagctgagtatggtgagagaagcctgtgccctgatccaagtttactcaaccctctcaggtgaccaaaatccccttctcatcactcccctccaaagaggtgactgggccctgcctctgtttgacaaacctctaacccaggtcttgacaccagctgttctgtcccttggagctgtaaaccagagagctgctggggattctggcctagtcccttccacacccccaccccttgctctcaacccaggagcatccacctccttctctgtctcatgtgtgctcttcttctttctacagtattatgtactctactgatatctaaatattgatttctgccttccttgctaatgcaccattagaagatattagtcttggggcaggatgattttggcctcattactttaccacccccacacctggaaagcatatactatattacaaaatgacattttgccaaaattattaatataagaagctttcagtattagtgatgtcatctgtcactataggtcatacaatccattcttaaagtacttgttatttgtttttattattactgtttgtcttctccccagggttcagtcctcaaggggccatcctgtcccaccatgcagtgcccctagcttagagcctccctcaattccccctggccaccaccccccactctgtgcctgaccttgaggagtcttgtgtgcattgctgtgaattagctcacttggtgatatgtcctatattggctaaattgaaacctggaattgtggggcaatctattaatagctgccttaaagtcagtaacttacccttagggaggctgggggaaaaggttagattttgtattcaggggttttttgtgtactttttgggttttttaaaaattgtttttggaggggtttatgctcaatccatgttctatttcagtgccaataaaatttaggaagactt

SEQ ID NO: 310738 - DNA, 2941 bp, Homo sapiens
aggatcccccttttggggtcttggctgatgataaaaggaagatgccctttactgaaaaaatcatggcagctccagagcaggcggacaagatgaaggctatcgttgagaagcaccagaagcagatggtgcgtgctatgctggaaaatgagaagaagaagcgtgaaatggcagagaaggagaaagagaagattgaacgggagaaggaggagctgatggagaggctgaagcagatcgaggaacagactaagaaggctcagcaagaactggaagaacagacccgtagggctctggaacttgagcaggaacggaagcgtgcccagagcgaggctgaaaagctggccaaggagcgtcaagaagctgaagaggccaaggaggccttgctgcaggcctcccgggaccagaaaaagactcaggaacagctggccttggaaatggcagagctgacagctcgaatctcccagctggagatggcccgacagaagaaggagagtgaggctgtggagtggcagcagaaggcccagatggtacaggaagacttggagaagacccgtgctgagctgaagactgccatgagtacacctcatgtggcagagcctgctgagaatgagcaggatgagcaggatgagaatggggcagaggctagtgctgacctacgggctgatgctatggccaaggaccgcagtgaggaggaacgtaccactgaggcagagaagaatgagcgtgtgcagaagcacctgaaggccctcacttcggagctggccaatgccagagatgagtccaagaagactgccaatgacatgatccatgctgagaacatgcgactgggccgagacaaatacaagaccctgcgccagatccggcagggcaacaccaagcagcgcattgacgaatttgagtctatgtaatgggcacccagcctctagggacccctcctccctttttccttgtccccacactcctacacctaactcacctaactcatactgtgctggagccactaactagagcagccctggagtcatgccaagcatttaatgtagccatgggaccaaacctagccccttagcccccacccacttccctgggcaaatgaatggctcactatggtgccaatggaacctcctttctcttctctgttccattgaatctgtatggctagaatatcctacttctccagcctagaggtactttccacttgattttgcaaatgcccttacacttactgttgtcctatgggagtcaagtgtggagtaggttggaagctagctcccctcctctcccctaccactgtcttcttcagggtcctgagatttacacggttggagtgttatgcggtctagggaatgagacaggacctaggatatcttctccaggatgtcaactgacctaaaatttgccctcccatcccgtttagagttatttaggctttgtaacgattgggggataaaaagatgttcagtcatttttgtttctacctcccagatcggatctgttgcaaactcagcctcaataagccttgtcgttgactttagggactcaatttctccccagggtggatgggggaaatggtgccttcaagaccttcaccaaacatactagaagggcattggccattctattgtggcaaggctgagtagaagatcctaccccaattccttgtaggagtataggccggtctaaagtgagctctatgggcagatctaccccttacttattattccagatctgcagtcacttcgtgggatctgcccctccctgcttcaatacccaaatcctctccagctataacagtagggatgagtacccaaaagctcagccagccccatcaggactcttgtgaaaagagaggatatgttcacacctagcgtcagtattttccctgctaggggttttaggtctcttcccctctcagagctacttgggccatagctcctgctccacagccatcccagccttggcatctagagcttgatgccagtaggctcaactagggagtgagtgcaaaaagctgagtatggtgagagaagcctgtgccctgatccaagtttactcaaccctctcaggtgaccaaaatccccttctcatcactcccctccaaagaggtgactgggccctgcctctgtttgacaaacctctaacccaggtcttgacaccagctgttctgtcccttggagctgtaaaccagagagctgctggggattctggcctagtcccttccacacccccaccccttgctctcaacccaggagcatccacctccttctctgtctcatgtgtgctcttcttctttctacagtattatgtactctactgatatctaaatattgatttctgccttccttgctaatgcaccattagaagatattagtcttggggcaggatgattttggcctcattactttaccacccccacacctggaaagcatatactatattacaaaatgacattttgccaaaattattaatataagaagctttcagtattagtgatgtcatctgtcactataggtcatacaatccattcttaaagtacttgttatttgtttttattattactgtttgtcttctccccagggttcagtcctcaaggggccatcctgtcccaccatgcagtgcccctagcttagagcctccctcaattccccctggccaccaccccccactctgtgcctgaccttgaggagtcttgtgtgcattgctgtgaattagctcacttggtgatatgtcctatattggctaaattgaaacctggaattgtggggcaatctattaatagctgccttaaagtcagtaacttacccttagggaggctgggggaaaaggttagattttgtattcaggggttttttgtgtactttttgggttttttaaaaattgtttttggaggggtttatgctcaatccatgttctatttcagtgccaataaaatttaggaagactt

SEQ ID NO: 310739 - DNA, 3090 bp, Homo sapiens
tggcgtgatctagaggacccccatgcagttatacagactcaatataagaaatttagttaagatatactgcttatgttaaaaattacattttcactgcaaaagcactaaaacattaacaaaaaaatctattcatatttatgctactacaaatattttcatttgtcttcaccaataaacagacaaattttttcatagctttaaaactagaaaagtactttatattttttacttctagtagatttcatattgtcttcataattggaatcaacttaaatatctaacattattgtagctatttcacttagtgagcacactgtaagtttttaaaatggcattcagacaacctgcttataaaaacagactgtgtttacaattcaagcagttaatacagactcagaaggctcagcaagaactggaagaacagacccgtagggctctggaacttgagcaggaacggaagcgtgcccagagcgaggctgaaaagctggccaaggagcgtcaagaagctgaagaggccaaggaggccttgctgcaggcctcccgggaccagaaaaagactcaggaacagctggccttggaaatggcagagctgacagctcgaatctcccagctggagatggcccgacagaagaaggagagtgaggctgtggagtggcagcagaaggcccagatggtacaggaagacttggagaagacccgtgctgagctgaagactgccatgagtacacctcatgtggcagagcctgctgagaatgagcaggatgagcaggatgagaatggggcagaggctagtgctgacctacgggctgatgctatggccaaggaccgcagtgaggaggaacgtaccactgaggcagagaagaatgagcgtgtgcagaagcacctgaaggccctcacttcggagctggccaatgccagagatgagtccaagaagactgccaatgacatgatccatgctgagaacatgcgactgggccgagacaaatacaagaccctgcgccagatccggcagggcaacaccaagcagcgcattgacgaatttgagtctatgtaatgggcacccagcctctagggacccctcctccctttttccttgtccccacactcctacacctaactcacctaactcatactgtgctggagccactaactagagcagccctggagtcatgccaagcatttaatgtagccatgggaccaaacctagccccttagcccccacccacttccctgggcaaatgaatggctcactatggtgccaatggaacctcctttctcttctctgttccattgaatctgtatggctagaatatcctacttctccagcctagaggtactttccacttgattttgcaaatgcccttacacttactgttgtcctatgggagtcaagtgtggagtaggttggaagctagctcccctcctctcccctaccactgtcttcttcagggtcctgagatttacacggttggagtgttatgcggtctagggaatgagacaggacctaggatatcttctccaggatgtcaactgacctaaaatttgccctcccatcccgtttagagttatttaggctttgtaacgattgggggataaaaagatgttcagtcatttttgtttctacctcccagatcggatctgttgcaaactcagcctcaataagccttgtcgttgactttagggactcaatttctccccagggtggatgggggaaatggtgccttcaagaccttcaccaaacatactagaagggcattggccattctattgtggcaaggctgagtagaagatcctaccccaattccttgtaggagtataggccggtctaaagtgagctctatgggcagatctaccccttacttattattccagatctgcagtcacttcgtgggatctgcccctccctgcttcaatacccaaatcctctccagctataacagtagggatgagtacccaaaagctcagccagccccatcaggactcttgtgaaaagagaggatatgttcacacctagcgtcagtattttccctgctaggggttttaggtctcttcccctctcagagctacttgggccatagctcctgctccacagccatcccagccttggcatctagagcttgatgccagtaggctcaactagggagtgagtgcaaaaagctgagtatggtgagagaagcctgtgccctgatccaagtttactcaaccctctcaggtgaccaaaatccccttctcatcactcccctccaaagaggtgactgggccctgcctctgtttgacaaacctctaacccaggtcttgacaccagctgttctgtcccttggagctgtaaaccagagagctgctggggattctggcctagtcccttccacacccccaccccttgctctcaacccaggagcatccacctccttctctgtctcatgtgtgctcttcttctttctacagtattatgtactctactgatatctaaatattgatttctgccttccttgctaatgcaccattagaagatattagtcttggggcaggatgattttggcctcattactttaccacccccacacctggaaagcatatactatattacaaaatgacattttgccaaaattattaatataagaagctttcagtattagtgatgtcatctgtcactataggtcatacaatccattcttaaagtacttgttatttgtttttattattactgtttgtcttctccccagggttcagtcctcaaggggccatcctgtcccaccatgcagtgcccctagcttagagcctccctcaattccccctggccaccaccccccactctgtgcctgaccttgaggagtcttgtgtgcattgctgtgaattagctcacttggtgatatgtcctatattggctaaattgaaacctggaattgtggggcaatctattaatagctgccttaaagtcagtaacttacccttagggaggctgggggaaaaggttagattttgtattcaggggttttttgtgtactttttgggttttttaaaaattgtttttggaggggtttatgctcaatccatgttctatttcagtgccaataaaatttaggaagactt

SEQ ID NO: 310740 - DNA, 3446 bp, Homo sapiens
gggcggctctttcctgggtggggtttgtgaagtcgtggcccgttagcaggaagcctaacagtcgccccgacgctagtgagggacccaatctgagtccccggccagccgaatccaagccgtgtgtactgcgtgctcagcactgcccgacagtcctagctaaacttcgccaactccgctgcctttgccgccaccatgcccaaaacgatcagtgtgcgtgtgaccaccatggatgcagagctggagtttgccatccagcccaacaccaccgggaagcagctatttgaccaggtggtgaaaactattggcttgagggaagtttggttctttggtctgcagtaccaggacactaaaggtttctccacctggctgaaactcaataagaaggtgactgcccaggatgtgcggaaggaaagccccctgctctttaagttccgtgccaagttctaccctgaggatgtgtccgaggaattgattcaggacatcactcagcgcctgttctttctgcaagtgaaagagggcattctcaatgatgatatttactgcccgcctgagaccgctgtgctgctggcctcgtatgctgtccagtctaagtatggcgacttcaataaggaagtgcataagtctggctacctggccggagacaagttgctcccgcagagagtcctggaacagcacaaactcaacaaggaccagtgggaggagcggatccaggtgtggcatgaggaacaccgtggcatgctcagggaggatgctgtcctggaatatctgaagattgctcaagatctggagatgtatggtgtgaactacttcagcatcaagaacaagaaaggctcagagctgtggctgggggtggatgccctgggtctcaacatctatgagcagaatgacagactaactcccaagataggcttcccctggagtgaaatcaggaacatctctttcaatgataagaaatttgtcatcaagcccattgacaaaaaagccccggacttcgtcttctatgctccccggctgcggattaacaagcggatcttggccttgtgcatggggaaccatgaactatacatgcgccgtcgcaagcctgataccattgaggtgcagcagatgaaggcacaggcccgggaggagaagcaccagaagcagatggagcgtgctatgctggaaaatgagaagaagaagcgtgaaatggcagagaaggagaaagagaagattgaacgggagaaggaggagctgatggagaggctgaagcagatcgaggaacagactaagaaggctcagcaagaactggaagaacagacccgtagggctctggaacttgagcaggaacggaagcgtgcccagagcgaggctgaaaagctggccaaggagcgtcaagaagctgaagaggccaaggaggccttgctgcaggcctcccgggaccagaaaaagactcaggaacagctggccttggaaatggcagagctgacagctcgaatctcccagctggagatggcccgacagaagaaggagagtgaggctgtggagtggcagcagaaggcccagatggtacaggaagacttggagaagacccgtgctgagctgaagactgccatgagtacacctcatgtggcagagcctgctgagaatgagcaggatgagcaggatgagaatggggcagaggctagtgctgacctacgggctgatgctatggccaaggaccgcagtgaggaggaacgtaccactgaggcagagaagaatgagcgtgtgcagaagcacctgaaggccctcacttcggagctggccaatgccagagatgagtccaagaagactgccaatgacatgatccatgctgagaacatgcgactgggccgagacaaatacaagaccctgcgccagatccggcagggcaacaccaagcagcgcattgacgaatttgagtctatgtaatgggcacccagcctctagggacccctcctccctttttccttgtccccacactcctacacctaactcacctaactcatactgtgctggagccactaactagagcagccctggagtcatgccaagcatttaatgtagccatgggaaatggtgccttcaagaccttcaccaaacatactagaagggcattggccattctattgtggcaaggctgagtagaagatcctaccccaattccttgtaggagtataggccggtctaaagtgagctctatgggcagatctaccccttacttattattccagatctgcagtcacttcgtgggatctgcccctccctgcttcaatacccaaatcctctccagctataacagtagggatgagtacccaaaagctcagccagccccatcaggactcttgtgaaaagagaggatatgttcacacctagcgtcagtattttccctgctaggggttttaggtctcttcccctctcagagctacttgggccatagctcctgctccacagccatcccagccttggcatctagagcttgatgccagtaggctcaactagggagtgagtgcaaaaagctgagtatggtgagagaagcctgtgccctgatccaagtttactcaaccctctcaggtgaccaaaatccccttctcatcactcccctccaaagaggtgactgggccctgcctctgtttgacaaacctctaacccaggtcttgacaccagctgttctgtcccttggagctgtaaaccagagagctgctggggattctggcctagtcccttccacacccccaccccttgctctcaacccaggagcatccacctccttctctgtctcatgtgtgctcttcttctttctacagtattatgtactctactgatatctaaatattgatttctgccttccttgctaatgcaccattagaagatattagtcttggggcaggatgattttggcctcattactttaccacccccacacctggaaagcatatactatattacaaaatgacattttgccaaaattattaatataagaagctttcagtattagtgatgtcatctgtcactataggtcatacaatccattcttaaagtacttgttatttgtttttattattactgtttgtcttctccccagggttcagtcctcaaggggccatcctgtcccaccatgcagtgcccctagcttagagcctccctcaattccccctggccaccaccccccactctgtgcctgaccttgaggagtcttgtgtgcattgctgtgaattagctcacttggtgatatgtcctatattggctaaattgaaacctggaattgtggggcaatctattaatagctgccttaaagtcagtaacttacccttagggaggctgggggaaaaggttagattttgtattcaggggttttttgtgtactttttgggttttttaaaaattgtttttggaggggtttatgctcaatccatgttctatttcagtgccaataaaatttaggaagactt

SEQ ID NO: 310741 - DNA, 4014 bp, Homo sapiens
gggcggctctttcctgggtggggtttgtgaagtcgtggcccgttagcaggaagcctaacagtcgccccgacgctagtgagggacccaatctgagtccccggccagccgaatccaagccgtgtgtactgcgtgctcagcactgcccgacagtcctagctaaacttcgccaactccgctgcctttgccgccaccatgcccaaaacgatcagtgtgcgtgtgaccaccatggatgcagagctggagtttgccatccagcccaacaccaccgggaagcagctatttgaccaggtggtgaaaactattggcttgagggaagtttggttctttggtctgcagtaccaggacactaaaggtttctccacctggctgaaactcaataagaaggtgactgcccaggatgtgcggaaggaaagccccctgctctttaagttccgtgccaagttctaccctgaggatgtgtccgaggaattgattcaggacatcactcagcgcctgttctttctgcaagtgaaagagggcattctcaatgatgatatttactgcccgcctgagaccgctgtgctgctggcctcgtatgctgtccagtctaagtatggcgacttcaataaggaagtgcataagtctggctacctggccggagacaagttgctcccgcagagagtcctggaacagcacaaactcaacaaggaccagtgggaggagcggatccaggtgtggcatgaggaacaccgtggcatgctcagggaggatgctgtcctggaatatctgaagattgctcaagatctggagatgtatggtgtgaactacttcagcatcaagaacaagaaaggctcagagctgtggctgggggtggatgccctgggtctcaacatctatgagcagaatgacagactaactcccaagataggcttcccctggagtgaaatcaggaacatctctttcaatgataagaaatttgtcatcaagcccattgacaaaaaagccccggacttcgtcttctatgctccccggctgcggattaacaagcggatcttggccttgtgcatggggaaccatgaactatacatgcgccgtcgcaagcctgataccattgaggtgcagcagatgaaggcacaggcccgggaggagaagcaccagaagcagatggagcgtgctatgctggaaaatgagaagaagaagcgtgaaatggcagagaaggagaaagagaagattgaacgggagaaggaggagctgatggagaggctgaagcagatcgaggaacagactaagaaggctcagcaagaactggaagaacagacccgtagggctctggaacttgagcaggaacggaagcgtgcccagagcgaggctgaaaagctggccaaggagcgtcaagaagctgaagaggccaaggaggccttgctgcaggcctcccgggaccagaaaaagactcaggaacagctggccttggaaatggcagagctgacagctcgaatctcccagctggagatggcccgacagaagaaggagagtgaggctgtggagtggcagcagaaggcccagatggtacaggaagacttggagaagacccgtgctgagctgaagactgccatgagtacacctcatgtggcagagcctgctgagaatgagcaggatgagcaggatgagaatggggcagaggctagtgctgacctacgggctgatgctatggccaaggaccgcagtgaggaggaacgtaccactgaggcagagaagaatgagcgtgtgcagaagcacctgaaggccctcacttcggagctggccaatgccagagatgagtccaagaagactgccaatgacatgatccatgctgagaacatgcgactgggccgagacaaatacaagaccctgcgccagatccggcagggcaacaccaagcagcgcattgacgaatttgagtctatgtaatgggcacccagcctctagggacccctcctccctttttccttgtccccacactcctacacctaactcacctaactcatactgtgctggagccactaactagagcagccctggagtcatgccaagcatttaatgtagccatgggaccaaacctagccccttagcccccacccacttccctgggcaaatgaatggctcactatggtgccaatggaacctcctttctcttctctgttccattgaatctgtatggctagaatatcctacttctccagcctagaggtactttccacttgattttgcaaatgcccttacacttactgttgtcctatgggagtcaagtgtggagtaggttggaagctagctcccctcctctcccctaccactgtcttcttcagggtcctgagatttacacggttggagtgttatgcggtctagggaatgagacaggacctaggatatcttctccaggatgtcaactgacctaaaatttgccctcccatcccgtttagagttatttaggctttgtaacgattgggggataaaaagatgttcagtcatttttgtttctacctcccagatcggatctgttgcaaactcagcctcaataagccttgtcgttgactttagggactcaatttctccccagggtggatgggggaaatggtgccttcaagaccttcaccaaacatactagaagggcattggccattctattgtggcaaggctgagtagaagatcctaccccaattccttgtaggagtataggccggtctaaagtgagctctatgggcagatctaccccttacttattattccagatctgcagtcacttcgtgggatctgcccctccctgcttcaatacccaaatcctctccagctataacagtagggatgagtacccaaaagctcagccagccccatcaggactcttgtgaaaagagaggatatgttcacacctagcgtcagtattttccctgctaggggttttaggtctcttcccctctcagagctacttgggccatagctcctgctccacagccatcccagccttggcatctagagcttgatgccagtaggctcaactagggagtgagtgcaaaaagctgagtatggtgagagaagcctgtgccctgatccaagtttactcaaccctctcaggtgaccaaaatccccttctcatcactcccctccaaagaggtgactgggccctgcctctgtttgacaaacctctaacccaggtcttgacaccagctgttctgtcccttggagctgtaaaccagagagctgctggggattctggcctagtcccttccacacccccaccccttgctctcaacccaggagcatccacctccttctctgtctcatgtgtgctcttcttctttctacagtattatgtactctactgatatctaaatattgatttctgccttccttgctaatgcaccattagaagatattagtcttggggcaggatgattttggcctcattactttaccacccccacacctggaaagcatatactatattacaaaatgacattttgccaaaattattaatataagaagctttcagtattagtgatgtcatctgtcactataggtcatacaatccattcttaaagtacttgttatttgtttttattattactgtttgtcttctccccagggttcagtcctcaaggggccatcctgtcccaccatgcagtgcccctagcttagagcctccctcaattccccctggccaccaccccccactctgtgcctgaccttgaggagtcttgtgtgcattgctgtgaattagctcacttggtgatatgtcctatattggctaaattgaaacctggaattgtggggcaatctattaatagctgccttaaagtcagtaacttacccttagggaggctgggggaaaaggttagattttgtattcaggggttttttgtgtactttttgggttttttaaaaattgtttttggaggggtttatgctcaatccatgttctatttcagtgccaataaaatttaggaagactttccagaacaacaaacatacgacgaaacagtgaaccaaacagacaagcagggg

SEQ ID NO: 310742 - DNA, 4014 bp, Homo sapiens
gggcggctctttcctgggtggggtttgtgaagtcgtggcccgttagcaggaagcctaacagtcgccccgacgctagtgagggacccaatctgagtccccggccagccgaatccaagccgtgtgtactgcgtgctcagcactgcccgacagtcctagctaaacttcgccaactccgctgcctttgccgccaccatgcccaaaacgatcagtgtgcgtgtgaccaccatggatgcagagctggagtttgccatccagcccaacaccaccgggaagcagctatttgaccaggtggtgaaaactattggcttgagggaagtttggttctttggtctgcagtaccaggacactaaaggtttctccacctggctgaaactcaataagaaggtgactgcccaggatgtgcggaaggaaagccccctgctctttaagttccgtgccaagttctaccctgaggatgtgtccgaggaattgattcaggacatcactcagcgcctgttctttctgcaagtgaaagagggcattctcaatgatgatatttactgcccgcctgagaccgctgtgctgctggcctcgtatgctgtccagtctaagtatggcgacttcaataaggaagtgcataagtctggctacctggccggagacaagttgctcccgcagagagtcctggaacagcacaaactcaacaaggaccagtgggaggagcggatccaggtgtggcatgaggaacaccgtggcatgctcagggaggatgctgtcctggaatatctgaagattgctcaagatctggagatgtatggtgtgaactacttcagcatcaagaacaagaaaggctcagagctgtggctgggggtggatgccctgggtctcaacatctatgagcagaatgacagactaactcccaagataggcttcccctggagtgaaatcaggaacatctctttcaatgataagaaatttgtcatcaagcccattgacaaaaaagccccggacttcgtcttctatgctccccggctgcggattaacaagcggatcttggccttgtgcatggggaaccatgaactatacatgcgccgtcgcaagcctgataccattgaggtgcagcagatgaaggcacaggcccgggaggagaagcaccagaagcagatggagcgtgctatgctggaaaatgagaagaagaagcgtgaaatggcagagaaggagaaagagaagattgaacgggagaaggaggagctgatggagaggctgaagcagatcgaggaacagactaagaaggctcagcaagaactggaagaacagacccgtagggctctggaacttgagcaggaacggaagcgtgcccagagcgaggctgaaaagctggccaaggagcgtcaagaagctgaagaggccaaggaggccttgctgcaggcctcccgggaccagaaaaagactcaggaacagctggccttggaaatggcagagctgacagctcgaatctcccagctggagatggcccgacagaagaaggagagtgaggctgtggagtggcagcagaaggcccagatggtacaggaagacttggagaagacccgtgctgagctgaagactgccatgagtacacctcatgtggcagagcctgctgagaatgagcaggatgagcaggatgagaatggggcagaggctagtgctgacctacgggctgatgctatggccaaggaccgcagtgaggaggaacgtaccactgaggcagagaagaatgagcgtgtgcagaagcacctgaaggccctcacttcggagctggccaatgccagagatgagtccaagaagactgccaatgacatgatccatgctgagaacatgcgactgggccgagacaaatacaagaccctgcgccagatccggcagggcaacaccaagcagcgcattgacgaatttgagtctatgtaatgggcacccagcctctagggacccctcctccctttttccttgtccccacactcctacacctaactcacctaactcatactgtgctggagccactaactagagcagccctggagtcatgccaagcatttaatgtagccatgggaccaaacctagccccttagcccccacccacttccctgggcaaatgaatggctcactatggtgccaatggaacctcctttctcttctctgttccattgaatctgtatggctagaatatcctacttctccagcctagaggtactttccacttgattttgcaaatgcccttacacttactgttgtcctatgggagtcaagtgtggagtaggttggaagctagctcccctcctctcccctaccactgtcttcttcagggtcctgagatttacacggttggagtgttatgcggtctagggaatgagacaggacctaggatatcttctccaggatgtcaactgacctaaaatttgccctcccatcccgtttagagttatttaggctttgtaacgattgggggataaaaagatgttcagtcatttttgtttctacctcccagatcggatctgttgcaaactcagcctcaataagccttgtcgttgactttagggactcaatttctccccagggtggatgggggaaatggtgccttcaagaccttcaccaaacatactagaagggcattggccattctattgtggcaaggctgagtagaagatcctaccccaattccttgtaggagtataggccggtctaaagtgagctctatgggcagatctaccccttacttattattccagatctgcagtcacttcgtgggatctgcccctccctgcttcaatacccaaatcctctccagctataacagtagggatgagtacccaaaagctcagccagccccatcaggactcttgtgaaaagagaggatatgttcacacctagcgtcagtattttccctgctaggggttttaggtctcttcccctctcagagctacttgggccatagctcctgctccacagccatcccagccttggcatctagagcttgatgccagtaggctcaactagggagtgagtgcaaaaagctgagtatggtgagagaagcctgtgccctgatccaagtttactcaaccctctcaggtgaccaaaatccccttctcatcactcccctccaaagaggtgactgggccctgcctctgtttgacaaacctctaacccaggtcttgacaccagctgttctgtcccttggagctgtaaaccagagagctgctggggattctggcctagtcccttccacacccccaccccttgctctcaacccaggagcatccacctccttctctgtctcatgtgtgctcttcttctttctacagtattatgtactctactgatatctaaatattgatttctgccttccttgctaatgcaccattagaagatattagtcttggggcaggatgattttggcctcattactttaccacccccacacctggaaagcatatactatattacaaaatgacattttgccaaaattattaatataagaagctttcagtattagtgatgtcatctgtcactataggtcatacaatccattcttaaagtacttgttatttgtttttattattactgtttgtcttctccccagggttcagtcctcaaggggccatcctgtcccaccatgcagtgcccctagcttagagcctccctcaattccccctggccaccaccccccactctgtgcctgaccttgaggagtcttgtgtgcattgctgtgaattagctcacttggtgatatgtcctatattggctaaattgaaacctggaattgtggggcaatctattaatagctgccttaaagtcagtaacttacccttagggaggctgggggaaaaggttagattttgtattcaggggttttttgtgtactttttgggttttttaaaaattgtttttggaggggtttatgctcaatccatgttctatttcagtgccaataaaatttaggaagacttaaaaaaaaattataaaaaaaagtcgacgcggcgcaatttagtattataacta

SEQ ID NO: 310743 - DNA, 2657 bp, Homo sapiens
tatcggtcggtccgggtgtgggagagaatgtctctgaagtttcttgcacacagccctggctggttgttataagctgttaatgcagcctgcactcaggaagccctgatgtttaaaggaactgtgtctttgttcttcctctcttccctctttctcttagtcccactttatctcttctttctcttcctctccctcctccttttcctctctccactcccgggagtggagagagaagcccagatggtacaggaagacttggagaagacccgtgctgagctgaagactgccatgagtacacctcatgtggcagagcctgctgagaatgagcaggatgagcaggatgagaatggggcagaggctagtgctgacctacgggctgatgctatggccaaggaccgcagtgaggaggaacgtaccactgaggcagagaagaatgagcgtgtgcagaagcacctgaaggccctcacttcggagctggccaatgccagagatgagtccaagaagactgccaatgacatgatccatgctgagaacatgcgactgggccgagacaaatacaagaccctgcgccagatccggcagggcaacaccaagcagcgcattgacgaatttgagtctatgtaatgggcacccagcctctagggacccctcctccctttttccttgtccccacactcctacacctaactcacctaactcatactgtgctggagccactaactagagcagccctggagtcatgccaagcatttaatgtagccatgggaccaaacctagccccttagcccccacccacttccctgggcaaatgaatggctcactatggtgccaatggaacctcctttctcttctctgttccattgaatctgtatggctagaatatcctacttctccagcctagaggtactttccacttgattttgcaaatgcccttacacttactgttgtcctatgggagtcaagtgtggagtaggttggaagctagctcccctcctctcccctaccactgtcttcttcagggtcctgagatttacacggttggagtgttatgcggtctagggaatgagacaggacctaggatatcttctccaggatgtcaactgacctaaaatttgccctcccatcccgtttagagttatttaggctttgtaacgattgggggataaaaagatgttcagtcatttttgtttctacctcccagatcggatctgttgcaaactcagcctcaataagccttgtcgttgactttagggactcaatttctccccagggtggatgggggaaatggtgccttcaagaccttcaccaaacatactagaagggcattggccattctattgtggcaaggctgagtagaagatcctaccccaattccttgtaggagtataggccggtctaaagtgagctctatgggcagatctaccccttacttattattccagatctgcagtcacttcgtgggatctgcccctccctgcttcaatacccaaatcctctccagctataacagtagggatgagtacccaaaagctcagccagccccatcaggactcttgtgaaaagagaggatatgttcacacctagcgtcagtattttccctgctaggggttttaggtctcttcccctctcagagctacttgggccatagctcctgctccacagccatcccagccttggcatctagagcttgatgccagtaggctcaactagggagtgagtgcaaaaagctgagtatggtgagagaagcctgtgccctgatccaagtttactcaaccctctcaggtgaccaaaatccccttctcatcactcccctccaaagaggtgactgggccctgcctctgtttgacaaacctctaacccaggtcttgacaccagctgttctgtcccttggagctgtaaaccagagagctgctggggattctggcctagtcccttccacacccccaccccttgctctcaacccaggagcatccacctccttctctgtctcatgtgtgctcttcttctttctacagtattatgtactctactgatatctaaatattgatttctgccttccttgctaatgcaccattagaagatattagtcttggggcaggatgattttggcctcattactttaccacccccacacctggaaagcatatactatattacaaaatgacattttgccaaaattattaatataagaagctttcagtattagtgatgtcatctgtcactataggtcatacaatccattcttaaagtacttgttatttgtttttattattactgtttgtcttctccccagggttcagtcctcaaggggccatcctgtcccaccatgcagtgcccctagcttagagcctccctcaattccccctggccaccaccccccactctgtgcctgaccttgaggagtcttgtgtgcattgctgtgaattagctcacttggtgatatgtcctatattggctaaattgaaacctggaattgtggggcaatctattaatagctgccttaaagtcagtaacttacccttagggaggctgggggaaaaggttagattttgtattcaggggttttttgtgtactttttgggttttttaaaaattgtttttggaggggtttatgctcaatccatgttctatttcagtgccaataaaatttaggaagactt

SEQ ID NO: 310744 - DNA, 2454 bp, Homo sapiens
  misc_feature (17)..(17): n is a, c, g, or t
ctactcaaaaaaaaaanaaaaaaaaaaagcccagatggtacaggaagacttggagaagacccgtgctgagctgaagactgccatgagtacacctcatgtggcagagcctgctgagaatgagcaggatgagcaggatgagaatggggcagaggctagtgctgacctacgggctgatgctatggccaaggaccgcagtgaggaggaacgtaccactgaggcagagaagaatgagcgtgtgcagaagcacctgaaggccctcacttcggagctggccaatgccagagatgagtccaagaagactgccaatgacatgatccatgctgagaacatgcgactgggccgagacaaatacaagaccctgcgccagatccggcagggcaacaccaagcagcgcattgacgaatttgagtctatgtaatgggcacccagcctctagggacccctcctccctttttccttgtccccacactcctacacctaactcacctaactcatactgtgctggagccactaactagagcagccctggagtcatgccaagcatttaatgtagccatgggaccaaacctagccccttagcccccacccacttccctgggcaaatgaatggctcactatggtgccaatggaacctcctttctcttctctgttccattgaatctgtatggctagaatatcctacttctccagcctagaggtactttccacttgattttgcaaatgcccttacacttactgttgtcctatgggagtcaagtgtggagtaggttggaagctagctcccctcctctcccctaccactgtcttcttcagggtcctgagatttacacggttggagtgttatgcggtctagggaatgagacaggacctaggatatcttctccaggatgtcaactgacctaaaatttgccctcccatcccgtttagagttatttaggctttgtaacgattgggggataaaaagatgttcagtcatttttgtttctacctcccagatcggatctgttgcaaactcagcctcaataagccttgtcgttgactttagggactcaatttctccccagggtggatgggggaaatggtgccttcaagaccttcaccaaacatactagaagggcattggccattctattgtggcaaggctgagtagaagatcctaccccaattccttgtaggagtataggccggtctaaagtgagctctatgggcagatctaccccttacttattattccagatctgcagtcacttcgtgggatctgcccctccctgcttcaatacccaaatcctctccagctataacagtagggatgagtacccaaaagctcagccagccccatcaggactcttgtgaaaagagaggatatgttcacacctagcgtcagtattttccctgctaggggttttaggtctcttcccctctcagagctacttgggccatagctcctgctccacagccatcccagccttggcatctagagcttgatgccagtaggctcaactagggagtgagtgcaaaaagctgagtatggtgagagaagcctgtgccctgatccaagtttactcaaccctctcaggtgaccaaaatccccttctcatcactcccctccaaagaggtgactgggccctgcctctgtttgacaaacctctaacccaggtcttgacaccagctgttctgtcccttggagctgtaaaccagagagctgctggggattctggcctagtcccttccacacccccaccccttgctctcaacccaggagcatccacctccttctctgtctcatgtgtgctcttcttctttctacagtattatgtactctactgatatctaaatattgatttctgccttccttgctaatgcaccattagaagatattagtcttggggcaggatgattttggcctcattactttaccacccccacacctggaaagcatatactatattacaaaatgacattttgccaaaattattaatataagaagctttcagtattagtgatgtcatctgtcactataggtcatacaatccattcttaaagtacttgttatttgtttttattattactgtttgtcttctccccagggttcagtcctcaaggggccatcctgtcccaccatgcagtgcccctagcttagagcctccctcaattccccctggccaccaccccccactctgtgcctgaccttgaggagtcttgtgtgcattgctgtgaattagctcacttggtgatatgtcctatattggctaaattgaaacctggaattgtggggcaatctattaatagctgccttaaagtcagtaacttacccttagggaggctgggggaaaaggttagattttgtattcaggggttttttgtgtactttttgggttttttaaaaattgtttttggaggggtttatgctcaatccatgttctatttcagtgccaataaaatttaggaagactt

SEQ ID NO: 310745 - DNA, 2479 bp, Homo sapiens
  misc_feature (4)..(4): n is a, c, g, or t
cggnaaccattgccatgattcgatcgagctccttcccgagtcttgcggaaagcgcccagatggtacaggaagacttggagaagacccgtgctgagctgaagactgccatgagtacacctcatgtggcagagcctgctgagaatgagcaggatgagcaggatgagaatggggcagaggctagtgctgacctacgggctgatgctatggccaaggaccgcagtgaggaggaacgtaccactgaggcagagaagaatgagcgtgtgcagaagcacctgaaggccctcacttcggagctggccaatgccagagatgagtccaagaagactgccaatgacatgatccatgctgagaacatgcgactgggccgagacaaatacaagaccctgcgccagatccggcagggcaacaccaagcagcgcattgacgaatttgagtctatgtaatgggcacccagcctctagggacccctcctccctttttccttgtccccacactcctacacctaactcacctaactcatactgtgctggagccactaactagagcagccctggagtcatgccaagcatttaatgtagccatgggaccaaacctagccccttagcccccacccacttccctgggcaaatgaatggctcactatggtgccaatggaacctcctttctcttctctgttccattgaatctgtatggctagaatatcctacttctccagcctagaggtactttccacttgattttgcaaatgcccttacacttactgttgtcctatgggagtcaagtgtggagtaggttggaagctagctcccctcctctcccctaccactgtcttcttcagggtcctgagatttacacggttggagtgttatgcggtctagggaatgagacaggacctaggatatcttctccaggatgtcaactgacctaaaatttgccctcccatcccgtttagagttatttaggctttgtaacgattgggggataaaaagatgttcagtcatttttgtttctacctcccagatcggatctgttgcaaactcagcctcaataagccttgtcgttgactttagggactcaatttctccccagggtggatgggggaaatggtgccttcaagaccttcaccaaacatactagaagggcattggccattctattgtggcaaggctgagtagaagatcctaccccaattccttgtaggagtataggccggtctaaagtgagctctatgggcagatctaccccttacttattattccagatctgcagtcacttcgtgggatctgcccctccctgcttcaatacccaaatcctctccagctataacagtagggatgagtacccaaaagctcagccagccccatcaggactcttgtgaaaagagaggatatgttcacacctagcgtcagtattttccctgctaggggttttaggtctcttcccctctcagagctacttgggccatagctcctgctccacagccatcccagccttggcatctagagcttgatgccagtaggctcaactagggagtgagtgcaaaaagctgagtatggtgagagaagcctgtgccctgatccaagtttactcaaccctctcaggtgaccaaaatccccttctcatcactcccctccaaagaggtgactgggccctgcctctgtttgacaaacctctaacccaggtcttgacaccagctgttctgtcccttggagctgtaaaccagagagctgctggggattctggcctagtcccttccacacccccaccccttgctctcaacccaggagcatccacctccttctctgtctcatgtgtgctcttcttctttctacagtattatgtactctactgatatctaaatattgatttctgccttccttgctaatgcaccattagaagatattagtcttggggcaggatgattttggcctcattactttaccacccccacacctggaaagcatatactatattacaaaatgacattttgccaaaattattaatataagaagctttcagtattagtgatgtcatctgtcactataggtcatacaatccattcttaaagtacttgttatttgtttttattattactgtttgtcttctccccagggttcagtcctcaaggggccatcctgtcccaccatgcagtgcccctagcttagagcctccctcaattccccctggccaccaccccccactctgtgcctgaccttgaggagtcttgtgtgcattgctgtgaattagctcacttggtgatatgtcctatattggctaaattgaaacctggaattgtggggcaatctattaatagctgccttaaagtcagtaacttacccttagggaggctgggggaaaaggttagattttgtattcaggggttttttgtgtactttttgggttttttaaaaattgtttttggaggggtttatgctcaatccatgttctatttcagtgccaataaaatttaggaagactt

SEQ ID NO: 310746 - DNA, 2387 bp, Homo sapiens
gggagcttagcctgacgagttcttcgaggaggacaacatgctgagcatgggcaagaagatgagcaggatgagaatggggcagaggctagtgctgacctacgggctgatgctatggccaaggaccgcagtgaggaggaacgtaccactgaggcagagaagaatgagcgtgtgcagaagcacctgaaggccctcacttcggagctggccaatgccagagatgagtccaagaagactgccaatgacatgatccatgctgagaacatgcgactgggccgagacaaatacaagaccctgcgccagatccggcagggcaacaccaagcagcgcattgacgaatttgagtctatgtaatgggcacccagcctctagggacccctcctccctttttccttgtccccacactcctacacctaactcacctaactcatactgtgctggagccactaactagagcagccctggagtcatgccaagcatttaatgtagccatgggaccaaacctagccccttagcccccacccacttccctgggcaaatgaatggctcactatggtgccaatggaacctcctttctcttctctgttccattgaatctgtatggctagaatatcctacttctccagcctagaggtactttccacttgattttgcaaatgcccttacacttactgttgtcctatgggagtcaagtgtggagtaggttggaagctagctcccctcctctcccctaccactgtcttcttcagggtcctgagatttacacggttggagtgttatgcggtctagggaatgagacaggacctaggatatcttctccaggatgtcaactgacctaaaatttgccctcccatcccgtttagagttatttaggctttgtaacgattgggggataaaaagatgttcagtcatttttgtttctacctcccagatcggatctgttgcaaactcagcctcaataagccttgtcgttgactttagggactcaatttctccccagggtggatgggggaaatggtgccttcaagaccttcaccaaacatactagaagggcattggccattctattgtggcaaggctgagtagaagatcctaccccaattccttgtaggagtataggccggtctaaagtgagctctatgggcagatctaccccttacttattattccagatctgcagtcacttcgtgggatctgcccctccctgcttcaatacccaaatcctctccagctataacagtagggatgagtacccaaaagctcagccagccccatcaggactcttgtgaaaagagaggatatgttcacacctagcgtcagtattttccctgctaggggttttaggtctcttcccctctcagagctacttgggccatagctcctgctccacagccatcccagccttggcatctagagcttgatgccagtaggctcaactagggagtgagtgcaaaaagctgagtatggtgagagaagcctgtgccctgatccaagtttactcaaccctctcaggtgaccaaaatccccttctcatcactcccctccaaagaggtgactgggccctgcctctgtttgacaaacctctaacccaggtcttgacaccagctgttctgtcccttggagctgtaaaccagagagctgctggggattctggcctagtcccttccacacccccaccccttgctctcaacccaggagcatccacctccttctctgtctcatgtgtgctcttcttctttctacagtattatgtactctactgatatctaaatattgatttctgccttccttgctaatgcaccattagaagatattagtcttggggcaggatgattttggcctcattactttaccacccccacacctggaaagcatatactatattacaaaatgacattttgccaaaattattaatataagaagctttcagtattagtgatgtcatctgtcactataggtcatacaatccattcttaaagtacttgttatttgtttttattattactgtttgtcttctccccagggttcagtcctcaaggggccatcctgtcccaccatgcagtgcccctagcttagagcctccctcaattccccctggccaccaccccccactctgtgcctgaccttgaggagtcttgtgtgcattgctgtgaattagctcacttggtgatatgtcctatattggctaaattgaaacctggaattgtggggcaatctattaatagctgccttaaagtcagtaacttacccttagggaggctgggggaaaaggttagattttgtattcaggggttttttgtgtactttttgggttttttaaaaattgtttttggaggggtttatgctcaatccatgttctatttcagtgccaataaaatttaggaagactt

SEQ ID NO: 310747 - DNA, 2367 bp, Homo sapiens
ccccactgcagttctaacagagttggaaatgactctcaatatttatatatagagagaaagggtgaggaagaaagaaggaaacagaagagaagggaagtctggtcaaataacaggaggtaaaatgagagaaagccattgacctctgtgttcccatacatcctcacaggccctcacttcggagctggccaatgccagagatgagtccaagaagactgccaatgacatgatccatgctgagaacatgcgactgggccgagacaaatacaagaccctgcgccagatccggcagggcaacaccaagcagcgcattgacgaatttgagtctatgtaatgggcacccagcctctagggacccctcctccctttttccttgtccccacactcctacacctaactcacctaactcatactgtgctggagccactaactagagcagccctggagtcatgccaagcatttaatgtagccatgggaccaaacctagccccttagcccccacccacttccctgggcaaatgaatggctcactatggtgccaatggaacctcctttctcttctctgttccattgaatctgtatggctagaatatcctacttctccagcctagaggtactttccacttgattttgcaaatgcccttacacttactgttgtcctatgggagtcaagtgtggagtaggttggaagctagctcccctcctctcccctaccactgtcttcttcagggtcctgagatttacacggttggagtgttatgcggtctagggaatgagacaggacctaggatatcttctccaggatgtcaactgacctaaaatttgccctcccatcccgtttagagttatttaggctttgtaacgattgggggataaaaagatgttcagtcatttttgtttctacctcccagatcggatctgttgcaaactcagcctcaataagccttgtcgttgactttagggactcaatttctccccagggtggatgggggaaatggtgccttcaagaccttcaccaaacatactagaagggcattggccattctattgtggcaaggctgagtagaagatcctaccccaattccttgtaggagtataggccggtctaaagtgagctctatgggcagatctaccccttacttattattccagatctgcagtcacttcgtgggatctgcccctccctgcttcaatacccaaatcctctccagctataacagtagggatgagtacccaaaagctcagccagccccatcaggactcttgtgaaaagagaggatatgttcacacctagcgtcagtattttccctgctaggggttttaggtctcttcccctctcagagctacttgggccatagctcctgctccacagccatcccagccttggcatctagagcttgatgccagtaggctcaactagggagtgagtgcaaaaagctgagtatggtgagagaagcctgtgccctgatccaagtttactcaaccctctcaggtgaccaaaatccccttctcatcactcccctccaaagaggtgactgggccctgcctctgtttgacaaacctctaacccaggtcttgacaccagctgttctgtcccttggagctgtaaaccagagagctgctggggattctggcctagtcccttccacacccccaccccttgctctcaacccaggagcatccacctccttctctgtctcatgtgtgctcttcttctttctacagtattatgtactctactgatatctaaatattgatttctgccttccttgctaatgcaccattagaagatattagtcttggggcaggatgattttggcctcattactttaccacccccacacctggaaagcatatactatattacaaaatgacattttgccaaaattattaatataagaagctttcagtattagtgatgtcatctgtcactataggtcatacaatccattcttaaagtacttgttatttgtttttattattactgtttgtcttctccccagggttcagtcctcaaggggccatcctgtcccaccatgcagtgcccctagcttagagcctccctcaattccccctggccaccaccccccactctgtgcctgaccttgaggagtcttgtgtgcattgctgtgaattagctcacttggtgatatgtcctatattggctaaattgaaacctggaattgtggggcaatctattaatagctgccttaaagtcagtaacttacccttagggaggctgggggaaaaggttagattttgtattcaggggttttttgtgtactttttgggttttttaaaaattgtttttggaggggtttatgctcaatccatgttctatttcagtgccaataaaatttaggaagactt

SEQ ID NO: 310748 - DNA, 2180 bp, Homo sapiens
acagatgagtcataacactgccaagtgacatgtatccatgctgcgaacctgcgattggtcctgcagtacgatacattacgataccctgtgtgtgattttgttccccaaaacaagcagcgcattgacgaatttgagtctatgtaatgggcacccagcctctagggacccctcctccctttttccttgtccccacactcctacacctaactcacctaactcatactgtgctggagccactaactagagcagccctggagtcatgccaagcatttaatgtagccatgggaccaaacctagccccttagcccccacccacttccctgggcaaatgaatggctcactatggtgccaatggaacctcctttctcttctctgttccattgaatctgtatggctagaatatcctacttctccagcctagaggtactttccacttgattttgcaaatgcccttacacttactgttgtcctatgggagtcaagtgtggagtaggttggaagctagctcccctcctctcccctaccactgtcttcttcagggtcctgagatttacacggttggagtgttatgcggtctagggaatgagacaggacctaggatatcttctccaggatgtcaactgacctaaaatttgccctcccatcccgtttagagttatttaggctttgtaacgattgggggataaaaagatgttcagtcatttttgtttctacctcccagatcggatctgttgcaaactcagcctcaataagccttgtcgttgactttagggactcaatttctccccagggtggatgggggaaatggtgccttcaagaccttcaccaaacatactagaagggcattggccattctattgtggcaaggctgagtagaagatcctaccccaattccttgtaggagtataggccggtctaaagtgagctctatgggcagatctaccccttacttattattccagatctgcagtcacttcgtgggatctgcccctccctgcttcaatacccaaatcctctccagctataacagtagggatgagtacccaaaagctcagccagccccatcaggactcttgtgaaaagagaggatatgttcacacctagcgtcagtattttccctgctaggggttttaggtctcttcccctctcagagctacttgggccatagctcctgctccacagccatcccagccttggcatctagagcttgatgccagtaggctcaactagggagtgagtgcaaaaagctgagtatggtgagagaagcctgtgccctgatccaagtttactcaaccctctcaggtgaccaaaatccccttctcatcactcccctccaaagaggtgactgggccctgcctctgtttgacaaacctctaacccaggtcttgacaccagctgttctgtcccttggagctgtaaaccagagagctgctggggattctggcctagtcccttccacacccccaccccttgctctcaacccaggagcatccacctccttctctgtctcatgtgtgctcttcttctttctacagtattatgtactctactgatatctaaatattgatttctgccttccttgctaatgcaccattagaagatattagtcttggggcaggatgattttggcctcattactttaccacccccacacctggaaagcatatactatattacaaaatgacattttgccaaaattattaatataagaagctttcagtattagtgatgtcatctgtcactataggtcatacaatccattcttaaagtacttgttatttgtttttattattactgtttgtcttctccccagggttcagtcctcaaggggccatcctgtcccaccatgcagtgcccctagcttagagcctccctcaattccccctggccaccaccccccactctgtgcctgaccttgaggagtcttgtgtgcattgctgtgaattagctcacttggtgatatgtcctatattggctaaattgaaacctggaattgtggggcaatctattaatagctgccttaaagtcagtaacttacccttagggaggctgggggaaaaggttagattttgtattcaggggttttttgtgtactttttgggttttttaaaaattgtttttggaggggtttatgctcaatccatgttctatttcagtgccaataaaatttaggaagactt

SEQ ID NO: 310749 - DNA, 3908 bp, Homo sapiens
gggcggctctttcctgggtggggtttgtgaagtcgtggcccgttagcaggaagcctaacagtcgccccgacgctagtgagggacccaatctgagtccccggccagccgaatccaagccgtgtgtactgcgtgctcagcactgcccgacagtcctagctaaacttcgccaactccgctgcctttgccgccaccatgcccaaaacgatcagtgtgcgtgtgaccaccatggatgcagagctggagtttgccatccagcccaacaccaccgggaagcagctatttgaccaggtggtgaaaactattggcttgagggaagtttggttctttggtctgcagtaccaggacactaaaggtttctccacctggctgaaactcaataagaaggtgactgcccaggatgtgcggaaggaaagccccctgctctttaagttccgtgccaagttctaccctgaggatgtgtccgaggaattgattcaggacatcactcagcgcctgttctttctgcaagtgaaagagggcattctcaatgatgatatttactgcccgcctgagaccgctgtgctgctggcctcgtatgctgtccagtctaagtatggcgacttcaataaggaagtgcataagtctggctacctggccggagacaagttgctcccgcagagagtcctggaacagcacaaactcaacaaggaccagtgggaggagcggatccaggtgtggcatgaggaacaccgtggcatgctcagggaggatgctgtcctggaatatctgaagattgctcaagatctggagatgtatggtgtgaactacttcagcatcaagaacaagaaaggctcagagctgtggctgggggtggatgccctgggtctcaacatctatgagcagaatgacagactaactcccaagataggcttcccctggagtgaaatcaggaacatctctttcaatgataagaaatttgtcatcaagcccattgacaaaaaagccccggacttcgtcttctatgctccccggctgcggattaacaagcggatcttggccttgtgcatggggaaccatgaactatacatgcgccgtcgcaagcctgataccattgaggtgcagcagatgaaggcacaggcccgggaggagaagcaccagaagcagatggagcgtgctatgctggaaaatgagaagaagaagcgtgaaatggcagagaaggagaaagagaagattgaacgggagaaggaggagctgatggagaggctgaagcagatcgaggaacagactaagaaggctcagcaagaactggaagaacagacccgtagggctctggaacttgagcaggaacggaagcgtgcccagagcgaggctgaaaagctggccaaggagcgtcaagaagctgaagaggccaaggaggccttgctgcaggcctcccgggaccagaaaaagactcaggaacagctggccttggaaatggcagagctgacagctcgaatctcccagctggagatggcccgacagaagaaggagagtgaggctgtggagtggcagcagaaggcccagatggtacaggaagacttggagaagacccgtgctgagctgaagactgccatgagtacacctcatgtggcagagcctgctgagaatgagcaggatgagcaggatgagaatggggcagaggctagtgctgacctacgggctgatgctatggccaaggaccgcagtgaggaggaacgtaccactgaggcagagaagaatgagcgtgtgcagaagcacctgaaggccctcacttcggagctggccaatgccagagatgagtccaagaagactgccaatgacatgatccatgctgagaacatgcgactgggccgagacaaatacaagaccctgcgccagatccggcagggcaacaccaagcagcgcattgacgaatttgagtctatgtaatgggcacccagcctctagggacccctcctccctttttccttgtccccacactcctacacctaactcacctaactcatactgtgctggagccactaactagagcagccctggagtcatgccaagcatttaatgtagccatgggaccaaacctagccccttagcccccacccacttccctgggcaaatgaatggctcactatggtgccaatggaacctcctttctcttctctgttccattgaatctgtatggctagaatatcctacttctccagcctagaggtactttccacttgattttgcaaatgcccttacacttactgttgtcctatgggagtcaagtgtggagtaggttggaagctagctcccctcctctcccctaccactgtcttcttcagggtcctgagatttacacggttggagtgttatgcggtctagggaatgagacaggacctaggatatcttctccaggatgtcaactgacctaaaatttgccctcccatcccgtttagagttatttaggctttgtaacgattgggggataaaaagatgttcagtcatttttgtttctacctcccagatcggatctgttgcaaactcagcctcaataagccttgtcgttgactttagggactcaatttctccccagggtggatgggggaaatggtgccttcaagaccttcaccaaacatactagaagggcattggccattctattgtggcaaggctgagtagaagatcctaccccaattccttgtaggagtataggccggtctaaagtgagctctatgggcagatctaccccttacttattattccagatctgcagtcacttcgtgggatctgcccctccctgcttcaatacccaaatcctctccagctataacagtagggatgagtacccaaaagctcagccagccccatcaggactcttgtgaaaagagaggatatgttcacacctagcgtcagtattttccctgctaggggttttaggtctcttcccctctcagagctacttgggccatagctcctgctccacagccatcccagccttggcatctagagcttgatgccagtaggctcaactagggagtgagtgcaaaaagctgagtatggtgagagaagcctgtgccctgatccaagtttactcaaccctctcaggtgaccaaaatccccttctcatcactcccctccaaagaggtgactgggccctgcctctgtttgacaaacctctaacccaggtcttgacaccagctgttctgtcccttggagctgtaaaccagagagctgctggggattctggcctagtcccttccacacccccaccccttgctctcaacccaggagcatccacctccttctctgtctcatgtgtgctcttcttctttctacagtattatgtactctactgatatctaaatattgatttctgccttccttgctaatgcaccattagaagatattagtcttggggcaggatgattttggcctcattactttaccacccccacacctggaaagcatatactatattacaaaatgacattttgccaaaattattaatataagaagctttcagtattagtgatgtcatctgtcactataggtcatacaatccattcttaaagtacttgttatttgtttttattattactgtttgtcttctccccagggttcagtcctcaaggggccatcctgtcccaccactctgtgcctgaccttgaggagtcttgtgtgcattgctgtgaattagctcacttggtgatatgtcctatattggctaaattgaaacctggaattgtggggcaatctattaatagctgccttaaagtcagtaacttacccttagggaggctgggggaaaaggttagattttgtattcaggggttttttgtgtactttttgggttttttaaaaattgtttttggaggggtttatgctcaatccatgttctatttcagtgccaataaaatttaggaagactt

SEQ ID NO: 310750 - DNA, 1825 bp, Homo sapiens
  misc_feature (17)..(17): n is a, c, g, or t
ctactcaaaaaaaaaanaaaaaaaaaaaaatctgtatggctagaatatcctacttctccagcctagaggtactttccacttgattttgcaaatgcccttacacttactgttgtcctatgggagtcaagtgtggagtaggttggaagctagctcccctcctctcccctaccactgtcttcttcagggtcctgagatttacacggttggagtgttatgcggtctagggaatgagacaggacctaggatatcttctccaggatgtcaactgacctaaaatttgccctcccatcccgtttagagttatttaggctttgtaacgattgggggataaaaagatgttcagtcatttttgtttctacctcccagatcggatctgttgcaaactcagcctcaataagccttgtcgttgactttagggactcaatttctccccagggtggatgggggaaatggtgccttcaagaccttcaccaaacatactagaagggcattggccattctattgtggcaaggctgagtagaagatcctaccccaattccttgtaggagtataggccggtctaaagtgagctctatgggcagatctaccccttacttattattccagatctgcagtcacttcgtgggatctgcccctccctgcttcaatacccaaatcctctccagctataacagtagggatgagtacccaaaagctcagccagccccatcaggactcttgtgaaaagagaggatatgttcacacctagcgtcagtattttccctgctaggggttttaggtctcttcccctctcagagctacttgggccatagctcctgctccacagccatcccagccttggcatctagagcttgatgccagtaggctcaactagggagtgagtgcaaaaagctgagtatggtgagagaagcctgtgccctgatccaagtttactcaaccctctcaggtgaccaaaatccccttctcatcactcccctccaaagaggtgactgggccctgcctctgtttgacaaacctctaacccaggtcttgacaccagctgttctgtcccttggagctgtaaaccagagagctgctggggattctggcctagtcccttccacacccccaccccttgctctcaacccaggagcatccacctccttctctgtctcatgtgtgctcttcttctttctacagtattatgtactctactgatatctaaatattgatttctgccttccttgctaatgcaccattagaagatattagtcttggggcaggatgattttggcctcattactttaccacccccacacctggaaagcatatactatattacaaaatgacattttgccaaaattattaatataagaagctttcagtattagtgatgtcatctgtcactataggtcatacaatccattcttaaagtacttgttatttgtttttattattactgtttgtcttctccccagggttcagtcctcaaggggccatcctgtcccaccatgcagtgcccctagcttagagcctccctcaattccccctggccaccaccccccactctgtgcctgaccttgaggagtcttgtgtgcattgctgtgaattagctcacttggtgatatgtcctatattggctaaattgaaacctggaattgtggggcaatctattaatagctgccttaaagtcagtaacttacccttagggaggctgggggaaaaggttagattttgtattcaggggttttttgtgtactttttgggttttttaaaaattgtttttggaggggtttatgctcaatccatgttctatttcagtgccaataaaatttaggaagactt

SEQ ID NO: 310751 - DNA, 1738 bp, Homo sapiens
cggacgcgtgggcacacttgactcccataggacaacagtggtaggggagaggaggggagctagctcccctcctctcccctaccactgtcttcttcagggtcctgagatttacacggttggagtgttatgcggtctagggaatgagacaggacctaggatatcttctccaggatgtcaactgacctaaaatttgccctcccatcccgtttagagttatttaggctttgtaacgattgggggataaaaagatgttcagtcatttttgtttctacctcccagatcggatctgttgcaaactcagcctcaataagccttgtcgttgactttagggactcaatttctccccagggtggatgggggaaatggtgccttcaagaccttcaccaaacatactagaagggcattggccattctattgtggcaaggctgagtagaagatcctaccccaattccttgtaggagtataggccggtctaaagtgagctctatgggcagatctaccccttacttattattccagatctgcagtcacttcgtgggatctgcccctccctgcttcaatacccaaatcctctccagctataacagtagggatgagtacccaaaagctcagccagccccatcaggactcttgtgaaaagagaggatatgttcacacctagcgtcagtattttccctgctaggggttttaggtctcttcccctctcagagctacttgggccatagctcctgctccacagccatcccagccttggcatctagagcttgatgccagtaggctcaactagggagtgagtgcaaaaagctgagtatggtgagagaagcctgtgccctgatccaagtttactcaaccctctcaggtgaccaaaatccccttctcatcactcccctccaaagaggtgactgggccctgcctctgtttgacaaacctctaacccaggtcttgacaccagctgttctgtcccttggagctgtaaaccagagagctgctggggattctggcctagtcccttccacacccccaccccttgctctcaacccaggagcatccacctccttctctgtctcatgtgtgctcttcttctttctacagtattatgtactctactgatatctaaatattgatttctgccttccttgctaatgcaccattagaagatattagtcttggggcaggatgattttggcctcattactttaccacccccacacctggaaagcatatactatattacaaaatgacattttgccaaaattattaatataagaagctttcagtattagtgatgtcatctgtcactataggtcatacaatccattcttaaagtacttgttatttgtttttattattactgtttgtcttctccccagggttcagtcctcaaggggccatcctgtcccaccatgcagtgcccctagcttagagcctccctcaattccccctggccaccaccccccactctgtgcctgaccttgaggagtcttgtgtgcattgctgtgaattagctcacttggtgatatgtcctatattggctaaattgaaacctggaattgtggggcaatctattaatagctgccttaaagtcagtaacttacccttagggaggctgggggaaaaggttagattttgtattcaggggttttttgtgtactttttgggttttttaaaaattgtttttggaggggtttatgctcaatccatgttctatttcagtgccaataaaatttaggaagactt

SEQ ID NO: 310752 - DNA, 3708 bp, Homo sapiens
gggcggctctttcctgggtggggtttgtgaagtcgtggcccgttagcaggaagcctaacagtcgccccgacgctagtgagggacccaatctgagtccccggccagccgaatccaagccgtgtgtactgcgtgctcagcactgcccgacagtcctagctaaacttcgccaactccgctgcctttgccgccaccatgcccaaaacgatcagtgtgcgtgtgaccaccatggatgcagagctggagtttgccatccagcccaacaccaccgggaagcagctatttgaccaggtggtgaaaactattggcttgagggaagtttggttctttggtctgcagtaccaggacactaaaggtttctccacctggctgaaactcaataagaaggtgactgcccaggatgtgcggaaggaaagccccctgctctttaagttccgtgccaagttctaccctgaggatgtgtccgaggaattgattcaggacatcactcagcgcctgttctttctgcaagtgaaagagggcattctcaatgatgatatttactgcccgcctgagaccgctgtgctgctggcctcgtatgctgtccagtctaagtatggcgacttcaataaggaagtgcataagtctggctacctggccggagacaagttgctcccgcagagagtcctggaacagcacaaactcaacaaggaccagtgggaggagcggatccaggtgtggcatgaggaacaccgtggcatgctcagggaggatgctgtcctggaatatctgaagattgctcaagatctggagatgtatggtgtgaactacttcagcatcaagaacaagaaaggctcagagctgtggctgggggtggatgccctgggtctcaacatctatgagcagaatgacagactaactcccaagataggcttcccctggagtgaaatcaggaacatctctttcaatgataagaaatttgtcatcaagcccattgacaaaaaagccccggacttcgtcttctatgctccccggctgcggattaacaagcggatcttggccttgtgcatggggaaccatgaactatacatgcgccgtcgcaagcctgataccattgaggtgcagcagatgaaggcacaggcccgggaggagaagcaccagaagcagatggagcgtgctatgctggaaaatgagaagaagaagcgtgaaatggcagagaaggagaaagagaagattgaacgggagaaggaggagctgatggagaggctgaagcagatcgaggaacagactaagaaggctcagcaagaactggaagaacagacccgtagggctctggaacttgagcaggaacggaagcgtgcccagagcgaggctgaaaagctggccaaggagcgtcaagaagctgaagaggccaaggaggccttgctgcaggcctcccgggaccagaaaaagactcaggaacagctggccttggaaatggcagagctgacagctcgaatctcccagctggagatggcccgacagaagaaggagagtgaggctgtggagtggcagcagaaggcccagatggtacaggaagacttggagaagacccgtgctgagctgaagactgccatgagtacacctcatgtggcagagcctgctgagaatgagcaggatgagcaggatgagaatggggcagaggctagtgctgacctacgggctgatgctatggccaaggaccgcagtgaggaggaacgtaccactgaggcagagaagaatgagcgtgtgcagaagcacctgaaggccctcacttcggagctggccaatgccagagatgagtccaagaagactgccaatgacatgatccatgctgagaacatgcgactgggccgagacaaatacaagaccctgcgccagatccggcagggcaacaccaagcagcgcattgacgaatttgagtctatgtaatgggcacccagcctctagggacccctcctccctttttccttgtccccacactcctacacctaactcacctaactcatactgtgctggagccactaactagagcagccctggagtcatgccaagcatttaatgtagccatgggaccaaacctagccccttagcccccacccacttccctgggcaaatgaatggctcactatggtgccaatggaacctcctttctcttctctgttccattgaatctgtatggctagaatatcctacttctccagcctagaggtactttccacttgattttgcaaatgcccttacacttactgttgtcctatgggagtcaagtgtggagtaggttggaagctagctcccctcctctcccctaccactgtcttcttcagggtcctgagatttacacggttggagtgttatgcggtctagggaatgagacaggacctaggatatcttctccaggatgtcaactgacctaaaatttgccctcccatcccgtttagagttatttaggctttgtaacgattgggggataaaaagatgttcagtcatttttgtttctacctcccagatcggatctgttgcaaactcagcctcaataagccttgtcgttgactttagggactcaatttctccccagggtggatgggggaaatggtgccttcaagaccttcaccaaacatactagaagggcattggccattctattgtggcaaggctgagtagaagatcctaccccaattccttgtaggagtataggccggtctaaagtgagctctatgggcagatctaccccttacttattattccagatctgcagtcacttcgtgggatctgcccctccctgcttcaatacccaaatcctctccagctataacagtagggatgagtacccaaaagctcagccagccccatcaggactcttgtgaaaagagaggatatgttcacacctagcgtcagtattttccctgctaggggttttaggtctcttcccctctcagagctacttgggccatagctcctgctccacagccatcccagccttggcatctagagcttgatgccagtaggctcaactagggagtgagtgcaaaaagctgagtatggtgagagaagcctgtgccctgatccaagtttactcaaccctctcaggtgaccaaaatccccttctcatcactcccctccaaagaggtgactgggccctgcctctgtttgacaaacctctaacccaggtcttgacaccagctgttctgtcccttggagctgtaaaccagagagctgctggggattctggcctagtcccttccacacccccaccccttgctctcaacccaggagcatccacctccttctctgtctcatgtgtgctcttcttctttctacagtattatgtactctactgatatctaaatattgatttctgccttccttgctaatgcaccattagaagatattagtcttggggcaggatgattttggcctcattactttaccacactctgtgcctgaccttgaggagtcttgtgtgcattgctgtgaattagctcacttggtgatatgtcctatattggctaaattgaaacctggaattgtggggcaatctattaatagctgccttaaagtcagtaacttacccttagggaggctgggggaaaaggttagattttgtattcaggggttttttgtgtactttttgggttttttaaaaattgtttttggaggggtttatgctcaatccatgttctatttcagtgccaataaaatttaggaagactt

SEQ ID NO: 310753 - DNA, 3543 bp, Homo sapiens
gggcggctctttcctgggtggggtttgtgaagtcgtggcccgttagcaggaagcctaacagtcgccccgacgctagtgagggacccaatctgagtccccggccagccgaatccaagccgtgtgtactgcgtgctcagcactgcccgacagtcctagctaaacttcgccaactccgctgcctttgccgccaccatgcccaaaacgatcagtgtgcgtgtgaccaccatggatgcagagctggagtttgccatccagcccaacaccaccgggaagcagctatttgaccaggtggtgaaaactattggcttgagggaagtttggttctttggtctgcagtaccaggacactaaaggtttctccacctggctgaaactcaataagaaggtgactgcccaggatgtgcggaaggaaagccccctgctctttaagttccgtgccaagttctaccctgaggatgtgtccgaggaattgattcaggacatcactcagcgcctgttctttctgcaagtgaaagagggcattctcaatgatgatatttactgcccgcctgagaccgctgtgctgctggcctcgtatgctgtccagtctaagtatggcgacttcaataaggaagtgcataagtctggctacctggccggagacaagttgctcccgcagagagtcctggaacagcacaaactcaacaaggaccagtgggaggagcggatccaggtgtggcatgaggaacaccgtggcatgctcagggaggatgctgtcctggaatatctgaagattgctcaagatctggagatgtatggtgtgaactacttcagcatcaagaacaagaaaggctcagagctgtggctgggggtggatgccctgggtctcaacatctatgagcagaatgacagactaactcccaagataggcttcccctggagtgaaatcaggaacatctctttcaatgataagaaatttgtcatcaagcccattgacaaaaaagccccggacttcgtcttctatgctccccggctgcggattaacaagcggatcttggccttgtgcatggggaaccatgaactatacatgcgccgtcgcaagcctgataccattgaggtgcagcagatgaaggcacaggcccgggaggagaagcaccagaagcagatggagcgtgctatgctggaaaatgagaagaagaagcgtgaaatggcagagaaggagaaagagaagattgaacgggagaaggaggagctgatggagaggctgaagcagatcgaggaacagactaagaaggctcagcaagaactggaagaacagacccgtagggctctggaacttgagcaggaacggaagcgtgcccagagcgaggctgaaaagctggccaaggagcgtcaagaagctgaagaggccaaggaggccttgctgcaggcctcccgggaccagaaaaagactcaggaacagctggccttggaaatggcagagctgacagctcgaatctcccagctggagatggcccgacagaagaaggagagtgaggctgtggagtggcagcagaaggcccagatggtacaggaagacttggagaagacccgtgctgagctgaagactgccatgagtacacctcatgtggcagagcctgctgagaatgagcaggatgagcaggatgagaatggggcagaggctagtgctgacctacgggctgatgctatggccaaggaccgcagtgaggaggaacgtaccactgaggcagagaagaatgagcgtgtgcagaagcacctgaaggccctcacttcggagctggccaatgccagagatgagtccaagaagactgccaatgacatgatccatgctgagaacatgcgactgggccgagacaaatacaagaccctgcgccagatccggcagggcaacaccaagcagcgcattgacgaatttgagtctatgtaatgggcacccagcctctagggacccctcctccctttttccttgtccccacactcctacacctaactcacctaactcatactgtgctggagccactaactagagcagccctggagtcatgccaagcatttaatgtagccatgggaccaaacctagccccttagcccccacccacttccctgggcaaatgaatggctcactatggtgccaatggaacctcctttctcttctctgttccattgaatctgtatggctagaatatcctacttctccagcctagaggtactttccacttgattttgcaaatgcccttacacttactgttgtcctatgggagtcaagtgtggagtaggttggaagctagctcccctcctctcccctaccactgtcttcttcagggtcctgagatttacacggttggagtgttatgcggtctagggaatgagacaggacctaggatatcttctccaggatgtcaactgacctaaaatttgccctcccatcccgtttagagttatttaggctttgtaacgattgggggataaaaagatgttcagtcatttttgtttctacctcccagatcggatctgttgcaaactcagcctcaataagccttgtcgttgactttagggactcaatttctccccagggtggatgggggaaatggtgccttcaagaccttcaccaaacatactagaagggcattggccattctattgtggcaaggctgagtagaagatcctaccccaattccttgtaggagtataggccggtctaaagtgagctctatgggcagatctaccccttacttattattccagatctgcagtcacttcgtgggatctgcccctccctgcttcaatacccaaatcctctccagctataacagtagggatgagtacccaaaagctcagccagccccatcaggactcttgtgaaaagagaggatatgttcacacctagcgtcagtattttccctgctaggggttttaggtctcttcccctctcagagctacttgggccatagctcctgctccacagccatcccagccttggcatctagagcttgatgccagtaggctcaactagggagtgagtgcaaaaagctgagtatggtgagagaagcctgtgccctgatccaagtttactcaaccctctcaggtgaccaaaatccccttctcatcactcccctccaaagaggtgactgggccctgcctctgtttgacaaacctctaacccaggtcttgacaccagctgttctgtcccttggagctgtaaaccagagagctgctggggattctggcctagtcccttccacacccccaccccttgctctcaacccaggagcatccacctccttctctctccactcccgtggagagagaaagaaaaagcacagtctattcatccaggacaatcagtaaaaatctacagtaacctgatcaagcaaaaaatccttaggtgttgtgaaattacattggtcacttctgttatcttaaaacttaaaatgatggtctcatttacaataaatgattctaaaataatatgatggtctcatttacatagcaaatgattctaaaataatgtatatccttctctcttcacccggggtacggagct

SEQ ID NO: 310754 - DNA, 3280 bp, Homo sapiens
  misc_feature (3241)..(3242): n is a, c, g, or t
gggcggctctttcctgggtggggtttgtgaagtcgtggcccgttagcaggaagcctaacagtcgccccgacgctagtgagggacccaatctgagtccccggccagccgaatccaagccgtgtgtactgcgtgctcagcactgcccgacagtcctagctaaacttcgccaactccgctgcctttgccgccaccatgcccaaaacgatcagtgtgcgtgtgaccaccatggatgcagagctggagtttgccatccagcccaacaccaccgggaagcagctatttgaccaggtggtgaaaactattggcttgagggaagtttggttctttggtctgcagtaccaggacactaaaggtttctccacctggctgaaactcaataagaaggtgactgcccaggatgtgcggaaggaaagccccctgctctttaagttccgtgccaagttctaccctgaggatgtgtccgaggaattgattcaggacatcactcagcgcctgttctttctgcaagtgaaagagggcattctcaatgatgatatttactgcccgcctgagaccgctgtgctgctggcctcgtatgctgtccagtctaagtatggcgacttcaataaggaagtgcataagtctggctacctggccggagacaagttgctcccgcagagagtcctggaacagcacaaactcaacaaggaccagtgggaggagcggatccaggtgtggcatgaggaacaccgtggcatgctcagggaggatgctgtcctggaatatctgaagattgctcaagatctggagatgtatggtgtgaactacttcagcatcaagaacaagaaaggctcagagctgtggctgggggtggatgccctgggtctcaacatctatgagcagaatgacagactaactcccaagataggcttcccctggagtgaaatcaggaacatctctttcaatgataagaaatttgtcatcaagcccattgacaaaaaagccccggacttcgtcttctatgctccccggctgcggattaacaagcggatcttggccttgtgcatggggaaccatgaactatacatgcgccgtcgcaagcctgataccattgaggtgcagcagatgaaggcacaggcccgggaggagaagcaccagaagcagatggagcgtgctatgctggaaaatgagaagaagaagcgtgaaatggcagagaaggagaaagagaagattgaacgggagaaggaggagctgatggagaggctgaagcagatcgaggaacagactaagaaggctcagcaagaactggaagaacagacccgtagggctctggaacttgagcaggaacggaagcgtgcccagagcgaggctgaaaagctggccaaggagcgtcaagaagctgaagaggccaaggaggccttgctgcaggcctcccgggaccagaaaaagactcaggaacagctggccttggaaatggcagagctgacagctcgaatctcccagctggagatggcccgacagaagaaggagagtgaggctgtggagtggcagcagaaggcccagatggtacaggaagacttggagaagacccgtgctgagctgaagactgccatgagtacacctcatgtggcagagcctgctgagaatgagcaggatgagcaggatgagaatggggcagaggctagtgctgacctacgggctgatgctatggccaaggaccgcagtgaggaggaacgtaccactgaggcagagaagaatgagcgtgtgcagaagcacctgaaggccctcacttcggagctggccaatgccagagatgagtccaagaagactgccaatgacatgatccatgctgagaacatgcgactgggccgagacaaatacaagaccctgcgccagatccggcagggcaacaccaagcagcgcattgacgaatttgagtctatgtaatgggcacccagcctctagggacccctcctccctttttccttgtccccacactcctacacctaactcacctaactcatactgtgctggagccactaactagagcagccctggagtcatgccaagcatttaatgtagccatgggaccaaacctagccccttagcccccacccacttccctgggcaaatgaatggctcactatggtgccaatggaacctcctttctcttctctgttccattgaatctgtatggctagaatatcctacttctccagcctagaggtactttccacttgattttgcaaatgcccttacacttactgttgtcctatgggagtcaagtgtggagtaggttggaagctagctcccctcctctcccctaccactgtcttcttcagggtcctgagatttacacggttggagtgttatgcggtctagggaatgagacaggacctaggatatcttctccaggatgtcaactgacctaaaatttgccctcccatcccgtttagagttatttaggctttgtaacgattgggggataaaaagatgttcagtcatttttgtttctacctcccagatcggatctgttgcaaactcagcctcaataagccttgtcgttgactttagggactcaatttctccccagggtggatgggggaaatggtgccttcaagaccttcaccaaacatactagaagggcattggccattctattgtggcaaggctgagtagaagatcctaccccaattccttgtaggagtataggccggtctaaagtgagctctatgggcagatctaccccttacttattattccagatctgcagtcacttcgtgggatctgcccctccctgcttcaatacccaaatcctctccagctataacagtagggatgagtacccaaaagctcagccagccccatcaggactcttgtgaaaagagaggatatgttcacacctagcgtcagtattttccctgctaggggttttaggtctcttcccctctcagagctacttgggccatagctcctgctccacagccatcccagccttggcatctagagcttgatgccagtaggctcaactagggagtgagtgcaaaaagctgagtatggtgagagaagcctgtgccctgatccaagtttactcaaccctctcaggtgaccaaaatccccttctcatcactcccctccaaagaggtgactgggccctgcctctgtttgacaaacctctaacccaggtcttgacaccagctgttctgtcccttggagctgtaaaccagagagctgctggggattctggcctagtcacagccgnntcctcacgtaaagctaccaccacagaagcagtcatcac

SEQ ID NO: 310755 - DNA, 3421 bp, Homo sapiens
gggcggctctttcctgggtggggtttgtgaagtcgtggcccgttagcaggaagcctaacagtcgccccgacgctagtgagggacccaatctgagtccccggccagccgaatccaagccgtgtgtactgcgtgctcagcactgcccgacagtcctagctaaacttcgccaactccgctgcctttgccgccaccatgcccaaaacgatcagtgtgcgtgtgaccaccatggatgcagagctggagtttgccatccagcccaacaccaccgggaagcagctatttgaccaggtggtgaaaactattggcttgagggaagtttggttctttggtctgcagtaccaggacactaaaggtttctccacctggctgaaactcaataagaaggtgactgcccaggatgtgcggaaggaaagccccctgctctttaagttccgtgccaagttctaccctgaggatgtgtccgaggaattgattcaggacatcactcagcgcctgttctttctgcaagtgaaagagggcattctcaatgatgatatttactgcccgcctgagaccgctgtgctgctggcctcgtatgctgtccagtctaagtatggcgacttcaataaggaagtgcataagtctggctacctggccggagacaagttgctcccgcagagagtcctggaacagcacaaactcaacaaggaccagtgggaggagcggatccaggtgtggcatgaggaacaccgtggcatgctcagggaggatgctgtcctggaatatctgaagattgctcaagatctggagatgtatggtgtgaactacttcagcatcaagaacaagaaaggctcagagctgtggctgggggtggatgccctgggtctcaacatctatgagcagaatgacagactaactcccaagataggcttcccctggagtgaaatcaggaacatctctttcaatgataagaaatttgtcatcaagcccattgacaaaaaagccccggacttcgtcttctatgctccccggctgcggattaacaagcggatcttggccttgtgcatggggaaccatgaactatacatgcgccgtcgcaagcctgataccattgaggtgcagcagatgaaggcacaggcccgggaggagaagcaccagaagcagatggagcgtgctatgctggaaaatgagaagaagaagcgtgaaatggcagagaaggagaaagagaagattgaacgggagaaggaggagctgatggagaggctgaagcagatcgaggaacagactaagaaggctcagcaagaactggaagaacagacccgtagggctctggaacttgagcaggaacggaagcgtgcccagagcgaggctgaaaagctggccaaggagcgtcaagaagctgaagaggccaaggaggccttgctgcaggcctcccgggaccagaaaaagactcaggaacagctggccttggaaatggcagagctgacagctcgaatctcccagctggagatggcccgacagaagaaggagagtgaggctgtggagtggcagcagaaggcccagatggtacaggaagacttggagaagacccgtgctgagctgaagactgccatgagtacacctcatgtggcagagcctgctgagaatgagcaggatgagcaggatgagaatggggcagaggctagtgctgacctacgggctgatgctatggccaaggaccgcagtgaggaggaacgtaccactgaggcagagaagaatgagcgtgtgcagaagcacctgaaggccctcacttcggagctggccaatgccagagatgagtccaagaagactgccaatgacatgatccatgctgagaacatgcgactgggccgagacaaatacaagaccctgcgccagatccggcagggcaacaccaagcagcgcattgacgaatttgagtctatgtaatgggcacccagcctctagggacccctcctccctttttccttgtccccacactcctacacctaactcacctaactcatactgtgctggagccactaactagagcagccctggagtcatgccaagcatttaatgtagccatgggaccaaacctagccccttagcccccacccacttccctgggcaaatgaatggctcactatggtgccaatggaacctcctttctcttctctgttccattgaatctgtatggctagaatatcctacttctccagcctagaggtactttccacttgattttgcaaatgcccttacacttactgttgtcctatgggagtcaagtgtggagtaggttggaagctagctcccctcctctcccctaccactgtcttcttcagggtcctgagatttacacggttggagtgttatgcggtctagggaatgagacaggacctaggatatcttctccaggatgtcaactgacctaaaatttgccctcccatcccgtttagagttatttaggctttgtaacgattgggggataaaaagatgttcagtcatttttgtttctacctcccagatcggatctgttgcaaactcagcctcaataagccttgtcgttgactttagggactcaatttctccccagggtggatgggggaaatggtgccttcaagaccttcaccaaacatactagaagggcattggccattctattgtggcaaggctgagtagaagatcctaccccaattccttgtaggagtataggccggtctaaagtgagctctatgggcagatctaccccttacttattattccagatctgcagtcacttcgtgggatctgcccctccctgcttcaatacccaaatcctctccagctataacagtagggatgagtacccaaaagctcagccagccccatcaggactcttgtgaaaagagaggatatgttcacacctagcgtcagtattttccctgctaggggttttaggtctcttcccctctcagagctacttgggccatagctcctgctccacagccatcccagccttggcatctagagcttgatgccagtaggctcaactagggagtgagtgcaaaaagctgagtatggtgagagaagcctgtgccctgatccaagtttactcaaccctctcaggtgaccaaaatccccttctcatcactcccctccaaagaggtgactgggccctgcctcactctgtgcctgaccttgaggagtcttgtgtgcattgctgtgaattagctcacttggtgatatgtcctatattggctaaattgaaacctggaattgtggggcaatctattaatagctgccttaaagtcagtaacttacccttagggaggctgggggaaaaggttagattttgtattcaggggttttttgtgtactttttgggttttttaaaaattgtttttggaggggtttatgctcaatccatgttctatttcagtgccaataaaatttaggaagactt

SEQ ID NO: 310756 - DNA, 3337 bp, Homo sapiens
gggcggctctttcctgggtggggtttgtgaagtcgtggcccgttagcaggaagcctaacagtcgccccgacgctagtgagggacccaatctgagtccccggccagccgaatccaagccgtgtgtactgcgtgctcagcactgcccgacagtcctagctaaacttcgccaactccgctgcctttgccgccaccatgcccaaaacgatcagtgtgcgtgtgaccaccatggatgcagagctggagtttgccatccagcccaacaccaccgggaagcagctatttgaccaggtggtgaaaactattggcttgagggaagtttggttctttggtctgcagtaccaggacactaaaggtttctccacctggctgaaactcaataagaaggtgactgcccaggatgtgcggaaggaaagccccctgctctttaagttccgtgccaagttctaccctgaggatgtgtccgaggaattgattcaggacatcactcagcgcctgttctttctgcaagtgaaagagggcattctcaatgatgatatttactgcccgcctgagaccgctgtgctgctggcctcgtatgctgtccagtctaagtatggcgacttcaataaggaagtgcataagtctggctacctggccggagacaagttgctcccgcagagagtcctggaacagcacaaactcaacaaggaccagtgggaggagcggatccaggtgtggcatgaggaacaccgtggcatgctcagggaggatgctgtcctggaatatctgaagattgctcaagatctggagatgtatggtgtgaactacttcagcatcaagaacaagaaaggctcagagctgtggctgggggtggatgccctgggtctcaacatctatgagcagaatgacagactaactcccaagataggcttcccctggagtgaaatcaggaacatctctttcaatgataagaaatttgtcatcaagcccattgacaaaaaagccccggacttcgtcttctatgctccccggctgcggattaacaagcggatcttggccttgtgcatggggaaccatgaactatacatgcgccgtcgcaagcctgataccattgaggtgcagcagatgaaggcacaggcccgggaggagaagcaccagaagcagatggagcgtgctatgctggaaaatgagaagaagaagcgtgaaatggcagagaaggagaaagagaagattgaacgggagaaggaggagctgatggagaggctgaagcagatcgaggaacagactaagaaggctcagcaagaactggaagaacagacccgtagggctctggaacttgagcaggaacggaagcgtgcccagagcgaggctgaaaagctggccaaggagcgtcaagaagctgaagaggccaaggaggccttgctgcaggcctcccgggaccagaaaaagactcaggaacagctggccttggaaatggcagagctgacagctcgaatctcccagctggagatggcccgacagaagaaggagagtgaggctgtggagtggcagcagaaggcccagatggtacaggaagacttggagaagacccgtgctgagctgaagactgccatgagtacacctcatgtggcagagcctgctgagaatgagcaggatgagcaggatgagaatggggcagaggctagtgctgacctacgggctgatgctatggccaaggaccgcagtgaggaggaacgtaccactgaggcagagaagaatgagcgtgtgcagaagcacctgaaggccctcacttcggagctggccaatgccagagatgagtccaagaagactgccaatgacatgatccatgctgagaacatgcgactgggccgagacaaatacaagaccctgcgccagatccggcagggcaacaccaagcagcgcattgacgaatttgagtctatgtaatgggcacccagcctctagggacccctcctccctttttccttgtccccacactcctacacctaactcacctaactcatactgtgctggagccactaactagagcagccctggagtcatgccaagcatttaatgtagccatgggaccaaacctagccccttagcccccacccacttccctgggcaaatgaatggctcactatggtgccaatggaacctcctttctcttctctgttccattgaatctgtatggctagaatatcctacttctccagcctagaggtactttccacttgattttgcaaatgcccttacacttactgttgtcctatgggagtcaagtgtggagtaggttggaagctagctcccctcctctcccctaccactgtcttcttcagggtcctgagatttacacggttggagtgttatgcggtctagggaatgagacaggacctaggatatcttctccaggatgtcaactgacctaaaatttgccctcccatcccgtttagagttatttaggctttgtaacgattgggggataaaaagatgttcagtcatttttgtttctacctcccagatcggatctgttgcaaactcagcctcaataagccttgtcgttgactttagggactcaatttctccccagggtggatgggggaaatggtgccttcaagaccttcaccaaacatactagaagggcattggccattctattgtggcaaggctgagtagaagatcctaccccaattccttgtaggagtataggccggtctaaagtgagctctatgggcagatctaccccttacttattattccagatctgcagtcacttcgtgggatctgcccctccctgcttcaatacccaaatcctctccagctataacagtagggatgagtacccaaaagctcagccagccccatcaggactcttgtgaaaagagaggatatgttcacacctagcgtcagtattttccctgctaggggttttaggtctcttcccctctcagagctacttgggccatagctcctgctccacagccatcccagccttggcatctagagcttgatgccagtaggctcaactagggagtgagtgcaaaaagctgagtatggtgagagaagcctgtgccctgatccaagtttactcaaccctctcaggtgaccaaaatccccttctcatcactcccctccaaagaggtgactgggccctgcctctgtttgacaaacctctaacagttgacagtgtctgtctggagttgtacagaaagtgtgggattgcaactcaaccacctgttacagagtactctctgcagggctctcagatggcacggtaaggttggcgtaggtaatatggggtggctcacccaggattagtcaaaggtggggacaattcgcgcccacctttgtgggg

SEQ ID NO: 310757 - DNA, 2433 bp, Homo sapiens
gggcggctctttcctgggtggggtttgtgaagtcgtggcccgttagcaggaagcctaacagtcgccccgacgctagtgagggacccaatctgagtccccggccagccgaatccaagccgtgtgtactgcgtgctcagcactgcccgacagtcctagctaaacttcgccaactccgctgcctttgccgccaccatgcccaaaacgatcagtgtgcgtgtgaccaccatggatgcagagctggagtttgccatccagcccaacaccaccgggaagcagctatttgaccaggtggtgaaaactattggcttgagggaagtttggttctttggtctgcagtaccaggacactaaaggtttctccacctggctgaaactcaataagaaggtgactgcccaggatgtgcggaaggaaagccccctgctctttaagttccgtgccaagttctaccctgaggatgtgtccgaggaattgattcaggacatcactcagcgcctgttctttctgcaagtgaaagagggcattctcaatgatgatatttactgcccgcctgagaccgctgtgctgctggcctcgtatgctgtccagtctaagtatggcgacttcaataaggaagtgcataagtctggctacctggccggagacaagttgctcccgcagagagtcctggaacagcacaaactcaacaaggaccagtgggaggagcggatccaggtgtggcatgaggaacaccgtggcatgctcagggaggatgctgtcctggaatatctgaagattgctcaagatctggagatgtatggtgtgaactacttcagcatcaagaacaagaaaggctcagagctgtggctgggggtggatgccctgggtctcaacatctatgagcagaatgacagactaactcccaagataggcttcccctggagtgaaatcaggaacatctctttcaatgataagaaatttgtcatcaagcccattgacaaaaaagccccggacttcgtcttctatgctccccggctgcggattaacaagcggatcttggccttgtgcatggggaaccatgaactatacatgcgccgtcgcaagcctgataccattgaggtgcagcagatgaaggcacaggcccgggaggagaagcaccagaagcagatggagcgtgctatgctggaaaatgagaagaagaagcgtgaaatggcagagaaggagaaagagaagattgaacgggagaaggaggagctgatggagaggctgaagcagatcgaggaacagactaagaaggctcagcaagaactggaagaacagacccgtagggctctggaacttgagcaggaacggaagcgtgcccagagcgaggctgaaaagctggccaaggagcgtcaagaagctgaagaggccaaggaggccttgctgcaggcctcccgggaccagaaaaagactcaggaacagctggccttggaaatggcagagctgacagctcgaatctcccagctggagatggcccgacagaagaaggagagtgaggctgtggagtggcagcagaaggcccagatggtacaggaagacttggagaagacccgtgctgagctgaagactgccatgagtacacctcatgtggcagagcctgctgagaatgagcaggatgagcaggatgagaatggggcagaggctagtgctgacctacgggctgatgctatggccaaggaccgcagtgaggaggaacgtaccactgaggcagagaagaatgagcgtgtgcagaagcacctgaaggccctcacttcggagctggccaatgccagagatgagtccaagaagactgccaatgacatgatccatgctgagaacatgcgactgggccgagacaaatacaagaccctgcgccagatccggcagggcaacaccaagcagcgcattgacgaatttgagtctatgtaatgggcacccagcctctagggacccctcctccctttttccttgtccccacactcctacacctaactcacctaactcatactgtgctggagccactaactagagcagccctggagtcatgccaagcatttaatgtagccatgggaccaaacctagccccttagcccccacccacttccctgggcaaatgaatggctcactatggtgccaatggaacctcctttctcttctctgttccattgaatctgtatggctagaatatcctacttctccagcctagaggtactttccacttgattttgcaaatgcccttacacttactgttgtcctatgggagtcaagtgtggagtaggttggaagctagctcccctcctctcccctacccacaccacctgagtccctgaatgggttgtcaattgactgaaaagtaaattcccagtgagtttgaacctccacggtttttgagacagtattaaaagcttgagaacggagattatggatggcgcgggt

SEQ ID NO: 310758 - DNA, 2304 bp, Homo sapiens
gggcggctctttcctgggtggggtttgtgaagtcgtggcccgttagcaggaagcctaacagtcgccccgacgctagtgagggacccaatctgagtccccggccagccgaatccaagccgtgtgtactgcgtgctcagcactgcccgacagtcctagctaaacttcgccaactccgctgcctttgccgccaccatgcccaaaacgatcagtgtgcgtgtgaccaccatggatgcagagctggagtttgccatccagcccaacaccaccgggaagcagctatttgaccaggtggtgaaaactattggcttgagggaagtttggttctttggtctgcagtaccaggacactaaaggtttctccacctggctgaaactcaataagaaggtgactgcccaggatgtgcggaaggaaagccccctgctctttaagttccgtgccaagttctaccctgaggatgtgtccgaggaattgattcaggacatcactcagcgcctgttctttctgcaagtgaaagagggcattctcaatgatgatatttactgcccgcctgagaccgctgtgctgctggcctcgtatgctgtccagtctaagtatggcgacttcaataaggaagtgcataagtctggctacctggccggagacaagttgctcccgcagagagtcctggaacagcacaaactcaacaaggaccagtgggaggagcggatccaggtgtggcatgaggaacaccgtggcatgctcagggaggatgctgtcctggaatatctgaagattgctcaagatctggagatgtatggtgtgaactacttcagcatcaagaacaagaaaggctcagagctgtggctgggggtggatgccctgggtctcaacatctatgagcagaatgacagactaactcccaagataggcttcccctggagtgaaatcaggaacatctctttcaatgataagaaatttgtcatcaagcccattgacaaaaaagccccggacttcgtcttctatgctccccggctgcggattaacaagcggatcttggccttgtgcatggggaaccatgaactatacatgcgccgtcgcaagcctgataccattgaggtgcagcagatgaaggcacaggcccgggaggagaagcaccagaagcagatggagcgtgctatgctggaaaatgagaagaagaagcgtgaaatggcagagaaggagaaagagaagattgaacgggagaaggaggagctgatggagaggctgaagcagatcgaggaacagactaagaaggctcagcaagaactggaagaacagacccgtagggctctggaacttgagcaggaacggaagcgtgcccagagcgaggctgaaaagctggccaaggagcgtcaagaagctgaagaggccaaggaggccttgctgcaggcctcccgggaccagaaaaagactcaggaacagctggccttggaaatggcagagctgacagctcgaatctcccagctggagatggcccgacagaagaaggagagtgaggctgtggagtggcagcagaaggcccagatggtacaggaagacttggagaagacccgtgctgagctgaagactgccatgagtacacctcatgtggcagagcctgctgagaatgagcaggatgagcaggatgagaatggggcagaggctagtgctgacctacgggctgatgctatggccaaggaccgcagtgaggaggaacgtaccactgaggcagagaagaatgagcgtgtgcagaagcacctgaaggccctcacttcggagctggccaatgccagagatgagtccaagaagactgccaatgacatgatccatgctgagaacatgcgactgggccgagacaaatacaagaccctgcgccagatccggcagggcaacaccaagcagcgcattgacgaatttgagtctatgtaatgggcacccagcctctagggacccctcctccctttttccttgtccccacctctctccactcccgggagtggagagagaaggttagatgaggaggagcttggggaggcttaggggttggatttggagtcaggaatggggacaagattggggatggggacatgggtgaagttggcttcgggagtggaggactagggttgggaaatggctaggtgaggggtggatggtgagagataggcttggaggataaactggagttaagggttgagtcagggggatgatgggtggtgggcttggatggggacagtgtggggtgtgggacctggacaaacaggacgagttctgtagtcctggctggggactccatcttctgatcaatgc

SEQ ID NO: 310759 - DNA, 1775 bp, Homo sapiens
gggcggctctttcctgggtggggtttgtgaagtcgtggcccgttagcaggaagcctaacagtcgccccgacgctagtgagggacccaatctgagtccccggccagccgaatccaagccgtgtgtactgcgtgctcagcactgcccgacagtcctagctaaacttcgccaactccgctgcctttgccgccaccatgcccaaaacgatcagtgtgcgtgtgaccaccatggatgcagagctggagtttgccatccagcccaacaccaccgggaagcagctatttgaccaggtggtgaaaactattggcttgagggaagtttggttctttggtctgcagtaccaggacactaaaggtttctccacctggctgaaactcaataagaaggtgactgcccaggatgtgcggaaggaaagccccctgctctttaagttccgtgccaagttctaccctgaggatgtgtccgaggaattgattcaggacatcactcagcgcctgttctttctgcaagtgaaagagggcattctcaatgatgatatttactgcccgcctgagaccgctgtgctgctggcctcgtatgctgtccagtctaagtatggcgacttcaataaggaagtgcataagtctggctacctggccggagacaagttgctcccgcagagagtcctggaacagcacaaactcaacaaggaccagtgggaggagcggatccaggtgtggcatgaggaacaccgtggcatgctcagggaggatgctgtcctggaatatctgaagattgctcaagatctggagatgtatggtgtgaactacttcagcatcaagaacaagaaaggctcagagctgtggctgggggtggatgccctgggtctcaacatctatgagcagaatgacagactaactcccaagataggcttcccctggagtgaaatcaggaacatctctttcaatgataagaaatttgtcatcaagcccattgacaaaaaagccccggacttcgtcttctatgctccccggctgcggattaacaagcggatcttggccttgtgcatggggaaccatgaactatacatgcgccgtcgcaagcctgataccattgaggtgcagcagatgaaggcacaggcccgggaggagaagcaccagaagcagatggagcgtgctatgctggaaaatgagaagaagaagcgtgaaatggcagagaaggagaaagagaagattgaacgggagaaggaggagctgatggagaggctgaagcagatcgaggaacagactaagaaggctcagcaagaactggaagaacagacccgtagggctctggaacttgagcaggaacggaagcgtgcccagagcgaggctgaaaagctggccaaggagcgtcaagaagctgaagaggccaaggaggccttgctgcaggcctcccgggaccagaaaaagactcaggaacagctggccttggaaatggcagagctgacagctcgaatctcccagctggagatggcccgacagaagaaggagagtgaggctgtggagtggcagcagaagcaggagctgcaagccatgcagatggagctgcagagccctgagtacaagctgagcaagctccgcacctcgaccatcatgaccgactacaaccccaactactgctttgctggcaagacctcctccatcagtgacctgaaggaggtgccgcggaaaaacatcaccctcattcggggtctgggccatggcgcctttggggaggtgtatgaaggccaggtgtccggaatgcccaacgacccaag

SEQ ID NO: 310760 - DNA, 1932 bp, Homo sapiens
gggcggctctttcctgggtggggtttgtgaagtcgtggcccgttagcaggaagcctaacagtcgccccgacgctagtgagggacccaatctgagtccccggccagccgaatccaagccgtgtgtactgcgtgctcagcactgcccgacagtcctagctaaacttcgccaactccgctgcctttgccgccaccatgcccaaaacgatcagtgtgcgtgtgaccaccatggatgcagagctggagtttgccatccagcccaacaccaccgggaagcagctatttgaccaggtggtgaaaactattggcttgagggaagtttggttctttggtctgcagtaccaggacactaaaggtttctccacctggctgaaactcaataagaaggtgactgcccaggatgtgcggaaggaaagccccctgctctttaagttccgtgccaagttctaccctgaggatgtgtccgaggaattgattcaggacatcactcagcgcctgttctttctgcaagtgaaagagggcattctcaatgatgatatttactgcccgcctgagaccgctgtgctgctggcctcgtatgctgtccagtctaagtatggcgacttcaataaggaagtgcataagtctggctacctggccggagacaagttgctcccgcagagagtcctggaacagcacaaactcaacaaggaccagtgggaggagcggatccaggtgtggcatgaggaacaccgtggcatgctcagggaggatgctgtcctggaatatctgaagattgctcaagatctggagatgtatggtgtgaactacttcagcatcaagaacaagaaaggctcagagctgtggctgggggtggatgccctgggtctcaacatctatgagcagaatgacagactaactcccaagataggcttcccctggagtgaaatcaggaacatctctttcaatgataagaaatttgtcatcaagcccattgacaaaaaagccccggacttcgtcttctatgctccccggctgcggattaacaagcggatcttggccttgtgcatggggaaccatgaactatacatgcgccgtcgcaagcctgataccattgaggtgcagcagatgaaggcacaggcccgggaggagaagcaccagaagcagatggagcgtgctatgctggaaaactgacgaacgacagacacgcgtgacacactggccgacgacacggacgacacacgacgacacgacttgacaccgggacgacacggacggacgctgactggacgacggctgacacgccgactcgacggacacacgacctaacgcaagcggctacacgaacaacgaacctggacacgaacgacagacacccgatacgggactctggacacctatgacgcacggacaccggacacgcgtgcccacgagacgacggctgacacacagcctgggccccaaagagaggacgtcaacgaacagctggaagacgggccaaaggagtggcctttgacgtggacagggccctccgcgaggacccaaggacacaaaagaacatcacaggaaccacgcatgggcactatgagaacaatgcgcaaggaaggctgacacgcctcgaagtcctcccccacgcttgggacagcatagggccccaggaacagcacaggcaagggacgacagtagacgggcttgtggagagatgggcacagccagcaagggccccaacatgggtaccagggacaggacgttgggacgaaagaaccccagttggatcggacgcttagaacaggacctaggcgccatgaggacacacccattccatagttgggcacacggcctgggtagaagcacaatggcacgccaaggctggacccaaagggattagcgcaactggaggacagagggaaacatgccagaacataaagagggcaggccggcttcatgcgccacaga

SEQ ID NO: 310761 - DNA, 414 bp, Homo sapiens
gaaggtgttccccttgttgtttttgatcatccattcttgtagctctcttacctttcaggcaattccttgtgtctagtttaacaccttcttgctataatttcggtctgcttccagtgtgacctcaattggctgactctacatcctctttgcatcagccccttagaaagctaaatgggcttcccttctctcctgcacagggactttgtgctttaaactactcatcacccattgtctttccagagtcctggaacagcacaaactcaacaaggaccagtgggaggagcggatccaggtgtggcatgaggaacaccgtggcatgctcaggtaagcttgcccaagcagtggtgggccccacttcccttacagggtgaatgagaatgcgttctagggagaagagactgatgacaagggaca

SEQ ID NO: 310762 - DNA, 876 bp, Homo sapiens
ttttgtaaaggtttgtccagacttctagcctggcccacagtagactgacctgacttttgcttttcagttttgaaagtcctagcgtttttccccctaactccgtttttgttgatttgttgaaaaggtttgtccagaggggttgcgtttatccggtttgacaaacggtcggaggcagaagaggcaattaccagtttcaatggtcataaacccccaggttcctctgagcccatcacagtgaagtttgcagccaaccccaaccagaacaaaaacgtggcactcctctcgcagctgtaccactcgccagcgcgacggttcggaggccccgttcaccaccaggcgcagagattcaggtgggtcgggagggtgtgcgctcctgaaagccatacttagccccgctggcaggcgacggcacagccacagaatagaaaccacggggatgatagactgatcccgtcagagagcgcgtttcagaatcattctgcagctccacaccacaacctccatcagaaaggtgtctgtaggaaagccgtttacttccgatggggcgttgtctttcatgggaatcaaaacagtgactccaggctggacacagtgacttatccctgtaatcctagcaccttgggtggctgagagaggaagatcgattgagcccaggagttcaagaccaacctgggcaatattgcgagaccccatctctacaaaaaatacaaagctggccaggcatggcggtgcgctcctgtagttgcagcaactcaggaagctgaggtgggaggattgcttgagcccaggaggttgaggctgcagtgagttgtgatcataccactgcactccagcctgggccacagggccagaacctgtctttttttgattttatta

SEQ ID NO: 310763 - DNA, 2881 bp, Homo sapiens
  misc_feature (650)..(650): n is a, c, g, or t
  misc_feature (1113)..(1113): n is a, c, g, or t
  misc_feature (1245)..(1245): n is a, c, g, or t
cacgttttgaggtcccaaggggttaggacttcggcatatgaatttggattgtggggtggggggaacacgattgaacccctcactggatgaattcttgagaatgggcagccagaaaaagacctgattgaggccaaagagcaagcgatgttgggagcttaggaaagagggttctggtcgaggggccggggagccccaggtcagtgcacgcctgctgtgcgccagctgttctgattctagcctgactgaacatgacagtgtccagagagaagaggaaagcagagttcccatggtccttggagacacctgtccttgggaggcatcagagctttccccagcatttggctctagggcacttctcctctggggcttcatccagggacggcagtaggtccagtcagtgccagcctcagctccgctccactggcgccagggtcatggtttggcaggcccccaaatactgccccagtccagacaggtctgcagggagccagggcaagcccggacactaggggaggctgggggccaaggcagcctctttttctctggggacagcactggcagcccctgacccacatcatggggtgagcaagtgtccccagagctcctgtccacaggctgatggaggtgccccgggcctgggagcagcacgncttccccagagacctcatgggctccgtagtgacatgctccctcgattcccaccgctaccaggcagagctggcctccagccccacactcctctcctcgtggggctgtcctgttcccctgctgggccgcccactgccctatgagcaggggcaatgtctgttgttccttctctggaacatgataggagcttctcagaggatgctgtgtgtgtgttctcagcacgcagattctgcccagtgactcctgagtggcggcttctccctgcgttctggtctcagttaccttggctcatcagttctgtgcccctcactcaaagggaatgaacttcctttcgcacaggttcaagtccccacccttctcgggaacacatctcctgctccctcctccatatcccagcctcctgacgaggctgtgagtcctgccaggctgccccttcacaggcagaggggttccactgtggtcctnttcttccttctgggcccatggggtctgcacggccgtcagcgccaacctgagaaagcaccgaagaccttgtcttgcattggcctccgggctcccctcaccaccctctccacacgaatgatgaatgtaccattntgtcaaagcacccagaaggttctcttcagttttctttgattttgcaaaatataaatccaaaaggcattgagtcgtttaatattgaacacttgagtggatttgagtacaaactcggggtcctcccagaactcacagcccctgtcagggcttctgtggcgagcttgctctttggcaggggagtctcctgtgttcccagtagctcccagcttgcttgcccgctgcagcacgggctgctttcaggcaccaggacctctctggcaccggctcactgtccagcacatcagagaggtagccacacacaagctgcgggccctcagttgctgggctttgtgacataggagtcacgcctgcctccttgaggatggtgagcacccagtgaggaagcactgccaggcatcctggctcacggcccatccctcagtgagcttgccaccatgcggctgcaggcggtgagcgtcagtgatgataatcgttccctgcatgatttctaacacacagtgttggcttttcctaacccagcattcaacaccctcctcaatgctttggccacgtgcctgtactaatctcggaaagtggttgtgttcccaaggtgtcgtatgctcgcccgagctcagaggtgatcaaagacgccaacttgtacatcagcgggctcccgcggaccatgacccagaaggacgtagaagacatgttctctcggtttgggcggatcatcaactcgcgggtcctcgtggatcagactacaggtaccagaggggccccagacgcgtggggagggtgttctctaggtgggggctgggttttctagggaaggcagatcaccgtttgattttaaatgtcattagttattccgcaaacgaggacagcaccaaaatgagaagacgttggctttggtttgaggaggctgaggaggtaagatggcattaaaagaagctggggatatctgggcgtggtggctcacgcctgtaatcccagcactttgggaggccaaggtgggtggatcacgaggtcaggagatggagaccagcctgaccaacatggtgaaaccctgtctctactaaaaatacaaaaaattagctgggcatggtggcgggcgcctgtagtcccagctactcgggaggctgagacaggagaatggcatgaacccgggaagcggaggttgcagtgagccgaggtcttgccactgcactccagcgtgggtgacagagcgagactccgtcttaaaaaaaaaaaaaaaaaaagctggggattaggccagcatttcatgtacagtgaaaacgccaagagattctagcaccttccctcaggcacccaaatgtgctggccttgcccatgaatggggtgaaaaggacactgcaggccgggtgtggtggctcacgcctgtaatcccagcactttgggaggccgaggtggacggatcacctgaggtcaggagtttgagaccagcctggccaacatggtgaagccccatctctactaaaaatacaaaaattagccaggtgtggtggcaggcgcctgtaatcccagctactcgggaggctgaggcaggagaatcgcctggaccccaggaggcggagattgcagcaagccgagattgcgccactgaactccagcctgggcagcagagcgggatttcatc

SEQ ID NO: 310764 - DNA, 2362 bp, Homo sapiens
agcgggtcgtgcgcgctgaggaggagccgctgccgccgtcgccgtcgccgccaccgccgccaccgctaccgaggccgagcggagccgttagcgccgcgccgccgccgcctcccgcccgccccggagcagccccgggcccgcccgcccgcatccagatttttgaaaaatacaatgtctaatggttatgaagaccacatggccgaagactgcaggggtgacatcgggagaacgaatttgatcgtcaactacctccctcagaacatgacccaggatgagttacgaagcctgttcagcagcattggtgaagttgaatctgcaaaacttattcgggataaagtagcaggacacagcttgggctatggctttgtgaactacgtgaccgcgaaggatgcagagagagcgatcaacacgctgaacggcttgaggctccagtcaaaaaccattaaggtgtcgtatgctcgcccgagctcagaggtgatcaaagacgccaacttgtacatcagcgggctcccgcggaccatgacccagaaggacgtagaagacatgttctctcggtttgggcggatcatcaactcgcgggtcctcgtggatcagactacaggtttgtccagaggggttgcgtttatccggtttgacaaacggtcggaggcagaagaggcaattaccagtttcaatggtcataaacccccaggttcctctgagcccatcacagtgaagtttgcagccaaccccaaccagaacaaaaacgtggcactcctctcgcagctgtaccactcgccagcgcgacggttcggaggccccgttcaccaccaggcgcagagattcaggttctcccccatgggcgtcgatcacatgagcgggctctctggcgtcaacgtgccaggaaacgcctcctccggctggtgcattttcatctacaacctggggcaggatgccgacgaggggatcctctggcagatgtttgggccgtttggtgccgtcaccaatgtgaaagtgatccgcgacttcaacaccaacaagtgcaaagggtttggctttgtgaccatgacaaactatgaagaagccgcgatggccatagccagcctgaacggctaccgcctgggggacaaaatcttacaggtttccttcaaaaccaacaagtcccacaaataactcgctcatgcttttttttgtacggaatagataattaagagtgaaggagttgaaacttttcttgttagtgtacaactcattttgcgccaattttcacaagtgtttgtctttgtctgaatgagaagtgagaaggtttttatactctgggatgcaaccgacatgttcaaatgtttgaaatcccacaatgttagaccaatcttaagtttcgtaagttatttcctttaagatatatattaaacagaaatctaagtagaactgcattgactaaccagtccctctggatggtggtgaacctgaagcatgctttaacctctaagactgtctaacacgcgtttcattcaatgtctccacagactgggtagcaaaaaaatcaccttttagttttagtttttaatctaaagatgttagacagatgctgagtgtgcgttttctcaaccgcttcaacattgtaagcgatgtatgctttggttgacaggaagttccttttccaggcaggtcccgttgccacctcctgctcactcagtcccgggctctgccgagtggtcctgggaatggcggcgggcccgtccagcgtgggccaccactggggccgggggccacgggctgcatgctgggcgggccctccagagaaggacacaaacgtgtttcgtaagcccaggcaccaatgggaatggaccaaagagtttcagggaaactccagtatattccagagtcagatctaagctccaggcacgcctgaagatgtgttgctactctgacatcccgagtttctgtccacacattgcatgcacagcgccccacacattggatactgttgttcacgataatttctcccgttttccagagcatttaacatagcttggaggcgtaaaatggctctgtattttaataacacagaaacatttgagcattgtatttctcgcatcccttctcgtgagcgcttagacctttttctattttagtcggattttgttttggaattttgcttttgtatgaacactcagcagaaaagtacttacttcttgccagttatctattaaccaaaacctttgatttgtagttttaaagattaaccctcaaagttctcttcataactgccttgacattttgggttgttctgttctgttaattttcttttgcttttttgtgttttttgtttgtttttacttttgcatttaagaccattaaatttgattttgttttgctcgaa

SEQ ID NO: 310765 - DNA, 6060 bp, Homo sapiens
agcgggtcgtgcgcgctgaggaggagccgctgccgccgtcgccgtcgccgccaccgccgccaccgctaccgaggccgagcggagccgttagcgccgcgccgccgccgcctcccgcccgccccggagcagccccgggcccgcccgcccgcatccagatttttgaaaaatacaatgtctaatggttatgaagaccacatggccgaagactgcaggggtgacatcgggagaacgaatttgatcgtcaactacctccctcagaacatgacccaggatgagttacgaagcctgttcagcagcattggtgaagttgaatctgcaaaacttattcgggataaagtagcaggacacagcttgggctatggctttgtgaactacgtgaccgcgaaggatgcagagagagcgatcaacacgctgaacggcttgaggctccagtcaaaaaccattaaggtgtcgtatgctcgcccgagctcagaggtgatcaaagacgccaacttgtacatcagcgggctcccgcggaccatgacccagaaggacgtagaagacatgttctctcggtttgggcggatcatcaactcgcgggtcctcgtggatcagactacaggtttgtccagaggggttgcgtttatccggtttgacaaacggtcggaggcagaagaggcaattaccagtttcaatggtcataaacccccaggttcctctgagcccatcacagtgaagtttgcagccaaccccaaccagaacaaaaacgtggcactcctctcgcagctgtaccactcgccagcgcgacggttcggaggccccgttcaccaccaggcgcagagattcaggttctcccccatgggcgtcgatcacatgagcgggctctctggcgtcaacgtgccaggaaacgcctcctccggctggtgcattttcatctacaacctggggcaggatgccgacgaggggatcctctggcagatgtttgggccgtttggtgccgtcaccaatgtgaaagtgatccgcgacttcaacaccaacaagtgcaaagggtttggctttgtgaccatgacaaactatgaagaagccgcgatggccatagccagcctgaacggctaccgcctgggggacaaaatcttacaggtttccttcaaaaccaacaagtcccacaaataactcgctcatgcttttttttgtacggaatagataattaagagtgaaggagttgaaacttttcttgttagtgtacaactcattttgcgccaattttcacaagtgtttgtctttgtctgaatgagaagtgagaaggtttttatactctgggatgcaaccgacatgttcaaatgtttgaaatcccacaatgttagaccaatcttaagtttcgtaagttatttcctttaagatatatattaaacagaaatctaagtagaactgcattgactaaccagtccctctggatggtggtgaacctgaagcatgctttaacctctaagactgtctaacacgcgtttcattcaatgtctccacagactgggtagcaaaaaaatcaccttttagttttagtttttaatctaaagatgttagacagatgctgagtgtgcgttttctcaaccgcttcaacattgtaagcgatgtatgctttggttgacaggaagttccttttccaggcaggtcccgttgccacctcctgctcactcagtcccgggctctgccgagtggtcctgggaatggcggcgggcccgtccagcgtgggccaccactggggccgggggccacgggctgcatgctgggcgggccctccagagaaggacacaaacgtgtttcgtaagcccaggcaccaatgggaatggaccaaagagtttcagggaaactccagtatattccagagtcagatctaagctccaggcacgcctgaagatgtgttgctactctgacatcccgagtttctgtccacacattgcatgcacagcgccccacacattggatactgttgttcacgataatttctcccgttttccagagcatttaacatagcttggaggcgtaaaatggctctgtattttaataacacagaaacatttgagcattgtatttctcgcatcccttctcgtgagcgcttagacctttttctattttagtcggattttgttttggaattttgcttttgtatgaacactcagcagaaaagtacttacttcttgccagttatctattaaccaaaacctttgatttgtagttttaaagattaaccctcaaagttctcttcataactgccttgacattttgggttgttctgttctgttaattttcttttgcttttttgtgttttttgtttgtttttacttttgcatttaagaccattaaatttgattttgttttgctcgaattttgttttgttttttattttaccttttctttctttttggctagggaaggtgcaggtggcccagcattcagggaggagtcgtaagatcttaagaaaccaatccttgcctcaagcaaaagcatttctgaatctgtgacgcaagaatgtgcagttacaggctggtggcttttaaaccaggagcccggaggaagggtgaaagagaaagcctgtgaaataggcagggccagatcacccaaaactcctcaggactgggatctggcgtttataaataactagtttacagagagaatcacaaacaggataacttagtaccagcagtttttaaccttgacgtgagactaaaacgtgaccgtaggctgttttttagttattgctctcatgagatgatggctgtatttatctgtttatttatacctatttatgtatttatttattgaagtgtgaaattgagcaataggcaggcaccaccgtccccagagcaggtcagcgtctcgagaggcccctggacaattgaggatgcccatcccctcccctttccctgatcttttactgaggggctgtgtgcgcgatccttgcaaattgatgatgttgccatccgtacccaggctgtgtctcataaaagtcggcctggtgccagagaggacctcctttctcccacagaatcccagatcctcaggaaaagccaaaaccgaggcccattgcccggattcgacacaaaagagggtccctgctctgttgcccgagagcagtctgcatcctgggaccagaatgctttcctggaaaaagaagcctttcaggtttccctgggccagcatcttctgatggaaggtgggagccaacacccttctgatggaaggtgggagccaacacccttctgatggaaggtgggagccaacacccttctgatggaaggtgggagccaacacccttctgatggaaggtgggagccaacacccttctgatggaaggcgggattcccgcttctgaaactccccctggagtctcactcccacacatgcccatagctagcattcaacagagaactctgtcttaagcttcaactgtgaaaatgatgacgggcttgtagcacctcagcttctttcctcgcccccttttatctgaatcctatcaattattctgatgctgggacaggtgagaagaaactgtgaagtatatgagcctttgaaagttccctgaagtttctcagttcaggaacattctcattgtatgtggtctccgctgtttgaacagccttctagctaaaaaattccaaagcctttatttgggagtcttagcttgcaagcttgtggaaggatttagcttaacaactgtcactcctgaaaagcaatctctgttccatcaaggttctagttgctggccctgtgtcctcaaagttcattacatcttatcaaggcctgtttgcaaaggggagatcccttttcttaaaaaaggctcaacccaaaagaaaccatttcttaaaaaattttacatagatcagttgtatttctatttagcaaaaatgagtgctctgcttttatttgggaatttcgatgaaaaagcgttcagagtagataatgttcatttatcaaaaatctggtttgggaaataccaaagaggctttgattgaattcccttttgacccgtgtgtaacttcctctggtagttagaccccaggcagctccgaatttgtgaacctgcttcctgatgaattctcccttgttcccccttggctctgccattatttcgttttcagtgtaatttgccaagccgcagttttctgtgctggctgtgctctagtcgcagctctgtgactgattccctcccgggtgctgagtcccctccccggccaccatcctgcgtgaatatcctgaaattcatgggcttcctcgggggcccgcccgcaggtggtgctgggtgggttccgccaccttctcctggaaggtgagccttttcctggccaagggcagctgccttaacctctgagagtctgcgcttggccttagtcctggagacccagcctccagggactgaaccgtgctgctgttgggagccaagaccggccctttggagccggcagcccaggggtccctgctggatcagagaaatagaagcacccgaagacggttagtggcaattccttgacccggtttgcttccaaatgaaggccatttgtccaccaggcattgaaaagacatgacttacccagtccggcatcggacttgaaaaatcgaaattgacatcactcagctgttacatttcacatccgattcagcccccttttatttccatgtgcttttcgcagccttcctgtgttggatgaaagagaataagaattcagctgacaggaggcctctatcctgtccctccaccccaccctccacctcaatcccctcccatcttccccagacctacctcacctactaggacctgaggcagctccttagcagagacccctggggtttagctgactctgggggtcaggggttcctgtccccaaacttcgcaagacagccctgaagtcacaagtgctttcttttaagtggcattggcaattggcgtgtaatgatggcagtagaatctgaatctcggatcccaggcagggttcacatttccaaacctttttgatttcccctgacctctaatggctggatcctatttttctacaacctttcagtgacatcgttcaggtttctttcttggccatttaaaaaaacaaattttttttttctcacttgtaagtcaccgccagtacctaagttaggctaacggagactttgacaggactggatttttcttccaccagaagagaagccttttccgttggtttggggccacctctttgaccatgaccatgtgatgttccgtttacagtgacttgctttgggggaggggaggctctcttaaccgattcccatgttgtacagtagatggttagaccttttgtatattagtgtgttttaagttattgatttgttttatataaaataatttatttttcaggtgccatttttcattttaactttgtttttacatgggtttgttttcaataaagtctgacactggtgtccaaaagtcaacaataaaatgaatcccattgtgttcttttgaagatgcctatgtaacttttaagctttttaaattattttcagaaaaaaaaaaagaaaagcccttatcagttttccatcagcccattgcctttttattttttttttttaatccttgtgaataaatgttctttagtgttttaggaggaaaaagcaaacctagattttgataacccagaagacttcagattaataaagaagctttgaaagaagaccatttttcaaaattttagtgaagtgtgaatattttttgtcaatggctttctcaaagagaatgaaacttttgcaccattttcagagtttttatagagatgccaaattgatatatttacatgtaatggaaacatgaaaaagttttattaaacaattgttcatagctgtgtagacattttaattcagtttccaaagctctcaaaaaatcgtatttttgaagtacggagtgatgcggtttggggcgtggcttacagttccaacgactcaattgtcccgatactcagttctttctacaggtatcaggttcgtgttaaacgctgtatgttaactatgactggaattctgtgatattttggtaataaatgaagtgggatcattgcg

SEQ ID NO: 310766 - DNA, 2752 bp, Homo sapiens
  misc_feature (2378)..(2378): n is a, c, g, or t
  misc_feature (2382)..(2382): n is a, c, g, or t
  misc_feature (2430)..(2430): n is a, c, g, or t
  misc_feature (2435)..(2435): n is a, c, g, or t
  misc_feature (2444)..(2444): n is a, c, g, or t
agcgggtcgtgcgcgctgaggaggagccgctgccgccgtcgccgtcgccgccaccgccgccaccgctaccgaggccgagcggagccgttagcgccgcgccgccgccgcctcccgcccgccccggagcagccccgggcccgcccgcccgcatccagatttttgaaaaatacaatgtctaatggttatgaagaccacatggccgaagactgcaggggtgacatcgggagaacgaatttgatcgtcaactacctccctcagaacatgacccaggatgagttacgaagcctgttcagcagcattggtgaagttgaatctgcaaaacttattcgggataaagtagcaggacacagcttgggctatggctttgtgaactacgtgaccgcgaaggatgcagagagagcgatcaacacgctgaacggcttgaggctccagtcaaaaaccattaaggtgtcgtatgctcgcccgagctcagaggtgatcaaagacgccaacttgtacatcagcgggctcccgcggaccatgacccagaaggacgtagaagacatgttctctcggtttgggcggatcatcaactcgcgggtcctcgtggatcagactacaggtttgtccagaggggttgcgtttatccggtttgacaaacggtcggaggcagaagaggcaattaccagtttcaatggtcataaacccccaggttcctctgagcccatcacagtgaagtttgcagccaaccccaaccagaacaaaaacgtggcactcctctcgcagctgtaccactcgccagcgcgacggttcggaggccccgttcaccaccaggcgcagagattcaggttctcccccatgggcgtcgatcacatgagcgggctctctggcgtcaacgtgccaggaaacgcctcctccggctggtgcattttcatctacaacctggggcaggatgccgacgaggggatcctctggcagatgtttgggccgtttggtgccgtcaccaatgtgaaagtgatccgcgacttcaacaccaacaagtgcaaagggtttggctttgtgaccatgacaaactatgaagaagccgcgatggccatagccagcctgaacggctaccgcctgggggacaaaatcttacaggtttccttcaaaaccaacaagtcccacaaataactcgctcatgcttttttttgtacggaatagataattaagagtgaaggagttgaaacttttcttgttagtgtacaactcattttgcgccaattttcacaagtgtttgtctttgtctgaatgagaagtgagaaggtttttatactctgggatgcaaccgacatgttcaaatgtttgaaatcccacaatgttagaccaatcttaagtttcgtaagttatttcctttaagatatatattaaacagaaatctaagtagaactgcattgactaaccagtccctctggatggtggtgaacctgaagcatgctttaacctctaagactgtctaacacgcgtttcattcaatgtctccacagactgggtagcaaaaaaatcaccttttagttttagtttttaatctaaagatgttagacagatgctgagtgtgcgttttctcaaccgcttcaacattgtaagcgatgtatgctttggttgacaggaagttccttttccaggcaggtcccgttgccacctcctgctcactcagtcccgggctctgccgagtggtcctgggaatggcggcgggcccgtccagcgtgggccaccactggggccgggggccacgggctgcatgctgggcgggccctccagagaaggacacaaacgtgtttcgtaagcccaggcaccaatgggaatggaccaaagagtttcagggaaactccagtatattccagagtcagatctaagctccaggcacgcctgaagatgtgttgctactctgacatcccgagtttctgtccacacattgcatgcacagcgccccacacattggatactgttgttcacgataatttctcccgttttccagagcatttaacatagcttggaggcgtaaaatggctctgtattttaataacacagaaacatttgagcattgtatttctcgcatcccttctcgtgagcgcttagacctttttctattttagtcggattttgttttggaattttgcttttgtatgaacactcagcagaaaagtacttacttcttgccagttatctattaaccaaaacctttgatttgtagttttaaagattaaccctcaaagttctcttcataactgccttgacattttgggttgttctgttctgttaattttcttttgcttttttgtgttttttgtttgtttttacttttgcatttaagaccattaaatttgattttgttttgctcgaaaaaaaaaaaaaaaaanaaanaaaaaaaaaaaaaaaaaaaaaaaaaaaaaaaaaaaaaaaaaaaaaaanaaaanaaaaaaaanaaaaaaaaaaacacacgaaccccacaagaaaaaagagagcgggagggggcagaccattcaaatcaaaccgcccgccggcgcagcagaacgacctagaggcgaacccacgccaccccctgagatagacggagcacgcgccgacccaccagtcgagtcgactagagtaaaacagactcaagccgcggcccgccactactaccaaccctgtcggcgagacaatcaacccatcgagcacgacctgacgatggggaacgcacaccaccatcgcgcggcgcgacaacaacgagagcagccgcaacaccccacga

SEQ ID NO: 310767 - DNA, 3038 bp, Homo sapiens
  misc_feature (2378)..(2378): n is a, c, g, or t
  misc_feature (2382)..(2382): n is a, c, g, or t
  misc_feature (2430)..(2430): n is a, c, g, or t
  misc_feature (2435)..(2435): n is a, c, g, or t
  misc_feature (2444)..(2444): n is a, c, g, or t
agcgggtcgtgcgcgctgaggaggagccgctgccgccgtcgccgtcgccgccaccgccgccaccgctaccgaggccgagcggagccgttagcgccgcgccgccgccgcctcccgcccgccccggagcagccccgggcccgcccgcccgcatccagatttttgaaaaatacaatgtctaatggttatgaagaccacatggccgaagactgcaggggtgacatcgggagaacgaatttgatcgtcaactacctccctcagaacatgacccaggatgagttacgaagcctgttcagcagcattggtgaagttgaatctgcaaaacttattcgggataaagtagcaggacacagcttgggctatggctttgtgaactacgtgaccgcgaaggatgcagagagagcgatcaacacgctgaacggcttgaggctccagtcaaaaaccattaaggtgtcgtatgctcgcccgagctcagaggtgatcaaagacgccaacttgtacatcagcgggctcccgcggaccatgacccagaaggacgtagaagacatgttctctcggtttgggcggatcatcaactcgcgggtcctcgtggatcagactacaggtttgtccagaggggttgcgtttatccggtttgacaaacggtcggaggcagaagaggcaattaccagtttcaatggtcataaacccccaggttcctctgagcccatcacagtgaagtttgcagccaaccccaaccagaacaaaaacgtggcactcctctcgcagctgtaccactcgccagcgcgacggttcggaggccccgttcaccaccaggcgcagagattcaggttctcccccatgggcgtcgatcacatgagcgggctctctggcgtcaacgtgccaggaaacgcctcctccggctggtgcattttcatctacaacctggggcaggatgccgacgaggggatcctctggcagatgtttgggccgtttggtgccgtcaccaatgtgaaagtgatccgcgacttcaacaccaacaagtgcaaagggtttggctttgtgaccatgacaaactatgaagaagccgcgatggccatagccagcctgaacggctaccgcctgggggacaaaatcttacaggtttccttcaaaaccaacaagtcccacaaataactcgctcatgcttttttttgtacggaatagataattaagagtgaaggagttgaaacttttcttgttagtgtacaactcattttgcgccaattttcacaagtgtttgtctttgtctgaatgagaagtgagaaggtttttatactctgggatgcaaccgacatgttcaaatgtttgaaatcccacaatgttagaccaatcttaagtttcgtaagttatttcctttaagatatatattaaacagaaatctaagtagaactgcattgactaaccagtccctctggatggtggtgaacctgaagcatgctttaacctctaagactgtctaacacgcgtttcattcaatgtctccacagactgggtagcaaaaaaatcaccttttagttttagtttttaatctaaagatgttagacagatgctgagtgtgcgttttctcaaccgcttcaacattgtaagcgatgtatgctttggttgacaggaagttccttttccaggcaggtcccgttgccacctcctgctcactcagtcccgggctctgccgagtggtcctgggaatggcggcgggcccgtccagcgtgggccaccactggggccgggggccacgggctgcatgctgggcgggccctccagagaaggacacaaacgtgtttcgtaagcccaggcaccaatgggaatggaccaaagagtttcagggaaactccagtatattccagagtcagatctaagctccaggcacgcctgaagatgtgttgctactctgacatcccgagtttctgtccacacattgcatgcacagcgccccacacattggatactgttgttcacgataatttctcccgttttccagagcatttaacatagcttggaggcgtaaaatggctctgtattttaataacacagaaacatttgagcattgtatttctcgcatcccttctcgtgagcgcttagacctttttctattttagtcggattttgttttggaattttgcttttgtatgaacactcagcagaaaagtacttacttcttgccagttatctattaaccaaaacctttgatttgtagttttaaagattaaccctcaaagttctcttcataactgccttgacattttgggttgttctgttctgttaattttcttttgcttttttgtgttttttgtttgtttttacttttgcatttaagaccattaaatttgattttgttttgctcgaaaaaaaaaaaaaaaaanaaanaaaaaaaaaaaaaaaaaaaaaaaaaaaaaaaaaaaaaaaaaaaaaaanaaaanaaaaaaaanaaaaaaaaaaaaaaaaaaaaaaaaaaaaaaaaaaaaaaaaaagcgaggagggggaggcgcccttcacagctgtcctaccagacggagccgccgcacaacgtccaccccccaaatgaagaagacgggcaccacatcagcccatactaggcgacagcgagcaccgacgacccccaccaacaaacccgcgaacgattgaggacacacgaacgcatcgctcgacacaagacgatacaaccatctatggaaggagacaggcagcccacatactacactcacagaaggagcgagagagaccaaagcaacaacagagcacagagaagccagcatcaacacaagctccatcatgcgccaatgccagctagcaacaccgcagcgagcggctgaggaggacgacaacaatagcacgacgacgagaggaggaacagacagagaggcgagaggacagcacacgaaccgacagcctgcggacccacgaagacgcatcggcgccgcgaagagaaaaataccaacgcctcgacaccgcagcaggagagcaggcgctcacaacaagaaccacataccgcccagccacacgacaccccaacaagccccgcg

SEQ ID NO: 310768 - DNA, 2301 bp, Homo sapiens
agcgggtcgtgcgcgctgaggaggagccgctgccgccgtcgccgtcgccgccaccgccgccaccgctaccgaggccgagcggagccgttagcgccgcgccgccgccgcctcccgcccgccccggagcagccccgggcccgcccgcccgcatccagatttttgaaaaatacaatgtctaatggttatgaagaccacatggccgaagactgcaggggtgacatcgggagaacgaatttgatcgtcaactacctccctcagaacatgacccaggatgagttacgaagcctgttcagcagcattggtgaagttgaatctgcaaaacttattcgggataaagtagcaggacacagcttgggctatggctttgtgaactacgtgaccgcgaaggatgcagagagagcgatcaacacgctgaacggcttgaggctccagtcaaaaaccattaaggtgtcgtatgctcgcccgagctcagaggtgatcaaagacgccaacttgtacatcagcgggctcccgcggaccatgacccagaaggacgtagaagacatgttctctcggtttgggcggatcatcaactcgcgggtcctcgtggatcagactacaggtttgtccagaggggttgcgtttatccggtttgacaaacggtcggaggcagaagaggcaattaccagtttcaatggtcataaacccccaggttcctctgagcccatcacagtgaagtttgcagccaaccccaaccagaacaaaaacgtggcactcctctcgcagctgtaccactcgccagcgcgacggttcggaggccccgttcaccaccaggcgcagagattcaggttctcccccatgggcgtcgatcacatgagcgggctctctggcgtcaacgtgccaggaaacgcctcctccggctggtgcattttcatctacaacctggggcaggatgccgacgaggggatcctctggcagatgtttgggccgtttggtgccgtcaccaatgtgaaagtgatccgcgacttcaacaccaacaagtgcaaagggtttggctttgtgaccatgacaaactatgaagaagccgcgatggccatagccagcctgaacggctaccgcctgggggacaaaatcttacaggtttccttcaaaaccaacaagtcccacaaataactcgctcatgcttttttttgtacggaatagataattaagagtgaaggagttgaaacttttcttgttagtgtacaactcattttgcgccaattttcacaagtgtttgtctttgtctgaatgagaagtgagaaggtttttatactctgggatgcaaccgacatgttcaaatgtttgaaatcccacaatgttagaccaatcttaagtttcgtaagttatttcctttaagatatatattaaacagaaatctaagtagaactgcattgactaaccagtccctctggatggtggtgaacctgaagcatgctttaacctctaagactgtctaacacgcgtttcattcaatgtctccacagactgggtagcaaaaaaatcaccttttagttttagtttttaatctaaagatgttagacagatgctgagtgtgcgttttctcaaccgcttcaacattgtaagcgatgtatgctttggttgacaggaagttccttttccaggcaggtcccgttgccacctcctgctcactcagtcccgggctctgccgagtggtcctgggaatgggggccctccagagaaggacacaaacgtgtttcgtaagcccaggcaccaatgggaatggaccaaagagtttcagggaaactccagtatattccagagtcagatctaagctccaggcacgcctgaagatgtgttgctactctgacatcccgagtttctgtccacacattgcatgcacagcgccccacacattggatactgttgttcacgataatttctcccgttttccagagcatttaacatagcttggaggcgtaaaatggctctgtattttaataacacagaaacatttgagcattgtatttctcgcatcccttctcgtgagcgcttagacctttttctattttagtcggattttgttttggaattttgcttttgtatgaacactcagcagaaaagtacttacttcttgccagttatctattaaccaaaacctttgatttgtagttttaaagattaaccctcaaagttctcttcataactgccttgacattttgggttgttctgttctgttaattttcttttgcttttttgtgttttttgtttgtttttacttttgcatttaagaccattaaatttgattttgttttgctcgaa

SEQ ID NO: 310769 - DNA, 3749 bp, Homo sapiens
  misc_feature (650)..(650): n is a, c, g, or t
  misc_feature (1113)..(1113): n is a, c, g, or t
  misc_feature (1245)..(1245): n is a, c, g, or t
cacgttttgaggtcccaaggggttaggacttcggcatatgaatttggattgtggggtggggggaacacgattgaacccctcactggatgaattcttgagaatgggcagccagaaaaagacctgattgaggccaaagagcaagcgatgttgggagcttaggaaagagggttctggtcgaggggccggggagccccaggtcagtgcacgcctgctgtgcgccagctgttctgattctagcctgactgaacatgacagtgtccagagagaagaggaaagcagagttcccatggtccttggagacacctgtccttgggaggcatcagagctttccccagcatttggctctagggcacttctcctctggggcttcatccagggacggcagtaggtccagtcagtgccagcctcagctccgctccactggcgccagggtcatggtttggcaggcccccaaatactgccccagtccagacaggtctgcagggagccagggcaagcccggacactaggggaggctgggggccaaggcagcctctttttctctggggacagcactggcagcccctgacccacatcatggggtgagcaagtgtccccagagctcctgtccacaggctgatggaggtgccccgggcctgggagcagcacgncttccccagagacctcatgggctccgtagtgacatgctccctcgattcccaccgctaccaggcagagctggcctccagccccacactcctctcctcgtggggctgtcctgttcccctgctgggccgcccactgccctatgagcaggggcaatgtctgttgttccttctctggaacatgataggagcttctcagaggatgctgtgtgtgtgttctcagcacgcagattctgcccagtgactcctgagtggcggcttctccctgcgttctggtctcagttaccttggctcatcagttctgtgcccctcactcaaagggaatgaacttcctttcgcacaggttcaagtccccacccttctcgggaacacatctcctgctccctcctccatatcccagcctcctgacgaggctgtgagtcctgccaggctgccccttcacaggcagaggggttccactgtggtcctnttcttccttctgggcccatggggtctgcacggccgtcagcgccaacctgagaaagcaccgaagaccttgtcttgcattggcctccgggctcccctcaccaccctctccacacgaatgatgaatgtaccattntgtcaaagcacccagaaggttctcttcagttttctttgattttgcaaaatataaatccaaaaggcattgagtcgtttaatattgaacacttgagtggatttgagtacaaactcggggtcctcccagaactcacagcccctgtcagggcttctgtggcgagcttgctctttggcaggggagtctcctgtgttcccagtagctcccagcttgcttgcccgctgcagcacgggctgctttcaggcaccaggacctctctggcaccggctcactgtccagcacatcagagaggtagccacacacaagctgcgggccctcagttgctgggctttgtgacataggagtcacgcctgcctccttgaggatggtgagcacccagtgaggaagcactgccaggcatcctggctcacggcccatccctcagtgagcttgccaccatgcggctgcaggcggtgagcgtcagtgatgataatcgttccctgcatgatttctaacacacagtgttggcttttcctaacccagcattcaacaccctcctcaatgctttggccacgtgcctgtactaatctcggaaagtggttgtgttcccaaggtgtcgtatgctcgcccgagctcagaggtgatcaaagacgccaacttgtacatcagcgggctcccgcggaccatgacccagaaggacgtagaagacatgttctctcggtttgggcggatcatcaactcgcgggtcctcgtggatcagactacaggtttgtccagaggggttgcgtttatccggtttgacaaacggtcggaggcagaagaggcaattaccagtttcaatggtcataaacccccaggttcctctgagcccatcacagtgaagtttgcagccaaccccaaccagaacaaaaacgtggcactcctctcgcagctgtaccactcgccagcgcgacggttcggaggccccgttcaccaccaggcgcagagattcaggttctcccccatgggcgtcgatcacatgagcgggctctctggcgtcaacgtgccaggaaacgcctcctccggctggtgcattttcatctacaacctggggcaggatgccgacgaggggatcctctggcagatgtttgggccgtttggtgccgtcaccaatgtgaaagtgatccgcgacttcaacaccaacaagtgcaaagggtttggctttgtgaccatgacaaactatgaagaagccgcgatggccatagccagcctgaacggctaccgcctgggggacaaaatcttacaggtttccttcaaaaccaacaagtcccacaaataactcgctcatgcttttttttgtacggaatagataattaagagtgaaggagttgaaacttttcttgttagtgtacaactcattttgcgccaattttcacaagtgtttgtctttgtctgaatgagaagtgagaaggtttttatactctgggatgcaaccgacatgttcaaatgtttgaaatcccacaatgttagaccaatcttaagtttcgtaagttatttcctttaagatatatattaaacagaaatctaagtagaactgcattgactaaccagtccctctggatggtggtgaacctgaagcatgctttaacctctaagactgtctaacacgcgtttcattcaatgtctccacagactgggtagcaaaaaaatcaccttttagttttagtttttaatctaaagatgttagacagatgctgagtgtgcgttttctcaaccgcttcaacattgtaagcgatgtatgctttggttgacaggaagttccttttccaggcaggtcccgttgccacctcctgctcactcagtcccgggctctgccgagtggtcctgggaatggcggcgggcccgtccagcgtgggccaccactggggccgggggccacgggctgcatgctgggcgggccctccagagaaggacacaaacgtgtttcgtaagcccaggcaccaatgggaatggaccaaagagtttcagggaaactccagtatattccagagtcagatctaagctccaggcacgcctgaagatgtgttgctactctgacatcccgagtttctgtccacacattgcatgcacagcgccccacacattggatactgttgttcacgataatttctcccgttttccagagcatttaacatagcttggaggcgtaaaatggctctgtattttaataacacagaaacatttgagcattgtatttctcgcatcccttctcgtgagcgcttagacctttttctattttagtcggattttgttttggaattttgcttttgtatgaacactcagcagaaaagtacttacttcttgccagttatctattaaccaaaacctttgatttgtagttttaaagattaaccctcaaagttctcttcataactgccttgacattttgggttgttctgttctgttaattttcttttgcttttttgtgttttttgtttgtttttacttttgcatttaagaccattaaatttgattttgttttgctcgaa

SEQ ID NO: 310770 - DNA, 1353 bp, Homo sapiens
agcgggtcgtgcgcgctgaggaggagccgctgccgccgtcgccgtcgccgccaccgccgccaccgctaccgaggccgagcggagccgttagcgccgcgccgccgccgcctcccgcccgccccggagcagccccgggcccgcccgcccgcatccagatttttgaaaaatacaatgtctaatggttatgaagaccacatggccgaagactgcaggggtgacatcgggagaacgaatttgatcgtcaactacctccctcagaacatgacccaggatgagttacgaagcctgttcagcagcattggtgaagttgaatctgcaaaacttattcgggataaagtagcaggacacagcttgggctatggctttgtgaactacgtgaccgcgaaggatgcagagagagcgatcaacacgctgaacggcttgaggctccagtcaaaaaccattaaggtgtcgtatgctcgcccgagctcagaggtgatcaaagacgccaacttgtacatcagcgggctcccgcggaccatgacccagaaggacgtagaagacatgttctctcggtttgggcggatcatcaactcgcgggtcctcgtggatcagactacaggtttgtccagaggggttgcgtttatccggtttgacaaacggtcggaggcagaagaggcaattaccagtttcaatggtcataaacccccaggttcctctgagcccatcacagtgaagtttgcagccaaccccaaccagaacaaaaacgtggcactcctctcgcagctgtaccactcgccagcgcgacggttcggaggccccgttcaccaccaggcgcagagattcaggtgggtcgggagggtgtgcgctcctgaaagccatacttagccccgctggcaggcgacggcacagccacagaatagaaaccacggggatgatagactgatcccgtcagagagcgcgtttcagaatcattctgcagctccacaccacaacctccatcagaaaggtgtctgtaggaaagccgtttacttccgatggggcgttgtctttcatgggaatcaaaacagtgactccaggctggacacagtgacttatccctgtaatcctagcaccttgggtggctgagagaggaagatcgattgagcccaggagttcaagaccaacctgggcaatattgcgagaccccatctctacaaaaaatacaaagctggccaggcatggcggtgcgctcctgtagttgcagcaactcaggaagctgaggtgggaggattgcttgagcccaggaggttgaggctgcagtgagttgtgatcataccactgcactccagcctgggccacagggccagaacctgtctttttttgattttatta

SEQ ID NO: 310771 - DNA, 1395 bp, Homo sapiens
agcgggtcgtgcgcgctgaggaggagccgctgccgccgtcgccgtcgccgccaccgccgccaccgctaccgaggccgagcggagccgttagcgccgcgccgccgccgcctcccgcccgccccggagcagccccgggcccgcccgcccgcatccagatttttgaaaaatacaatgtctaatggttatgaagaccacatggccgaagactgcaggggtgacatcgggagaacgaatttgatcgtcaactacctccctcagaacatgacccaggatgagttacgaagcctgttcagcagcattggtgaagttgaatctgcaaaacttattcgggataaagtagcaggacacagcttgggctatggctttgtgaactacgtgaccgcgaaggatgcagagagagcgatcaacacgctgaacggcttgaggctccagtcaaaaaccattaaggtgtcgtatgctcgcccgagctcagaggtgatcaaagacgccaacttgtacatcagcgggctcccgcggaccatgacccagaaggacgtagaagacatgttctctcggtttgggcggatcatcaactcgcgggtcctcgtggatcagactacagttattccgcaaacgaggacagcaccaaaatgagaagacgttggctttggtttgaggaggctgaggaggtaagatggcattaaaagaagctggggatatctgggcgtggtggctcacgcctgtaatcccagcactttgggaggccaaggtgggtggatcacgaggtcaggagatggagaccagcctgaccaacatggtgaaaccctgtctctactaaaaatacaaaaaattagctgggcatggtggcgggcgcctgtagtcccagctactcgggaggctgagacaggagaatggcatgaacccgggaagcggaggttgcagtgagccgaggtcttgccactgcactccagcgtgggtgacagagcgagactccgtcttaaaaaaaaaaaaaaaaaaagctggggattaggccagcatttcatgtacagtgaaaacgccaagagattctagcaccttccctcaggcacccaaatgtgctggccttgcccatgaatggggtgaaaaggacactgcaggccgggtgtggtggctcacgcctgtaatcccagcactttgggaggccgaggtggacggatcacctgaggtcaggagtttgagaccagcctggccaacatggtgaagccccatctctactaaaaatacaaaaattagccaggtgtggtggcaggcgcctgtaatcccagctactcgggaggctgaggcaggagaatcgcctggaccccaggaggcggagattgcagcaagccgagattgcgccactgaactccagcctgggcagcagagcgggatttcatc

SEQ ID NO: 310772 - DNA, 1230 bp, Homo sapiens
aggaagtttccagagctttcgaggaaggtttcttcaactcaaattcatccgcctgataattttcttatattttcctaaagaaggaagagaagcgcatagaggagaagggaaataattttttaggagcctttcttacggctatgaggaatttggggctcagttgaaaagcctaaactgcctctcgggaggttgggcgcggcgaactactttcagcggcgcacggagacggcgtctacgtgaggggtgataagtgacgcaacactcgttgcataaatttgcgctccgccagcccggagcatttaggggcggttggctttgttgggtgagcttgtttgtgtccctgtgggtggacgtggttggtgattggcaggatcctggtatccgctaacaggtcaaaatgcagatcttcgtgaaaacccttaccggcaagaccatcacccttgaggtggagcccagtgacaccatcgaaaatgtgaaggccaagatccaggataaggaaggcattccccccgaccagcagaggctcatctttgcaggcaagcagctggaagatggccgtactctttctgactacaacatccagaaggagtcgaccctgcacctggtcctgcgtctgagaggtggtatgcagatcttcgtgaagaccctgaccggcaagaccatcaccctggaagtggagcccagtgacaccatcgaaaatgtgaaggccaagatccaggataaagaaggcatccctcccgaccagcagaggctcatctttgcaggcaagcagctggaagatggccgcactctttctgactacaacatccagaaggagtcgaccctgcacctggtcctgcgtctgagaggtggtatgcagatcttcgtgaagaccctgaccggcaagaccatcactctggaggtggagcccagtgacaccatcgaaaatgtgaaggccaagatccaagataaagaaggcatcccccccgaccagcagaggctcatctttgcaggcaagcagctggaagatggccgcactctttctgactacaacatccagaaagagtcgaccctgcacctggtcctgcgcctgaggggtggctgttaattcttcagtcatggcattcgcagtgcccagtgatggcattactctgcactatagccatttgccccaacttaagtttagaaattacaagtttcagtaatagctgaacctgttcaaaatgttaataaaggtttcgttgcatggta

SEQ ID NO: 310773 - DNA, 1397 bp, Homo sapiens
aggaagtttccagagctttcgaggaaggtttcttcaactcaaattcatccgcctgataattttcttatattttcctaaagaaggaagagaagcgcatagaggagaagggaaataattttttaggagcctttcttacggctatgaggaatttggggctcagttgaaaagcctaaactgcctctcgggaggttgggcgcggcgaactactttcagcggcgcacggagacggcgtctacgtgaggggtgataagtgacgcaacactcgttgcataaatttgcgctccgccagcccggagcatttaggggcggttggctttgttgggtgagcttgtttgtgtccctgtgggtggacgtggttggtgattggcaggatcctggtatccgctaacaggtcaaaatgcagatcttcgtgaaaacccttaccggcaagaccatcacccttgaggtggagcccagtgacaccatcgaaaatgtgaaggccaagatccaggataaggaaggcattccccccgaccagcagaggctcatctttgcaggcaagcagctggaagatggccgtactctttctgactacaacatccagaaggagtcgaccctgcacctggtcctgcgtctgagaggtggtatgcagatcttcgtgaagaccctgaccggcaagaccatcaccctggaagtggagcccagtgacaccatcgaaaatgtgaaggccaagatccaggataaagaaggcatccctcccgaccagcagaggctcatctttgcaggcaagcagctggaagatggccgcactctttctgactacaacatccagaaggagtcgaccctgcacctggtcctgcgtctgagaggtggtatgcagatcttcgtgaagaccctgaccggcaagaccatcactctggaggtggagcccagtgacaccatcgaaaatgtgaaggccaagatccaagataaagaaggcatcccccccgaccagcagaggctcatctttgcaggcaagcagctggaagatggccgcactctttctgactacaacatccagaaagagtcgaccctgcacctggtcctgcgcctgaggggtggctgttaattcttcagtcatggcattcgcagtgcccagtgatggcattactctgcactatagccatttgccccaacttaagtttagaaattacaagtttcagtaatagctgaacctgttcaaaatgttaataaaggtttcgttgcatggtaaaaaaaacaacaaaaaaaaaaaaaacatttggggcggctcgggcaatcgactttaaactgagcaagttatgcatgcggcgcatttgagccacttggcaattcgccataggagggggttaaattactgggcggggttacaaacccggaagggaaacccggcctaccca

SEQ ID NO: 310774 - DNA, 1001 bp, Homo sapiens
aggaagtttccagagctttcgaggaaggtttcttcaactcaaattcatccgcctgataattttcttatattttcctaaagaaggaagagaagcgcatagaggagaagggaaataattttttaggagcctttcttacggctatgaggaatttggggctcagttgaaaagcctaaactgcctctcgggaggttgggcgcggcgaactactttcagcggcgcacggagacggcgtctacgtgaggggtgataagtgacgcaacactcgttgcataaatttgcgctccgccagcccggagcatttaggggcggttggctttgttgggtgagcttgtttgtgtccctgtgggtggacgtggttggtgattggcaggatcctggtatccgctaacaggtcaaaatgcagatcttcgtgaaaacccttaccggcaagaccatcacccttgaggtggagcccagtgacaccatcgaaaatgtgaaggccaagatccaggataaggaaggcattccccccgaccagcagaggctcatctttgcaggcaagcagctggaagatggccgtactctttctgactacaacatccagaaggagtcgaccctgcacctggtcctgcgtctgagaggtggtatgcagatcttcgtgaagaccctgaccggcaagaccatcaccctggaagtggagcccagtgacaccatcgaaaatgtgaaggccaagatccaggataaagaaggcatccctcccgaccagcagaggctcatctttgcaggcaagcagctggaagatggccgcactctttctgactacaacatccagaaggagtcgaccctgcacctggtcctgcgtctgagaggtggtatgcagatcttcgtgaagaccctgaccggcaagaccatcactctggaggtggagcccagtgacaccatcgaaaatgtgaaggccaagatccaagataagatggagaaacctgtctctagcaaaaaagaaaaatagtaaaaattaacag

SEQ ID NO: 310775 - DNA, 999 bp, Homo sapiens
aggaagtttccagagctttcgaggaaggtttcttcaactcaaattcatccgcctgataattttcttatattttcctaaagaaggaagagaagcgcatagaggagaagggaaataattttttaggagcctttcttacggctatgaggaatttggggctcagttgaaaagcctaaactgcctctcgggaggttgggcgcggcgaactactttcagcggcgcacggagacggcgtctacgtgaggggtgataagtgacgcaacactcgttgcataaatttgcgctccgccagcccggagcatttaggggcggttggctttgttgggtgagcttgtttgtgtccctgtgggtggacgtggttggtgattggcaggatcctggtatccgctaacaggtcaaaatgcagatcttcgtgaaaacccttaccggcaagaccatcacccttgaggtggagcccagtgacaccatcgaaaatgtgaaggccaagatccaggataaggaaggcattccccccgaccagcagaggctcatctttgcaggcaagcagctggaagatggccgtactctttctgactacaacatccagaaggagtcgaccctgcacctggtcctgcgtctgagaggtggtatgcagatcttcgtgaagaccctgaccggcaagaccatcaccctggaagtggagcccagtgacaccatcgaaaatgtgaaggccaagatccaggataaagaaggcatccctcccgaccagcagaggctcatctttgcaggcaagctggaagatggccgcactctttctgactacaacatccagaaagagtcgaccctgcacctggtcctgcgcctgaggggtggctgttaattcttcagtcatggcattcgcagtgcccagtgatggcattactctgcactatagccatttgccccaacttaagtttagaaattacaagtttcagtaatagctgaacctgttcaaaatgttaataaaggtttcgttgcatggta

SEQ ID NO: 310776 - DNA, 525 bp, Homo sapiens
  misc_feature (1)..(1): n is a, c, g, or t
  misc_feature (36)..(36): n is a, c, g, or t
  misc_feature (135)..(135): n is a, c, g, or t
  misc_feature (159)..(159): n is a, c, g, or t
nggcagcacggtggaagggaggcaaggagccgccantgccaaggaggagagggggcacaagccgcaggcagggaaggtggcaccaaaactagtaagaacaaagcaaaaccaccgtggcccacactgctctctccntttattcctctctttcctgccctntataccaacggcataagaagcctgcacaaagagaaaaatccgtatatccagttatcccttctgtcgtcttctcgcagccgtccagaaagaaggcatcccccccgaccagcagaggctcatctttgcaggcaagcagctggaagatggccgcactctttctgactacaacatccagaaagagtcgaccctgcacctggtcctgcgcctgaggggtggctgttaattcttcagtcatggcattcgcagtgcccagtgatggcattactctgcactatagccatttgccccaacttaagtttagaaattacaagtttcagtaatagctgaacctgttcaaaatgttaataaaggtttcgttgcatggta

SEQ ID NO: 310777 - DNA, 303 bp, Homo sapiens
taatagctgaacctgttcaaaaaaagaaggcatcccccccgaccagcagaggctcatctttgcaggcaagcagctggaagatggccgcactctttctgactacaacatccagaaagagtcgaccctgcacctggtcctgcgcctgaggggtggctgttaattcttcagtcatggcattcgcagtgcccagtgatggcattactctgcactatagccatttgccccaacttaagtttagaaattacaagtttcagtaatagctgaacctgttcaaaatgttaataaaggtttcgttgcatggta

SEQ ID NO: 310778 - DNA, 773 bp, Homo sapiens
aggaagtttccagagctttcgaggaaggtttcttcaactcaaattcatccgcctgataattttcttatattttcctaaagaaggaagagaagcgcatagaggagaagggaaataattttttaggagcctttcttacggctatgaggaatttggggctcagttgaaaagcctaaactgcctctcgggaggttgggcgcggcgaactactttcagcggcgcacggagacggcgtctacgtgaggggtgataagtgacgcaacactcgttgcataaatttgcgctccgccagcccggagcatttaggggcggttggctttgttgggtgagcttgtttgtgtccctgtgggtggacgtggttggtgattggcaggatcctggtatccgctaacaggtcaaaatgcagatcttcgtgaaaacccttaccggcaagaccatcacccttgaggtggagcccagtgacaccatcgaaaatgtgaaggccaagatccaggataaggaaggcattccccccgaccagcagaggctcatctttgcaggcaagcagtggaagatggccgcactctttctgactacaacatccagaaagagtcgaccctgcacctggtcctgcgcctgaggggtggctgttaattcttcagtcatggcattcgcagtgcccagtgatggcattactctgcactatagccatttgccccaacttaagtttagaaattacaagtttcagtaatagctgaacctgttcaaaatgttaataaaggtttcgttgcatggta

SEQ ID NO: 310779 - DNA, 751 bp, Homo sapiens
aggaagtttccagagctttcgaggaaggtttcttcaactcaaattcatccgcctgataattttcttatattttcctaaagaaggaagagaagcgcatagaggagaagggaaataattttttaggagcctttcttacggctatgaggaatttggggctcagttgaaaagcctaaactgcctctcgggaggttgggcgcggcgaactactttcagcggcgcacggagacggcgtctacgtgaggggtgataagtgacgcaacactcgttgcataaatttgcgctccgccagcccggagcatttaggggcggttggctttgttgggtgagcttgtttgtgtccctgtgggtggacgtggttggtgattggcaggatcctggtatccgctaacaggtcaaaatgcagatcttcgtgaaaacccttaccggcaagaccatcacccttgaggtggagcccagtgacaccatcgaaaatgtgaaggccaagatccaggataaggaaggcattccccccgaccagcagaggctcatctttgcaggcaagcagctggaagatggccgtactctttctgactacaacatccagaaggagtctgaggggtggctgttaattcttcagtcatggcattcgcagtgcccagtgatggcattactctgcactatagccatttgccccaacttaagtttagaaattacaagtttcagtaatagctgaacctgttcaaaatgttaataaaggtttcgttgcatggta

SEQ ID NO: 310780 - DNA, 631 bp, Homo sapiens
  misc_feature (1)..(1): n is a, c, g, or t
  misc_feature (36)..(36): n is a, c, g, or t
  misc_feature (135)..(135): n is a, c, g, or t
  misc_feature (159)..(159): n is a, c, g, or t
nggcagcacggtggaagggaggcaaggagccgccantgccaaggaggagagggggcacaagccgcaggcagggaaggtggcaccaaaactagtaagaacaaagcaaaaccaccgtggcccacactgctctctccntttattcctctctttcctgccctntataccaacggcataagaagcctgcacaaagagaaaaatccgtatatccagttatcccttctgtcgtcttctcgcagccgtccagaaagaaggcatcccccccgaccagcagaggctcatctttgcaggcaagcagctggaagatggccgcactctttctgactacaacatccagaaagagtcgaccctgcacctggtcctgcgcctgaggggtggctgttaattcttcagtcatggcattcgcagtgcccagtgatggcattactctgcactatagccatttgccccaacttaagtttagaaattacaagtttcagtaatagctgaacctgttcaaaatgttaataaaggtttcgttgcatggtaaaaaaaaaaagaagagaaggtttgcccgttagtgagggctaggtatgcgcggcgccggtttattaggtagagtatgcccgcggagtttgtacggggttgtggagga

SEQ ID NO: 310781 - DNA, 256 bp, Homo sapiens
  misc_feature (41)..(41): n is a, c, g, or t
  misc_feature (54)..(54): n is a, c, g, or t
  misc_feature (76)..(76): n is a, c, g, or t
aattccggattgccttcttttaccttggatcttggcccttnacattttcgatgntgtcactgggctccacctccanagtgatggtcttgccggtcatgaggggtggctgttaattcttcagtcatggcattcgcagtgcccagtgatggcattactctgcactatagccatttgccccaacttaagtttagaaattacaagtttcagtaatagctgaacctgttcaaaatgttaataaaggtttcgttgcatggta

SEQ ID NO: 310782 - DNA, 182 bp, Homo sapiens
taatagctgaacctgttcaaaatgaggggtggctgttaattcttcagtcatggcattcgcagtgcccagtgatggcattactctgcactatagccatttgccccaacttaagtttagaaattacaagtttcagtaatagctgaacctgttcaaaatgttaataaaggtttcgttgcatggta

SEQ ID NO: 310783 - DNA, 834 bp, Homo sapiens
  misc_feature (735)..(735): n is a, c, g, or t
gcgtgggggaggggagggcgaggtgacgcggcgctgggcctttccgggacagtgggccttgttgacctgaggggggcgagggcggttggcgcgcgcgcgcgttgacggaaactaacggacgcctaaccgatcggcgattctgtcgagtttacttcgcggggaaggcggaaaagaggtcaaaatgcagatcttcgtgaaaacccttaccggcaagaccatcacccttgaggtggagcccagtgacaccatcgaaaatgtgaaggccaagatccaggataaggaaggcattccccccgaccagcagaggctcatctttgcaggcaagcagctggaagatggccgtactctttctgactacaacatccagaaggagtcgaccctgcacctggtcctgcgtctgagaggtggtatgcagatcttcgtgaagaccctgaccggcaagaccatcaccctggaagtggagcccagtgacaccatcgaaaatgtgaaggccaagatccaggataaagaaggcatccctcccgaccagcagaggctcatctttgcaggcaagcagctggaagatggccgcactctttctgactacaacatccagaaggagtcgaccctgcacctggtcctgcgtctgagaggtggtatgcagatcttcgtgaagaccctgaccggcaagaccatcactctggaggtggagcccagtgacaccatcgaaaatgtgaaggccaagatccaagatgncagaaagggccaactgggcggcagagggaaaagggggcacttggaaaaaccaaaggggccgaagagcagcagaggggaaaaagaagaaaaacaaaagaa

SEQ ID NO: 310784 - DNA, 770 bp, Homo sapiens
gcgtgggggaggggagggcgaggtgacgcggcgctgggcctttccgggacagtgggccttgttgacctgaggggggcgagggcggttggcgcgcgcgcgcgttgacggaaactaacggacgcctaaccgatcggcgattctgtcgagtttacttcgcggggaaggcggaaaagaggtagtttgtgtggtttctggaagcctttactttggaatcccagtgtgagaaaggtgccccttcttgtgtttcaatgggatttttatttcgcgagtcttgtgggtttggttttgttttcagtttgcctaacaccgtgcttaggtttgaggcagattggagttcggtcgggggagtttgaatatccggaacagttagtggggaaagctgtggacgcttggtaagagagcgctctggattttccgctgttgacgttgaaaccttgaatgacgaatttcgtattaagtgacttagccttgtaaaattgaggggaggcttgcggaatattaacgtatttaaggcattttgaaggaatagttgctaattttgaagaatattaggtgtaaaagcaagaaatacaatgatcctgaggtgacacgcttatgttttacttttaaactaggtcaaaatgcagatcttcgtgaaaacccttaccggcaagaccatcacccttgaggtggagcccagtgacaccatcgaggcttattcttggaggcagcagctgaagaatggcgactcttctgatacacatcagggagcgaccctgctggcctgcgtg

SEQ ID NO: 310785 - DNA, 1254 bp, Homo sapiens
aggaagtttccagagctttcgaggaaggtttcttcaactcaaattcatccgcctgataattttcttatattttcctaaagaaggaagagaagcgcatagaggagaagggaaataattttttaggagcctttcttacggctatgaggaatttggggctcagttgaaaagcctaaactgcctctcgggaggttgggcgcggcgaactactttcagcggcgcacggagacggcgtctacgtgaggggtgataagtgacgcaacactcgttgcataaatttgcgctccgccagcccggagcatttaggggcggttggctttgttgggtgagcttgtttgtgtccctgtgggtggacgtggttggtgattggcaggatcctggtatccgctaacaggtcaaaatgcagatcttcgtgaaaacccttaccggcaagaccatcacccttgaggtggagcccagtgacaccatcgaaaatgtgaaggccaagatccaggataaggaaggcattccccccgaccagcagaggctcatctttgcaggcaagcagctggaagatggccgtactctttctgactacaacatccagaaggagtcgaccctgcacctggtcctgcgtctgagaggtggtatgcagatcttcgtgaagaccctgaccggcaagaccatcaccctggaagtggagcccagtgacaccatcgaaaatgtgaaggccaagatccaggataaagaaggcatccctcccgaccagcagaggctcatctttgcaggcaagcagctggaagatggccgcactctttctgactacaacatccagaaggagtcgaccctgcacctggtcctgcgtctgagaggtggtatgcagatcttcgtgaagaccctgaccggcaagaccatcactctggaggtggagcccagtgacaccatcgaaaatgtgaaggccaagatccaagataaagaaggcatcccccccgaccagcagaggctcatctttgcaggcaagcagctggaagatggccgcactctttctgactacaacatccagaaagagtcgaccctgcacctggtcctgcgcctgaggggtggctgttaattcttcagtcatggcattcgcagtgcccagtgatggcattactctgcactatagccatttgccccaacttaagtttagaaattacaagtttcagtaatagctgaacctgttcaaaatgttaataaaggtttcgttgcatggtagaggggggggtaccgagctcgata

SEQ ID NO: 310786 - DNA, 2050 bp, Homo sapiens
aggaagtttccagagctttcgaggaaggtttcttcaactcaaattcatccgcctgataattttcttatattttcctaaagaaggaagagaagcgcatagaggagaagggaaataattttttaggagcctttcttacggctatgaggaatttggggctcagttgaaaagcctaaactgcctctcgggaggttgggcgcggcgaactactttcagcggcgcacggagacggcgtctacgtgaggggtgataagtgacgcaacactcgttgcataaatttgcgctccgccagcccggagcatttaggggcggttggctttgttgggtgagcttgtttgtgtccctgtgggtggacgtggttggtgattggcaggatcctggtatccgctaacaggtcaaaatgcagatcttcgtgaaaacccttaccggcaagaccatcacccttgaggtggagcccagtgacaccatcgaaaatgtgaaggccaagatccaggataaggaaggcattccccccgaccagcagaggctcatctttgcaggcaagcagctggaagatggccgtactctttctgactacaacatccagaaggagtcgaccctgcacctggtcctgcgtctgagaggtggtatgcagatcttcgtgaagaccctgaccggcaagaccatcaccctggaagtggagcccagtgacaccatcgaaaatgtgaaggccaagatccaggataaagaaggcatccctcccgaccagcagaggctcatctttgcaggcaagcagctggaagatggccgcactctttctgactacaacatccagaaggagtcgaccctgcacctggtcctgcgtctgagaggtggtatgcagatcttcgtgaagaccctgaccggcaagaccatcactctggaggtggagcccagtgacaccatcgaaaatgtgaaggccaagatccaagataaagaaggcatcccccccgaccagcagaggctcatctttgcaggcaagcagctggaagatggccgcactctttctgactacaacatccagaaagagtcgaccctgcacctggtcctgcgcctgaggggtggctgttaattcttcagtcatggcattcgcagtgcccagtgatggcattactctgcactatagccatttgccccaacttaagtttagaaattacaagtttcagtaatagctgaacctgttcaaaatgttaataaaggtttcgttgcatggtacatacttggtgttttgtcatgaaattctctagtgatgtgtgggtacgcttaaaactggtgaaaatgtttagggatttaattttgagattggtaatgtgctcaaagttaagtcacttgactttggtatacacttgggtgggctgaggggcaagagccttctttgctgtttaagtcattacaagttaggatcctgggtaaatggcaaactttctgaagctcgaatttaaagtctgttgggaggccgaggcaggcggatcacgaggtcaagatatggagaccaccctggccaacatggtgaaaccttgtctctactaaaagaaaaaaattagctgggcgtcgtgtcgcctgcctcagtcccccacatagctgggactacaggggcacaccagctaatttttgtattttcagtagagttggggttttaccatgttgaccaagctggtctcaaactcctggcctcaagtgatccgcccaccttgacctctcgaagtgctgggattacaggcatgagccatcacgcccggccacgctgttggttcttaatgacacagcttaactttattgtgaaaagattgcagcaacaaatgagattttacctgtatttgttaaaaatgcttatccttgtctaagactggcaacataagcagttcttaggcttctatgccaatggacactaggcagtaatacatgtgcagtgctaatagaaaatattggagtaagggtgtactaaggaagttctcaatctttccccttcactatcttctgtaatgtaacttcaataaatgtgattctcatcttggcacaaaattgggaatggtgt

SEQ ID NO: 310787 - DNA, 1267 bp, Homo sapiens
aggaagtttccagagctttcgaggaaggtttcttcaactcaaattcatccgcctgataattttcttatattttcctaaagaaggaagagaagcgcatagaggagaagggaaataattttttaggagcctttcttacggctatgaggaatttggggctcagttgaaaagcctaaactgcctctcgggaggttgggcgcggcgaactactttcagcggcgcacggagacggcgtctacgtgaggggtgataagtgacgcaacactcgttgcataaatttgcgctccgccagcccggagcatttaggggcggttggctttgttgggtgagcttgtttgtgtccctgtgggtggacgtggttggtgattggcaggatcctggtatccgctaacaggtcaaaatgcagatcttcgtgaaaacccttaccggcaagaccatcacccttgaggtggagcccagtgacaccatcgaaaatgtgaaggccaagatccaggataaggaaggcattccccccgaccagcagaggctcatctttgcaggcaagcagctggaagatggccgtactctttctgactacaacatccagaaggagtcgaccctgcacctggtcctgcgtctgagaggtggtatgcagatcttcgtgaagaccctgaccggcaagaccatcaccctggaagtggagcccagtgacaccatcgaaaatgtgaaggccaagatccaggataaagaaggcatccctcccgaccagcagaggctcatctttgcaggcaagcagctggaagatggccgcactctttctgactacaacatccagaaggagtcgaccctgcacctggtcctgcgtctgagaggtggtatgcagatcttcgtgaagaccctgaccggcaagaccatcactctggaggtggagcccagtgacaccatcgaaaatgtgaaggccaagatccaagataaagaaggcatcccccccgaccagcagaggctcatctttgcaggcaagcagctggaagatggccgcactctttctgactacaacatccagaaagagtcgaccctgcacctggtcctgcgcctgaggggtggctgttaattcttcagtcatggcattcgcagtgcccagtgatggcattactctgcactatagccatttgccccaacttaagtttagaaattacaagtttcagtaatagctgaacctgttcaaaatgttaataaaggtttcgttgcatggtaaaaaaaaacaaaaaaacaacaacacaaaaaaaaaaaa

SEQ ID NO: 310788 - DNA, 1308 bp, Homo sapiens
  misc_feature (1232)..(1232): n is a, c, g, or t
aggaagtttccagagctttcgaggaaggtttcttcaactcaaattcatccgcctgataattttcttatattttcctaaagaaggaagagaagcgcatagaggagaagggaaataattttttaggagcctttcttacggctatgaggaatttggggctcagttgaaaagcctaaactgcctctcgggaggttgggcgcggcgaactactttcagcggcgcacggagacggcgtctacgtgaggggtgataagtgacgcaacactcgttgcataaatttgcgctccgccagcccggagcatttaggggcggttggctttgttgggtgagcttgtttgtgtccctgtgggtggacgtggttggtgattggcaggatcctggtatccgctaacaggtcaaaatgcagatcttcgtgaaaacccttaccggcaagaccatcacccttgaggtggagcccagtgacaccatcgaaaatgtgaaggccaagatccaggataaggaaggcattccccccgaccagcagaggctcatctttgcaggcaagcagctggaagatggccgtactctttctgactacaacatccagaaggagtcgaccctgcacctggtcctgcgtctgagaggtggtatgcagatcttcgtgaagaccctgaccggcaagaccatcaccctggaagtggagcccagtgacaccatcgaaaatgtgaaggccaagatccaggataaagaaggcatccctcccgaccagcagaggctcatctttgcaggcaagcagctggaagatggccgcactctttctgactacaacatccagaaggagtcgaccctgcacctggtcctgcgtctgagaggtggtatgcagatcttcgtgaagaccctgaccggcaagaccatcactctggaggtggagcccagtgacaccatcgaaaatgtgaaggccaagatccaagataaagaaggcatcccccccgaccagcagaggctcatctttgcaggcaagcagctggaagatggccgcactctttctgactacaacatccagaaagagtcgaccctgcacctggtcctgcgcctgaggggtggctgttaattcttcagtcatggcattcgcagtgcccagtgatggcattactctgcactatagccatttgccccaacttaagtttagaaattacaagtttcagtaatagctgaacctgttcaaaatgttaataaaggtttcgttgcatggtaanaaaaataaaaacaacaacagacaaacacacaacacaaacacaaccacagccggaacaccgcaactacacaaacaaa

SEQ ID NO: 310789 - DNA, 1636 bp, Homo sapiens
aggaagtttccagagctttcgaggaaggtttcttcaactcaaattcatccgcctgataattttcttatattttcctaaagaaggaagagaagcgcatagaggagaagggaaataattttttaggagcctttcttacggctatgaggaatttggggctcagttgaaaagcctaaactgcctctcgggaggttgggcgcggcgaactactttcagcggcgcacggagacggcgtctacgtgaggggtgataagtgacgcaacactcgttgcataaatttgcgctccgccagcccggagcatttaggggcggttggctttgttgggtgagcttgtttgtgtccctgtgggtggacgtggttggtgattggcaggatcctggtatccgctaacaggtcaaaatgcagatcttcgtgaaaacccttaccggcaagaccatcacccttgaggtggagcccagtgacaccatcgaaaatgtgaaggccaagatccaggataaggaaggcattccccccgaccagcagaggctcatctttgcaggcaagcagctggaagatggccgtactctttctgactacaacatccagaaggagtcgaccctgcacctggtcctgcgtctgagaggtggtatgcagatcttcgtgaagaccctgaccggcaagaccatcaccctggaagtggagcccagtgacaccatcgaaaatgtgaaggccaagatccaggataaagaaggcatccctcccgaccagcagaggctcatctttgcaggcaagcagctggaagatggccgcactctttctgactacaacatccagaaggagtcgaccctgcacctggtcctgcgtctgagaggtggtatgcagatcttcgtgaagaccctgaccggcaagaccatcactctggaggtggagcccagtgacaccatcgaaaatgtgaaggccaagatccaagataaagaaggcatcccccccgaccagcagaggctcatctttgcaggcaagcagctggaagatggccgcactctttctgactacaacatccagaaagagtcgaccctgcacctggtcctgcgcctgaggggtggctgttaattcttcagtcatggcattcgcagtgcccagtgatggcattactctgcactatagccatttgccccaacttaagtttagaaattacaagtttcagtaatagctgaacctgttcaaaatgttaataaaggtttcgttgcatggtaaaaaaaaaaacatccccaaaaaaggggggcgcggcaaaaaataccccccggggggcccattcgcgcctacccgttttttgcacaggggccccaaaaggagtcgctataacaaaccaagccggccccgcgtatacccgcgcgcgccggggacaacgccgccggcgacctgggaaggaccacactcgggccggggcaaactggggccaccaccacagaattaagcccgggacaataaactccgggtcaacggtaccacctatgcccgccgacgtgccgggcgatgaattaagagcgcactaaacccacacacgcgcacgcgccagcgacagcacgacacgacgaccacacacacgagcacagagcacaccgcctcagcccccacaacgcgggacgagctcccctgata

SEQ ID NO: 310790 - DNA, 1568 bp, Homo sapiens
aggaagtttccagagctttcgaggaaggtttcttcaactcaaattcatccgcctgataattttcttatattttcctaaagaaggaagagaagcgcatagaggagaagggaaataattttttaggagcctttcttacggctatgaggaatttggggctcagttgaaaagcctaaactgcctctcgggaggttgggcgcggcgaactactttcagcggcgcacggagacggcgtctacgtgaggggtgataagtgacgcaacactcgttgcataaatttgcgctccgccagcccggagcatttaggggcggttggctttgttgggtgagcttgtttgtgtccctgtgggtggacgtggttggtgattggcaggatcctggtatccgctaacaggtcaaaatgcagatcttcgtgaaaacccttaccggcaagaccatcacccttgaggtggagcccagtgacaccatcgaaaatgtgaaggccaagatccaggataaggaaggcattccccccgaccagcagaggctcatctttgcaggcaagcagctggaagatggccgtactctttctgactacaacatccagaaggagtcgaccctgcacctggtcctgcgtctgagaggtggtatgcagatcttcgtgaagaccctgaccggcaagaccatcaccctggaagtggagcccagtgacaccatcgaaaatgtgaaggccaagatccaggataaagaaggcatccctcccgaccagcagaggctcatctttgcaggcaagcagctggaagatggccgcactctttctgactacaacatccagaaggagtcgaccctgcacctggtcctgcgtctgagaggtggtatgcagatcttcgtgaagaccctgaccggcaagaccatcactctggaggtggagcccagtgacaccatcgaaaatgtgaaggccaagatccaagataaagaaggcatcccccccgaccagcagaggctcatctttgcaggcaagcagctggaagatggccgcactctttctgactacaacatccagaaagagtcgaccctgcacctggtcctgcgcctgaggggtggctgttaattcttcagtcatggcattcgcagtgcccagtgatggcattactctgcactatagccatttgccccaacttaagtttagaaattacaagtttcagtaatagctgaacctgttcaaaatgttaataaaggtttcgttgcatggtattaacaaaaaagaaaagaacgaaaagaaaaaaaattggggggggggctgggcgctcgggaaagagggttttaaaacacacattggtgttgggggggggggcccaaagagggacaggtcacgacacgggccaccaaacacggtgacccaaagggagaaccgggggcagagaccaaaaggaccgggaacttctcacgaaggaaaaaaaccccccggggggcacaccgccgacgggttcgaacacacatcgcagaggcggggaccggacgggaaccagagggagacaaacacacgaggagtcagggacgcgcggaataaatgccgacccgggggggggaac

SEQ ID NO: 310791 - DNA, 1290 bp, Homo sapiens
  misc_feature (1243)..(1243): n is a, c, g, or t
  misc_feature (1251)..(1251): n is a, c, g, or t
  misc_feature (1285)..(1285): n is a, c, g, or t
aggaagtttccagagctttcgaggaaggtttcttcaactcaaattcatccgcctgataattttcttatattttcctaaagaaggaagagaagcgcatagaggagaagggaaataattttttaggagcctttcttacggctatgaggaatttggggctcagttgaaaagcctaaactgcctctcgggaggttgggcgcggcgaactactttcagcggcgcacggagacggcgtctacgtgaggggtgataagtgacgcaacactcgttgcataaatttgcgctccgccagcccggagcatttaggggcggttggctttgttgggtgagcttgtttgtgtccctgtgggtggacgtggttggtgattggcaggatcctggtatccgctaacaggtcaaaatgcagatcttcgtgaaaacccttaccggcaagaccatcacccttgaggtggagcccagtgacaccatcgaaaatgtgaaggccaagatccaggataaggaaggcattccccccgaccagcagaggctcatctttgcaggcaagcagctggaagatggccgtactctttctgactacaacatccagaaggagtcgaccctgcacctggtcctgcgtctgagaggtggtatgcagatcttcgtgaagaccctgaccggcaagaccatcaccctggaagtggagcccagtgacaccatcgaaaatgtgaaggccaagatccaggataaagaaggcatccctcccgaccagcagaggctcatctttgcaggcaagcagctggaagatggccgcactctttctgactacaacatccagaaggagtcgaccctgcacctggtcctgcgtctgagaggtggtatgcagatcttcgtgaagaccctgaccggcaagaccatcactctggaggtggagcccagtgacaccatcgaaaatgtgaaggccaagatccaagataaagaaggcatcccccccgaccagcagaggctcatctttgcaggcaagcagctggaagatggccgcactctttctgactacaacatccagaaagagtcgaccctgcacctggtcctgcgcctgaggggtggctgttaattcttcagtcatggcattcgcagtgcccagtgatggcattactctgcactatagccatttgccccaacttaagtttagaaattacaagtttcagtaatagctgaacctgttcaaaatgttaataaaggtttcgttgcatggtaaaaaaaaaaaagngggggagngaaaagcggccgctcgaattgtcgacgcggccgngaatt

SEQ ID NO: 310792 - DNA, 1280 bp, Homo sapiens
aggaagtttccagagctttcgaggaaggtttcttcaactcaaattcatccgcctgataattttcttatattttcctaaagaaggaagagaagcgcatagaggagaagggaaataattttttaggagcctttcttacggctatgaggaatttggggctcagttgaaaagcctaaactgcctctcgggaggttgggcgcggcgaactactttcagcggcgcacggagacggcgtctacgtgaggggtgataagtgacgcaacactcgttgcataaatttgcgctccgccagcccggagcatttaggggcggttggctttgttgggtgagcttgtttgtgtccctgtgggtggacgtggttggtgattggcaggatcctggtatccgctaacaggtcaaaatgcagatcttcgtgaaaacccttaccggcaagaccatcacccttgaggtggagcccagtgacaccatcgaaaatgtgaaggccaagatccaggataaggaaggcattccccccgaccagcagaggctcatctttgcaggcaagcagctggaagatggccgtactctttctgactacaacatccagaaggagtcgaccctgcacctggtcctgcgtctgagaggtggtatgcagatcttcgtgaagaccctgaccggcaagaccatcaccctggaagtggagcccagtgacaccatcgaaaatgtgaaggccaagatccaggataaagaaggcatccctcccgaccagcagaggctcatctttgcaggcaagcagctggaagatggccgcactctttctgactacaacatccagaaggagtcgaccctgcacctggtcctgcgtctgagaggtggtatgcagatcttcgtgaagaccctgaccggcaagaccatcactctggaggtggagcccagtgacaccatcgaaaatgtgaaggccaagatccaagataaagaaggcatcccccccgaccagcagaggctcatctttgcaggcaagcagctggaagatggccgcactctttctgactacaacatccagaaagagtcgaccctgcacctggtcctgcgcctgaggggtggctgttaattcttcagtcatggcattcgcagtgcccagtgatggcattactctgcactatagccatttgcccttatcgagccaactagttgtacgcctctgaactacaagtcaacaatccaattcagcaaggaacaacagtgtcaacagctcattagcgggtggggaccggatttccaaatcaactgtcttgccttatgga

SEQ ID NO: 310793 - DNA, 945 bp, Homo sapiens
gtatcaacgcagagtggccattacggccgggagttgggtgagcttgtttgtgtccctgtgggtggacgtggttggtgattggcaggatcctggtatccgctaacaggtcaaaatgcagatcttcgtgaaaacccttaccggcaagaccatcacccttgaggtggagcccagtgacaccatcgaaaatgtgaaggccaagatccaggataaggaaggcattccccccgaccagcagaggctcatctttgcaggcaagcagctggaagatggccgtactctttctgactacaacatccagaaggagtcgaccctgcacctggtcctgcgtctgagaggtggtatgcagatcttcgtgaagaccctgaccggcaagaccatcaccctggaagtggagcccagtgacaccatcgaaaatgtgaaggccaagatccaggataaagaaggcatccctcccgaccagcagaggctcatctttgcaggcaagcagctggaagatggccgcactctttctgactacaacatccagaaggagtcgaccctgcacctggtcctgcgtctgagaggtggtatgcagatcttcgtgaagaccctgaccggcaagaccatcactctggaggtggagcccagtgacaccatcgaaaatgtgaaggccaagatccaagataaagaaggcatcccccccgaccagcagaggctcatctttgcaggcaagcagctggaagatggccgcactctttctgactacaacatccagaaagagtcgaccctgcacctggtcctgcgcctgaggggtggctgttaattcttcagtcatggcattcgcagtgcccagtgatggcattactctgcactatagccatttgccccaacttaagtttagaaattacaagtttcagtaatagctgaacctgttcaaaatgttaataaaggtttcgttgcatggta

SEQ ID NO: 310794 - DNA, 947 bp, Homo sapiens
aaaacctgctatagagctgggttaatcggccgaggttgggtgagcttgtttgtgtccctgtgggtggacgtggttggtgattggcaggatcctggtatccgctaacaggtcaaaatgcagatcttcgtgaaaacccttaccggcaagaccatcacccttgaggtggagcccagtgacaccatcgaaaatgtgaaggccaagatccaggataaggaaggcattccccccgaccagcagaggctcatctttgcaggcaagcagctggaagatggccgtactctttctgactacaacatccagaaggagtcgaccctgcacctggtcctgcgtctgagaggtggtatgcagatcttcgtgaagaccctgaccggcaagaccatcaccctggaagtggagcccagtgacaccatcgaaaatgtgaaggccaagatccaggataaagaaggcatccctcccgaccagcagaggctcatctttgcaggcaagcagctggaagatggccgcactctttctgactacaacatccagaaggagtcgaccctgcacctggtcctgcgtctgagaggtggtatgcagatcttcgtgaagaccctgaccggcaagaccatcactctggaggtggagcccagtgacaccatcgaaaatgtgaaggccaagatccaagataaagaaggcatcccccccgaccagcagaggctcatctttgcaggcaagcagctggaagatggccgcactctttctgactacaacatccagaaagagtcgaccctgcacctggtcctgcgcctgaggggtggctgttaattcttcagtcatggcattcgcagtgcccagtgatggcattactctgcactatagccatttgccccaacttaagtttagaaattacaagtttcagtaatagctgaacctgttcaaaatgttaataaaggtttcgttgcatggta

SEQ ID NO: 310795 - DNA, 958 bp, Homo sapiens
  misc_feature (8)..(8): n is a, c, g, or t
gaaaaatnaataggctaggtacgaggcgggtgtgaatcggccgaggttgggtgagcttgtttgtgtccctgtgggtggacgtggttggtgattggcaggatcctggtatccgctaacaggtcaaaatgcagatcttcgtgaaaacccttaccggcaagaccatcacccttgaggtggagcccagtgacaccatcgaaaatgtgaaggccaagatccaggataaggaaggcattccccccgaccagcagaggctcatctttgcaggcaagcagctggaagatggccgtactctttctgactacaacatccagaaggagtcgaccctgcacctggtcctgcgtctgagaggtggtatgcagatcttcgtgaagaccctgaccggcaagaccatcaccctggaagtggagcccagtgacaccatcgaaaatgtgaaggccaagatccaggataaagaaggcatccctcccgaccagcagaggctcatctttgcaggcaagcagctggaagatggccgcactctttctgactacaacatccagaaggagtcgaccctgcacctggtcctgcgtctgagaggtggtatgcagatcttcgtgaagaccctgaccggcaagaccatcactctggaggtggagcccagtgacaccatcgaaaatgtgaaggccaagatccaagataaagaaggcatcccccccgaccagcagaggctcatctttgcaggcaagcagctggaagatggccgcactctttctgactacaacatccagaaagagtcgaccctgcacctggtcctgcgcctgaggggtggctgttaattcttcagtcatggcattcgcagtgcccagtgatggcattactctgcactatagccatttgccccaacttaagtttagaaattacaagtttcagtaatagctgaacctgttcaaaatgttaataaaggtttcgttgcatggta

SEQ ID NO: 310796 - DNA, 1084 bp, Homo sapiens
  misc_feature (49)..(49): n is a, c, g, or t
ttcttttggttgtcgtgctgagtctatgatcttttcgaggtcatagcantaggaaccgtaatgactgaagatgagtattgcagggattcaccttagtcctgtgttctttcttgagtaaccgtggtccgtagggtcattaccctgaatggccccaatttgggctcccttcaagttgggtgagcttgtttgtgtccctgtgggtggacgtggttggtgattggcaggatcctggtatccgctaacaggtcaaaatgcagatcttcgtgaaaacccttaccggcaagaccatcacccttgaggtggagcccagtgacaccatcgaaaatgtgaaggccaagatccaggataaggaaggcattccccccgaccagcagaggctcatctttgcaggcaagcagctggaagatggccgtactctttctgactacaacatccagaaggagtcgaccctgcacctggtcctgcgtctgagaggtggtatgcagatcttcgtgaagaccctgaccggcaagaccatcaccctggaagtggagcccagtgacaccatcgaaaatgtgaaggccaagatccaggataaagaaggcatccctcccgaccagcagaggctcatctttgcaggcaagcagctggaagatggccgcactctttctgactacaacatccagaaggagtcgaccctgcacctggtcctgcgtctgagaggtggtatgcagatcttcgtgaagaccctgaccggcaagaccatcactctggaggtggagcccagtgacaccatcgaaaatgtgaaggccaagatccaagataaagaaggcatcccccccgaccagcagaggctcatctttgcaggcaagcagctggaagatggccgcactctttctgactacaacatccagaaagagtcgaccctgcacctggtcctgcgcctgaggggtggctgttaattcttcagtcatggcattcgcagtgcccagtgatggcattactctgcactatagccatttgccccaacttaagtttagaaattacaagtttcagtaatagctgaacctgttcaaaatgttaataaaggtttcgttgcatggta

SEQ ID NO: 310797 - DNA, 986 bp, Homo sapiens
  misc_feature (6)..(6): n is a, c, g, or t
  misc_feature (30)..(30): n is a, c, g, or t
  misc_feature (67)..(67): n is a, c, g, or t
gtgcangaaacctttattaacattttgaanaggttcagctattactgaaacttgtaatttctaaacntaagttgttgggtgagcttgtttgtgtccctgtgggtggacgtggttggtgattggcaggatcctggtatccgctaacaggtcaaaatgcagatcttcgtgaaaacccttaccggcaagaccatcacccttgaggtggagcccagtgacaccatcgaaaatgtgaaggccaagatccaggataaggaaggcattccccccgaccagcagaggctcatctttgcaggcaagcagctggaagatggccgtactctttctgactacaacatccagaaggagtcgaccctgcacctggtcctgcgtctgagaggtggtatgcagatcttcgtgaagaccctgaccggcaagaccatcaccctggaagtggagcccagtgacaccatcgaaaatgtgaaggccaagatccaggataaagaaggcatccctcccgaccagcagaggctcatctttgcaggcaagcagctggaagatggccgcactctttctgactacaacatccagaaggagtcgaccctgcacctggtcctgcgtctgagaggtggtatgcagatcttcgtgaagaccctgaccggcaagaccatcactctggaggtggagcccagtgacaccatcgaaaatgtgaaggccaagatccaagataaagaaggcatcccccccgaccagcagaggctcatctttgcaggcaagcagctggaagatggccgcactctttctgactacaacatccagaaagagtcgaccctgcacctggtcctgcgcctgaggggtggctgttaattcttcagtcatggcattcgcagtgcccagtgatggcattactctgcactatagccatttgccccaacttaagtttagaaattacaagtttcagtaatagctgaacctgttcaaaatgttaataaaggtttcgttgcatggta

SEQ ID NO: 310798 - DNA, 964 bp, Homo sapiens
gccacaagccaaccaaaaaaacaaatatacggctaggtacgaggactgggtgttgggtgagcttgtttgtgtccctgtgggtggacgtggttggtgattggcaggatcctggtatccgctaacaggtcaaaatgcagatcttcgtgaaaacccttaccggcaagaccatcacccttgaggtggagcccagtgacaccatcgaaaatgtgaaggccaagatccaggataaggaaggcattccccccgaccagcagaggctcatctttgcaggcaagcagctggaagatggccgtactctttctgactacaacatccagaaggagtcgaccctgcacctggtcctgcgtctgagaggtggtatgcagatcttcgtgaagaccctgaccggcaagaccatcaccctggaagtggagcccagtgacaccatcgaaaatgtgaaggccaagatccaggataaagaaggcatccctcccgaccagcagaggctcatctttgcaggcaagcagctggaagatggccgcactctttctgactacaacatccagaaggagtcgaccctgcacctggtcctgcgtctgagaggtggtatgcagatcttcgtgaagaccctgaccggcaagaccatcactctggaggtggagcccagtgacaccatcgaaaatgtgaaggccaagatccaagataaagaaggcatcccccccgaccagcagaggctcatctttgcaggcaagcagctggaagatggccgcactctttctgactacaacatccagaaagagtcgaccctgcacctggtcctgcgcctgaggggtggctgttaattcttcagtcatggcattcgcagtgcccagtgatggcattactctgcactatagccatttgccccaacttaagtttagaaattacaagtttcagtaatagctgaacctgttcaaaatgttaataaaggtttcgttgcatggta

SEQ ID NO: 310799 - DNA, 936 bp, Homo sapiens
actctagagatcccttggctcatcttgggtgagcttgtttgtgtccctgtgggtggacgtggttggtgattggcaggatcctggtatccgctaacaggtcaaaatgcagatcttcgtgaaaacccttaccggcaagaccatcacccttgaggtggagcccagtgacaccatcgaaaatgtgaaggccaagatccaggataaggaaggcattccccccgaccagcagaggctcatctttgcaggcaagcagctggaagatggccgtactctttctgactacaacatccagaaggagtcgaccctgcacctggtcctgcgtctgagaggtggtatgcagatcttcgtgaagaccctgaccggcaagaccatcaccctggaagtggagcccagtgacaccatcgaaaatgtgaaggccaagatccaggataaagaaggcatccctcccgaccagcagaggctcatctttgcaggcaagcagctggaagatggccgcactctttctgactacaacatccagaaggagtcgaccctgcacctggtcctgcgtctgagaggtggtatgcagatcttcgtgaagaccctgaccggcaagaccatcactctggaggtggagcccagtgacaccatcgaaaatgtgaaggccaagatccaagataaagaaggcatcccccccgaccagcagaggctcatctttgcaggcaagcagctggaagatggccgcactctttctgactacaacatccagaaagagtcgaccctgcacctggtcctgcgcctgaggggtggctgttaattcttcagtcatggcattcgcagtgcccagtgatggcattactctgcactatagccatttgccccaacttaagtttagaaattacaagtttcagtaatagctgaacctgttcaaaatgttaataaaggtttcgttgcatggta

SEQ ID NO: 310800 - DNA, 971 bp, Homo sapiens
  misc_feature (4)..(4): n is a, c, g, or t
  misc_feature (17)..(17): n is a, c, g, or t
  misc_feature (21)..(21): n is a, c, g, or t
  misc_feature (32)..(32): n is a, c, g, or t
ccgnggtggcggccganctanaactagtggtnccccggcctgcaggaattcggcacgacttgggtgagcttgtttgtgtccctgtgggtggacgtggttggtgattggcaggatcctggtatccgctaacaggtcaaaatgcagatcttcgtgaaaacccttaccggcaagaccatcacccttgaggtggagcccagtgacaccatcgaaaatgtgaaggccaagatccaggataaggaaggcattccccccgaccagcagaggctcatctttgcaggcaagcagctggaagatggccgtactctttctgactacaacatccagaaggagtcgaccctgcacctggtcctgcgtctgagaggtggtatgcagatcttcgtgaagaccctgaccggcaagaccatcaccctggaagtggagcccagtgacaccatcgaaaatgtgaaggccaagatccaggataaagaaggcatccctcccgaccagcagaggctcatctttgcaggcaagcagctggaagatggccgcactctttctgactacaacatccagaaggagtcgaccctgcacctggtcctgcgtctgagaggtggtatgcagatcttcgtgaagaccctgaccggcaagaccatcactctggaggtggagcccagtgacaccatcgaaaatgtgaaggccaagatccaagataaagaaggcatcccccccgaccagcagaggctcatctttgcaggcaagcagctggaagatggccgcactctttctgactacaacatccagaaagagtcgaccctgcacctggtcctgcgcctgaggggtggctgttaattcttcagtcatggcattcgcagtgcccagtgatggcattactctgcactatagccatttgccccaacttaagtttagaaattacaagtttcagtaatagctgaacctgttcaaaatgttaataaaggtttcgttgcatggta

SEQ ID NO: 310801 - DNA, 944 bp, Homo sapiens
catagagaaaatagtaattgagctgtagggggttgggtgagcttgtttgtgtccctgtgggtggacgtggttggtgattggcaggatcctggtatccgctaacaggtcaaaatgcagatcttcgtgaaaacccttaccggcaagaccatcacccttgaggtggagcccagtgacaccatcgaaaatgtgaaggccaagatccaggataaggaaggcattccccccgaccagcagaggctcatctttgcaggcaagcagctggaagatggccgtactctttctgactacaacatccagaaggagtcgaccctgcacctggtcctgcgtctgagaggtggtatgcagatcttcgtgaagaccctgaccggcaagaccatcaccctggaagtggagcccagtgacaccatcgaaaatgtgaaggccaagatccaggataaagaaggcatccctcccgaccagcagaggctcatctttgcaggcaagcagctggaagatggccgcactctttctgactacaacatccagaaggagtcgaccctgcacctggtcctgcgtctgagaggtggtatgcagatcttcgtgaagaccctgaccggcaagaccatcactctggaggtggagcccagtgacaccatcgaaaatgtgaaggccaagatccaagataaagaaggcatcccccccgaccagcagaggctcatctttgcaggcaagcagctggaagatggccgcactctttctgactacaacatccagaaagagtcgaccctgcacctggtcctgcgcctgaggggtggctgttaattcttcagtcatggcattcgcagtgcccagtgatggcattactctgcactatagccatttgccccaacttaagtttagaaattacaagtttcagtaatagctgaacctgttcaaaatgttaataaaggtttcgttgcatggta

SEQ ID NO: 310802 - DNA, 1161 bp, Homo sapiens
aggaagtttccagagctttcgaggaaggtttcttcaactcaaattcatccgcctgataattttcttatattttcctaaagaaggaagagaagcgcatagaggagaagggaaataattttttaggagcctttcttacggctatgaggaatttggggctcagttgaaaagcctaaactgcctctcgggaggttgggcgcggcgaactactttcagcggcgcacggagacggcgtctacgtgaggggtgataagtgacgcaacactcgttgcataaatttgcgctccgccagcccggagcatttaggggcggttggctttgttgggtgagcttgtttgtgtccctgtgggtggacgtggttggtgattggcaggatcctggtatccgctaacaggtcaaaatgcagatcttcgtgaaaacccttaccggcaagaccatcacccttgaggtggagcccagtgacaccatcgaaaatgtgaaggccaagatccaggataaggaaggcattccccccgaccagcagaggctcatctttgcaggcaagcagctggaagatggccgtactctttctgactacaacatccagaaggagtcgaccctgcacctggtcctgcgtctgagaggtggtatgcagatcttcgtgaagaccctgaccggcaagaccatcaccctggaagtggagcccagtgacaccatcgaaaatgtgaaggccaagatccaggataaagaaggcatccctcccgaccagcagaggctcatctttgcaggcaagcagctggaagatggccgcactctttctgactacaacatccagaaggagtcgaccctgcacctggtcctgcgtctgagaggtggtatgcagatcttcgtgaagaccctgaccggcaagaccatcactctggaggtggagcccagtgacaccatcgaaaatgtgaaggccaagatccaagataaagaaggcatcccccccgaccagcagaggctcatctttgcaggcaagcagctgaggggtggctgttaattcttcagtcatggcattcgcagtgcccagtgatggcattactctgcactatagccatttgccccaacttaagtttagaaattacaagtttcagtaatagctgaacctgttcaaaatgttaataaaggtttcgttgcatggta

SEQ ID NO: 310803 - DNA, 1446 bp, Homo sapiens
aggaagtttccagagctttcgaggaaggtttcttcaactcaaattcatccgcctgataattttcttatattttcctaaagaaggaagagaagcgcatagaggagaagggaaataattttttaggagcctttcttacggctatgaggaatttggggctcagttgaaaagcctaaactgcctctcgggaggttgggcgcggcgaactactttcagcggcgcacggagacggcgtctacgtgaggggtgataagtgacgcaacactcgttgcataaatttgcgctccgccagcccggagcatttaggggcggttggctttgttgggtgagcttgtttgtgtccctgtgggtggacgtggttggtgattggcaggatcctggtatccgctaacaggtcaaaatgcagatcttcgtgaaaacccttaccggcaagaccatcacccttgaggtggagcccagtgacaccatcgaaaatgtgaaggccaagatccaggataaggaaggcattccccccgaccagcagaggctcatctttgcaggcaagcagctggaagatggccgtactctttctgactacaacatccagaaggagtcgaccctgcacctggtcctgcgtctgagaggtggtatgcagatcttcgtgaagaccctgaccggcaagaccatcaccctggaagtggagcccagtgacaccatcgaaaatgtgaaggccaagatccaggataaagaaggcatccctcccgaccagcagaggctcatctttgcaggcaagcagctggaagatggccgcactctttctgactacaacatccagaaggagtcgaccctgcacctggtcctgcgtctgagaggtggtatgcagatcttcgtgaagaccctgaccggcaagaccatcactctggaggtggagcccagtgacaccatcgaaaatgtgaaggccaagatccaagataaagaaggcatcccccccgaccagcagagggcttcatttcttttggccaagggcaaaggccaggcttggggaaaagaattggggccggaaactcctttttccttggaacttaaacaaaacattcccaagaaaaggaagttccgaacccttggaaccttgggttccttggccggcccttggaaggggttgggctggtttaattccttccagtcccattgtgccaatttccggaaaggtggccccccaggatggaacttggtgcatttaaaccttctctgtgcaacctatatttagcgcccaatgtatggggcccccacaagacctgtaaaaaggagtcttacaggagaacacacttagcccacagggtttttcaacagggtataagtctaggcctgtgacgccccccgggtatcacaagccacattgggtctaacctctaagacacggcgctaccacgggtgatggggagatgggggtatacacaacaacgacgacaa

SEQ ID NO: 310804 - DNA, 913 bp, Homo sapiens
  misc_feature (62)..(62): n is a, c, g, or t
tcggcacgagggtgtccccatgagcctgtacgtcgtgaggtcgagtcggaccggtgcctggnatccgctaacaggtcaaaatgcagatcttcgtgaaaacccttaccggcaagaccatcacccttgaggtggagcccagtgacaccatcgaaaatgtgaaggccaagatccaggataaggaaggcattccccccgaccagcagaggctcatctttgcaggcaagcagctggaagatggccgtactctttctgactacaacatccagaaggagtcgaccctgcacctggtcctgcgtctgagaggtggtatgcagatcttcgtgaagaccctgaccggcaagaccatcaccctggaagtggagcccagtgacaccatcgaaaatgtgaaggccaagatccaggataaagaaggcatccctcccgaccagcagaggctcatctttgcaggcaagcagctggaagatggccgcactctttctgactacaacatccagaaggagtcgaccctgcacctggtcctgcgtctgagaggtggtatgcagatcttcgtgaagaccctgaccggcaagaccatcactctggaggtggagcccagtgacaccatcgaaaatgtgaaggccaagatccaagataaagaaggcatcccccccgaccagcagaggctcatctttgcaggcaagcagctggaagatggccgcactctttctgactacaacatccagaaagagtcgaccctgcacctggtcctgcgcctgaggggtggctgttaattcttcagtcatggcattcgcagtgcccagtgatggcattactctgcactatagccatttgccccaacttaagtttagaaattacaagtttcagtaatagctgaacctgttcaaaatgttaataaaggtttcgttgcatggta

SEQ ID NO: 310805 - DNA, 864 bp, Homo sapiens
agcgggagtttccagagctttcgaggtcaaaatgcagatcttcgtgaaaacccttaccggcaagaccatcacccttgaggtggagcccagtgacaccatcgaaaatgtgaaggccaagatccaggataaggaaggcattccccccgaccagcagaggctcatctttgcaggcaagcagctggaagatggccgtactctttctgactacaacatccagaaggagtcgaccctgcacctggtcctgcgtctgagaggtggtatgcagatcttcgtgaagaccctgaccggcaagaccatcaccctggaagtggagcccagtgacaccatcgaaaatgtgaaggccaagatccaggataaagaaggcatccctcccgaccagcagaggctcatctttgcaggcaagcagctggaagatggccgcactctttctgactacaacatccagaaggagtcgaccctgcacctggtcctgcgtctgagaggtggtatgcagatcttcgtgaagaccctgaccggcaagaccatcactctggaggtggagcccagtgacaccatcgaaaatgtgaaggccaagatccaagataaagaaggcatcccccccgaccagcagaggctcatctttgcaggcaagcagctggaagatggccgcactctttctgactacaacatccagaaagagtcgaccctgcacctggtcctgcgcctgaggggtggctgttaattcttcagtcatggcattcgcagtgcccagtgatggcattactctgcactatagccatttgccccaacttaagtttagaaattacaagtttcagtaatagctgaacctgttcaaaatgttaataaaggtttcgttgcatggta

SEQ ID NO: 310806 - DNA, 865 bp, Homo sapiens
ggacgcgtgggtcgacccacgcgtccgtcaaaatgcagatcttcgtgaaaacccttaccggcaagaccatcacccttgaggtggagcccagtgacaccatcgaaaatgtgaaggccaagatccaggataaggaaggcattccccccgaccagcagaggctcatctttgcaggcaagcagctggaagatggccgtactctttctgactacaacatccagaaggagtcgaccctgcacctggtcctgcgtctgagaggtggtatgcagatcttcgtgaagaccctgaccggcaagaccatcaccctggaagtggagcccagtgacaccatcgaaaatgtgaaggccaagatccaggataaagaaggcatccctcccgaccagcagaggctcatctttgcaggcaagcagctggaagatggccgcactctttctgactacaacatccagaaggagtcgaccctgcacctggtcctgcgtctgagaggtggtatgcagatcttcgtgaagaccctgaccggcaagaccatcactctggaggtggagcccagtgacaccatcgaaaatgtgaaggccaagatccaagataaagaaggcatcccccccgaccagcagaggctcatctttgcaggcaagcagctggaagatggccgcactctttctgactacaacatccagaaagagtcgaccctgcacctggtcctgcgcctgaggggtggctgttaattcttcagtcatggcattcgcagtgcccagtgatggcattactctgcactatagccatttgccccaacttaagtttagaaattacaagtttcagtaatagctgaacctgttcaaaatgttaataaaggtttcgttgcatggta

SEQ ID NO: 310807 - DNA, 884 bp, Homo sapiens
atagttgactcctagaggatcccccgctttatcataggaggtggtgtcaaaatgcagatcttcgtgaaaacccttaccggcaagaccatcacccttgaggtggagcccagtgacaccatcgaaaatgtgaaggccaagatccaggataaggaaggcattccccccgaccagcagaggctcatctttgcaggcaagcagctggaagatggccgtactctttctgactacaacatccagaaggagtcgaccctgcacctggtcctgcgtctgagaggtggtatgcagatcttcgtgaagaccctgaccggcaagaccatcaccctggaagtggagcccagtgacaccatcgaaaatgtgaaggccaagatccaggataaagaaggcatccctcccgaccagcagaggctcatctttgcaggcaagcagctggaagatggccgcactctttctgactacaacatccagaaggagtcgaccctgcacctggtcctgcgtctgagaggtggtatgcagatcttcgtgaagaccctgaccggcaagaccatcactctggaggtggagcccagtgacaccatcgaaaatgtgaaggccaagatccaagataaagaaggcatcccccccgaccagcagaggctcatctttgcaggcaagcagctggaagatggccgcactctttctgactacaacatccagaaagagtcgaccctgcacctggtcctgcgcctgaggggtggctgttaattcttcagtcatggcattcgcagtgcccagtgatggcattactctgcactatagccatttgccccaacttaagtttagaaattacaagtttcagtaatagctgaacctgttcaaaatgttaataaaggtttcgttgcatggta

SEQ ID NO: 310808 - DNA, 938 bp, Homo sapiens
  misc_feature (10)..(10): n is a, c, g, or t
  misc_feature (57)..(57): n is a, c, g, or t
gcccgcgacncgccgcgtcgatacgggcgaaaaagacgacagaaggggtcctgtggntggaactggggtgattggcaggatcctggtatccgctaacaggtcaaaatgcagatcttcgtgaaaacccttaccggcaagaccatcacccttgaggtggagcccagtgacaccatcgaaaatgtgaaggccaagatccaggataaggaaggcattccccccgaccagcagaggctcatctttgcaggcaagcagctggaagatggccgtactctttctgactacaacatccagaaggagtcgaccctgcacctggtcctgcgtctgagaggtggtatgcagatcttcgtgaagaccctgaccggcaagaccatcaccctggaagtggagcccagtgacaccatcgaaaatgtgaaggccaagatccaggataaagaaggcatccctcccgaccagcagaggctcatctttgcaggcaagcagctggaagatggccgcactctttctgactacaacatccagaaggagtcgaccctgcacctggtcctgcgtctgagaggtggtatgcagatcttcgtgaagaccctgaccggcaagaccatcactctggaggtggagcccagtgacaccatcgaaaatgtgaaggccaagatccaagataaagaaggcatcccccccgaccagcagaggctcatctttgcaggcaagcagctggaagatggccgcactctttctgactacaacatccagaaagagtcgaccctgcacctggtcctgcgcctgaggggtggctgttaattcttcagtcatggcattcgcagtgcccagtgatggcattactctgcactatagccatttgccccaacttaagtttagaaattacaagtttcagtaatagctgaacctgttcaaaatgttaataaaggtttcgttgcatggta

SEQ ID NO: 310809 - DNA, 905 bp, Homo sapiens
tggggcctcatatttgcggagggtgtacgggggctccacctcaaggatcctggtatccgctaacaggtcaaaatgcagatcttcgtgaaaacccttaccggcaagaccatcacccttgaggtggagcccagtgacaccatcgaaaatgtgaaggccaagatccaggataaggaaggcattccccccgaccagcagaggctcatctttgcaggcaagcagctggaagatggccgtactctttctgactacaacatccagaaggagtcgaccctgcacctggtcctgcgtctgagaggtggtatgcagatcttcgtgaagaccctgaccggcaagaccatcaccctggaagtggagcccagtgacaccatcgaaaatgtgaaggccaagatccaggataaagaaggcatccctcccgaccagcagaggctcatctttgcaggcaagcagctggaagatggccgcactctttctgactacaacatccagaaggagtcgaccctgcacctggtcctgcgtctgagaggtggtatgcagatcttcgtgaagaccctgaccggcaagaccatcactctggaggtggagcccagtgacaccatcgaaaatgtgaaggccaagatccaagataaagaaggcatcccccccgaccagcagaggctcatctttgcaggcaagcagctggaagatggccgcactctttctgactacaacatccagaaagagtcgaccctgcacctggtcctgcgcctgaggggtggctgttaattcttcagtcatggcattcgcagtgcccagtgatggcattactctgcactatagccatttgccccaacttaagtttagaaattacaagtttcagtaatagctgaacctgttcaaaatgttaataaaggtttcgttgcatggta

SEQ ID NO: 310810 - DNA, 1453 bp, Homo sapiens
gcgtgggggaggggagggcgaggtgacgcggcgctgggcctttccgggacagtgggccttgttgacctgaggggggcgagggcggttggcgcgcgcgcgcgttgacggaaactaacggacgcctaaccgatcggcgattctgtcgagtttacttcgcggggaaggcggaaaagaggtagtttgtgtggtttctggaagcctttactttggaatcccagtgtgagaaaggtgccccttcttgtgtttcaatgggatttttatttcgcgagtcttgtgggtttggttttgttttcagtttgcctaacaccgtgcttaggtttgaggcagattggagttcggtcgggggagtttgaatatccggaacagttagtggggaaagctgtggacgcttggtaagagagcgctctggattttccgctgttgacgttgaaaccttgaatgacgaatttcgtattaagtgacttagccttgtaaaattgaggggaggcttgcggaatattaacgtatttaaggcattttgaaggaatagttgctaattttgaagaatattaggtgtaaaagcaagaaatacaatgatcctgaggtgacacgcttatgttttacttttaaactaggtcaaaatgcagatcttcgtgaaaacccttaccggcaagaccatcacccttgaggtggagcccagtgacaccatcgaaaatgtgaaggccaagatccaggataaggaaggcattccccccgaccagcagaggctcatctttgcaggcaagcagctggaagatggccgtactctttctgactacaacatccagaaggagtcgaccctgcacctggtcctgcgtctgagaggtggtatgcagatcttcgtgaagaccctgaccggcaagaccatcaccctggaagtggagcccagtgacaccatcgaaaatgtgaaggccaagatccaggataaagaaggcatccctcccgaccagcagaggctcatctttgcaggcaagcagctggaagatggccgcactctttctgactacaacatccagaaggagtcgaccctgcacctggtcctgcgtctgagaggtggtatgcagatcttcgtgaagaccctgaccggcaagaccatcactctggaggtggagcccagtgacaccatcgaaaatgtgaaggccaagatccaagataaagaaggcatcccccccgaccagcagaggctcatctttgcaggcaagcagctggaagatggccgcactctttctgactacaacatccagaaagagtcgaccctgcacctggtcctgcgcctgaggggtggctgttaattcttcagtcatggcattcgcagtgcccagtgatggcattactctgcactatagccatttgccccaacttaagtttagaaattacaagtttcagtaatagctgaacctgttcaaaatgttaataaaggtttcgttgcatggta

SEQ ID NO: 310811 - DNA, 824 bp, Homo sapiens
ggcgttcagaggtcccgggttgacttcgggcaccttgaggtggagcccagtgacaccatcgaaaatgtgaaggccaagatccaggataaggaaggcattccccccgaccagcagaggctcatctttgcaggcaagcagctggaagatggccgtactctttctgactacaacatccagaaggagtcgaccctgcacctggtcctgcgtctgagaggtggtatgcagatcttcgtgaagaccctgaccggcaagaccatcaccctggaagtggagcccagtgacaccatcgaaaatgtgaaggccaagatccaggataaagaaggcatccctcccgaccagcagaggctcatctttgcaggcaagcagctggaagatggccgcactctttctgactacaacatccagaaggagtcgaccctgcacctggtcctgcgtctgagaggtggtatgcagatcttcgtgaagaccctgaccggcaagaccatcactctggaggtggagcccagtgacaccatcgaaaatgtgaaggccaagatccaagataaagaaggcatcccccccgaccagcagaggctcatctttgcaggcaagcagctggaagatggccgcactctttctgactacaacatccagaaagagtcgaccctgcacctggtcctgcgcctgaggggtggctgttaattcttcagtcatggcattcgcagtgcccagtgatggcattactctgcactatagccatttgccccaacttaagtttagaaattacaagtttcagtaatagctgaacctgttcaaaatgttaataaaggtttcgttgcatggta

SEQ ID NO: 310812 - DNA, 1203 bp, Homo sapiens
aggaagtttccagagctttcgaggaaggtttcttcaactcaaattcatccgcctgataattttcttatattttcctaaagaaggaagagaagcgcatagaggagaagggaaataattttttaggagcctttcttacggctatgaggaatttggggctcagttgaaaagcctaaactgcctctcgggaggttgggcgcggcgaactactttcagcggcgcacggagacggcgtctacgtgaggggtgataagtgacgcaacactcgttgcataaatttgcgctccgccagcccggagcatttaggggcggttggctttgttgggtgagcttgtttgtgtccctgtgggtggacgtggttggtgattggcaggatcctggtatccgctaacaggtcaaaatgcagatcttcgtgaaaacccttaccggcaagaccatcacccttgaggtggagcccagtgacaccatcgaaaatgtgaaggccaagatccaggataaggaaggcattccccccgaccagcagaggctcatctttgcaggcaagcagctggaagatggccgtactctttctgactacaacatccagaaggagtcgaccctgcacctggtcctgcgtctgagaggtggtatgcagatcttcgtgaagaccctgaccggcaagaccatcaccctggaagtggagcccagtgacaccatcgaaaatgtgaaggccaagatccaggataaagaaggcatccctcccgaccagcagaggctcatctttgcaggcaagcagctggaagatggccgcactctttctgactacaacatccagaaggagtcgaccctgcacctggtcctgcgtctgagaggtggtatgcagatcttcgtgaagaccctgaccggcaagaccatcactctggaggtggagcccagtgacaccatcgaaaatgtgaaggccaagatccaagataggctcatctttgcaggcaagcagctggaagatggccgcactctttctgactacaacatccagaaagagtcgaccctgcacctggtcctgcgcctgaggggtggctgttaattcttcagtcatggcattcgcagtgcccagtgatggcattactctgcactatagccatttgccccaacttaagtttagaaattacaagtttcagtaatagctgaacctgttcaaaatgttaataaaggtttcgttgcatggta

SEQ ID NO: 310813 - DNA, 1206 bp, Homo sapiens
  misc_feature (954)..(954): n is a, c, g, or t
aggaagtttccagagctttcgaggaaggtttcttcaactcaaattcatccgcctgataattttcttatattttcctaaagaaggaagagaagcgcatagaggagaagggaaataattttttaggagcctttcttacggctatgaggaatttggggctcagttgaaaagcctaaactgcctctcgggaggttgggcgcggcgaactactttcagcggcgcacggagacggcgtctacgtgaggggtgataagtgacgcaacactcgttgcataaatttgcgctccgccagcccggagcatttaggggcggttggctttgttgggtgagcttgtttgtgtccctgtgggtggacgtggttggtgattggcaggatcctggtatccgctaacaggtcaaaatgcagatcttcgtgaaaacccttaccggcaagaccatcacccttgaggtggagcccagtgacaccatcgaaaatgtgaaggccaagatccaggataaggaaggcattccccccgaccagcagaggctcatctttgcaggcaagcagctggaagatggccgtactctttctgactacaacatccagaaggagtcgaccctgcacctggtcctgcgtctgagaggtggtatgcagatcttcgtgaagaccctgaccggcaagaccatcaccctggaagtggagcccagtgacaccatcgaaaatgtgaaggccaagatccaggataaagaaggcatccctcccgaccagcagaggctcatctttgcaggcaagcagctggaagatggccgcactctttctgactacaacatccagaaggagtcgaccctgcacctggtcctgcgtctgagaggtggtatgcagatcttcgtgaagaccctgaccggcaagaccatcactctggaggtggagcccagtgacaccatcgaaaatgtgaaggccaagatccaagatgagtncgcacaccagatatccagacagaagggcttcactcctcggcgcggggcagagccaaggtggggaaaatgcgccggcacctccttttcttggagctacgaacattccagggaaaggagttcgaaccctggaagcttggatccctgcgccctgaaaggggtcgggctgttcaatgccttcaggcatgggccatccgcagtgccccgtgataggccttatctgtggacgatagccattggccgacaactaagtta

SEQ ID NO: 310814 - DNA, 1097 bp, Homo sapiens
aggaagtttccagagctttcgaggaaggtttcttcaactcaaattcatccgcctgataattttcttatattttcctaaagaaggaagagaagcgcatagaggagaagggaaataattttttaggagcctttcttacggctatgaggaatttggggctcagttgaaaagcctaaactgcctctcgggaggttgggcgcggcgaactactttcagcggcgcacggagacggcgtctacgtgaggggtgataagtgacgcaacactcgttgcataaatttgcgctccgccagcccggagcatttaggggcggttggctttgttgggtgagcttgtttgtgtccctgtgggtggacgtggttggtgattggcaggatcctggtatccgctaacaggtcaaaatgcagatcttcgtgaaaacccttaccggcaagaccatcacccttgaggtggagcccagtgacaccatcgaaaatgtgaaggccaagatccaggataaggaaggcattccccccgaccagcagaggctcatctttgcaggcaagcagctggaagatggccgtactctttctgactacaacatccagaaggagtcgaccctgcacctggtcctgcgtctgagaggtggtatgcagatcttcgtgaagaccctgaccggcaagaccatcaccctggaagtggagcccagtgacaccatcgaaaatgtgaaggccaagatccaggataaagaaggcatccctcccgaccagcagaggctcatctttgcaggcaagcagctggaagatggccgcactctttctgactacaacatccagaaggagtcgaccctgcacctggtcctgcgtctgagaggtggtatgcagatcttcgtgaagaccctgaccggcaagaccatcactctggaggtggagcccagtgacaccatcgaaaatgtgaaggccaagatccaagatggcgaaggacgccagggatcacagcgagcgagtcccaacccacgagcagacagaaagcaaaacactgagcacggcagcagcccgcgcgagaagactgggccgcgacgccaaccccgcagcaccacgatgcaagaaacgaggcgaccct

SEQ ID NO: 310815 - DNA, 1089 bp, Homo sapiens
aggaagtttccagagctttcgaggaaggtttcttcaactcaaattcatccgcctgataattttcttatattttcctaaagaaggaagagaagcgcatagaggagaagggaaataattttttaggagcctttcttacggctatgaggaatttggggctcagttgaaaagcctaaactgcctctcgggaggttgggcgcggcgaactactttcagcggcgcacggagacggcgtctacgtgaggggtgataagtgacgcaacactcgttgcataaatttgcgctccgccagcccggagcatttaggggcggttggctttgttgggtgagcttgtttgtgtccctgtgggtggacgtggttggtgattggcaggatcctggtatccgctaacaggtcaaaatgcagatcttcgtgaaaacccttaccggcaagaccatcacccttgaggtggagcccagtgacaccatcgaaaatgtgaaggccaagatccaggataaggaaggcattccccccgaccagcagaggctcatctttgcaggcaagcagctggaagatggccgtactctttctgactacaacatccagaaggagtcgaccctgcacctggtcctgcgtctgagaggtggtatgcagatcttcgtgaagaccctgaccggcaagaccatcaccctggaagtggagcccagtgacaccatcgaaaatgtgaaggccaagatccaggataaagaaggcatccctcccgaccagcagaggctcatctttgcaggcaagcagctggaagatggccgcactctttctgactacaacatccagaaggagtcgaccctgcacctggtcctgcgtctgagaggtggtatgcagatcttcgtgaagaccctgaccggcaagaccatcactctggaggtggagcccagtgacaccatcgaaaatgtgaaggccaagatccaagattgagctggcagagtcgctggtgcaggcgggcacggtaccagtagctggcaccaagcatcaccaggaccaataagaccaggaggctgaggagcagccctgtggtcagggagctggttgctttgagctgagtggtgcagtca

SEQ ID NO: 310816 - DNA, 1176 bp, Homo sapiens
aggaagtttccagagctttcgaggaaggtttcttcaactcaaattcatccgcctgataattttcttatattttcctaaagaaggaagagaagcgcatagaggagaagggaaataattttttaggagcctttcttacggctatgaggaatttggggctcagttgaaaagcctaaactgcctctcgggaggttgggcgcggcgaactactttcagcggcgcacggagacggcgtctacgtgaggggtgataagtgacgcaacactcgttgcataaatttgcgctccgccagcccggagcatttaggggcggttggctttgttgggtgagcttgtttgtgtccctgtgggtggacgtggttggtgattggcaggatcctggtatccgctaacaggtcaaaatgcagatcttcgtgaaaacccttaccggcaagaccatcacccttgaggtggagcccagtgacaccatcgggctcatctttgcaggcaagcagctggaagatggccgtactctttctgactacaacatccagaaggagtcgaccctgcacctggtcctgcgtctgagaggtggtatgcagatcttcgtgaagaccctgaccggcaagaccatcaccctggaagtggagcccagtgacaccatcgaaaatgtgaaggccaagatccaggataaagaaggcatccctcccgaccagcagaggctcatctttgcaggcaagcagctggaagatggccgcactctttctgactacaacatccagaaggagtcgaccctgcacctggtcctgcgtctgagaggtggtatgcagatcttcgtgaagaccctgaccggcaagaccatcactctggaggtggagcccagtgacaccatcgaaaatgtgaaggccaagatccaagataaagaaggcatcccccccgaccagcagaggctcatctttgcaggcaagcagctggaagatggccgcactctttctgactacaacatccagaaagagtcgaccctgcacctggtcctgcgcctgaggggtggctgttaattcttcagtcatggcattcgcagtgcccagtgatggcattactctgcactatagccatttgccccaacttaagtttagaaattacaagtttcagtaatagctgaacctgttcaaaatgttaataaaggtttcgttgcatggta

SEQ ID NO: 310817 - DNA, 1004 bp, Homo sapiens
aggaagtttccagagctttcgaggaaggtttcttcaactcaaattcatccgcctgataattttcttatattttcctaaagaaggaagagaagcgcatagaggagaagggaaataattttttaggagcctttcttacggctatgaggaatttggggctcagttgaaaagcctaaactgcctctcgggaggttgggcgcggcgaactactttcagcggcgcacggagacggcgtctacgtgaggggtgataagtgacgcaacactcgttgcataaatttgcgctccgccagcccggagcatttaggggcggttggctttgctggaagatggccgtactctttctgactacaacatccagaaggagtcgaccctgcacctggtcctgcgtctgagaggtggtatgcagatcttcgtgaagaccctgaccggcaagaccatcaccctggaagtggagcccagtgacaccatcgaaaatgtgaaggccaagatccaggataaagaaggcatccctcccgaccagcagaggctcatctttgcaggcaagcagctggaagatggccgcactctttctgactacaacatccagaaggagtcgaccctgcacctggtcctgcgtctgagaggtggtatgcagatcttcgtgaagaccctgaccggcaagaccatcactctggaggtggagcccagtgacaccatcgaaaatgtgaaggccaagatccaagataaagaaggcatcccccccgaccagcagaggctcatctttgcaggcaagcagctggaagatggccgcactctttctgactacaacatccagaaagagtcgaccctgcacctggtcctgcgcctgaggggtggctgttaattcttcagtcatggcattcgcagtgcccagtgatggcattactctgcactatagccatttgccccaacttaagtttagaaattacaagtttcagtaatagctgaacctgttcaaaatgttaataaaggtttcgttgcatggta

SEQ ID NO: 310818 - DNA, 685 bp, Homo sapiens
  misc_feature (8)..(8): n is a, c, g, or t
gaaaaatnaataggctaggtacgaggcgggtgtgaatcggccgagggaccctgcacctggtcctgcgtctgagaggtggtatgcagatcttcgtgaagaccctgaccggcaagaccatcaccctggaagtggagcccagtgacaccatcgaaaatgtgaaggccaagatccaggataaagaaggcatccctcccgaccagcagaggctcatctttgcaggcaagcagctggaagatggccgcactctttctgactacaacatccagaaggagtcgaccctgcacctggtcctgcgtctgagaggtggtatgcagatcttcgtgaagaccctgaccggcaagaccatcactctggaggtggagcccagtgacaccatcgaaaatgtgaaggccaagatccaagataaagaaggcatcccccccgaccagcagaggctcatctttgcaggcaagcagctggaagatggccgcactctttctgactacaacatccagaaagagtcgaccctgcacctggtcctgcgcctgaggggtggctgttaattcttcagtcatggcattcgcagtgcccagtgatggcattactctgcactatagccatttgccccaacttaagtttagaaattacaagtttcagtaatagctgaacctgttcaaaatgttaataaaggtttcgttgcatggta

SEQ ID NO: 310819 - DNA, 665 bp, Homo sapiens
ggacgcgtgggtcgacccacgcgtccgaccctgcacctggtcctgcgtctgagaggtggtatgcagatcttcgtgaagaccctgaccggcaagaccatcaccctggaagtggagcccagtgacaccatcgaaaatgtgaaggccaagatccaggataaagaaggcatccctcccgaccagcagaggctcatctttgcaggcaagcagctggaagatggccgcactctttctgactacaacatccagaaggagtcgaccctgcacctggtcctgcgtctgagaggtggtatgcagatcttcgtgaagaccctgaccggcaagaccatcactctggaggtggagcccagtgacaccatcgaaaatgtgaaggccaagatccaagataaagaaggcatcccccccgaccagcagaggctcatctttgcaggcaagcagctggaagatggccgcactctttctgactacaacatccagaaagagtcgaccctgcacctggtcctgcgcctgaggggtggctgttaattcttcagtcatggcattcgcagtgcccagtgatggcattactctgcactatagccatttgccccaacttaagtttagaaattacaagtttcagtaatagctgaacctgttcaaaatgttaataaaggtttcgttgcatggta

SEQ ID NO: 310820 - DNA, 677 bp, Homo sapiens
tgattctatgaggatccccgtccggtgcctctactcaggaccctgcacctggtcctgcgtctgagaggtggtatgcagatcttcgtgaagaccctgaccggcaagaccatcaccctggaagtggagcccagtgacaccatcgaaaatgtgaaggccaagatccaggataaagaaggcatccctcccgaccagcagaggctcatctttgcaggcaagcagctggaagatggccgcactctttctgactacaacatccagaaggagtcgaccctgcacctggtcctgcgtctgagaggtggtatgcagatcttcgtgaagaccctgaccggcaagaccatcactctggaggtggagcccagtgacaccatcgaaaatgtgaaggccaagatccaagataaagaaggcatcccccccgaccagcagaggctcatctttgcaggcaagcagctggaagatggccgcactctttctgactacaacatccagaaagagtcgaccctgcacctggtcctgcgcctgaggggtggctgttaattcttcagtcatggcattcgcagtgcccagtgatggcattactctgcactatagccatttgccccaacttaagtttagaaattacaagtttcagtaatagctgaacctgttcaaaatgttaataaaggtttcgttgcatggta

SEQ ID NO: 310821 - DNA, 675 bp, Homo sapiens
actgccggttgcctctactgccggttgcctctactcgaccctgcacctggtcctgcgtctgagaggtggtatgcagatcttcgtgaagaccctgaccggcaagaccatcaccctggaagtggagcccagtgacaccatcgaaaatgtgaaggccaagatccaggataaagaaggcatccctcccgaccagcagaggctcatctttgcaggcaagcagctggaagatggccgcactctttctgactacaacatccagaaggagtcgaccctgcacctggtcctgcgtctgagaggtggtatgcagatcttcgtgaagaccctgaccggcaagaccatcactctggaggtggagcccagtgacaccatcgaaaatgtgaaggccaagatccaagataaagaaggcatcccccccgaccagcagaggctcatctttgcaggcaagcagctggaagatggccgcactctttctgactacaacatccagaaagagtcgaccctgcacctggtcctgcgcctgaggggtggctgttaattcttcagtcatggcattcgcagtgcccagtgatggcattactctgcactatagccatttgccccaacttaagtttagaaattacaagtttcagtaatagctgaacctgttcaaaatgttaataaaggtttcgttgcatggta

SEQ ID NO: 310822 - DNA, 720 bp, Homo sapiens
aatacggcttagtacgaggcctgggttttaattcggccgagttgggtgagcttgtttgtgtccctgtgggtggacgtggttggtgattggcaggatcctggtatccgctaacagtatgcagatcttcgtgaagaccctgaccggcaagaccatcaccctggaagtggagcccagtgacaccatcgaaaatgtgaaggccaagatccaggataaagaaggcatccctcccgaccagcagaggctcatctttgcaggcaagcagctggaagatggccgcactctttctgactacaacatccagaaggagtcgaccctgcacctggtcctgcgtctgagaggtggtatgcagatcttcgtgaagaccctgaccggcaagaccatcactctggaggtggagcccagtgacaccatcgaaaatgtgaaggccaagatccaagataaagaaggcatcccccccgaccagcagaggctcatctttgcaggcaagcagctggaagatggccgcactctttctgactacaacatccagaaagagtcgaccctgcacctggtcctgcgcctgaggggtggctgttaattcttcagtcatggcattcgcagtgcccagtgatggcattactctgcactatagccatttgccccaacttaagtttagaaattacaagtttcagtaatagctgaacctgttcaaaatgttaataaaggtttcgttgcatggta

SEQ ID NO: 310823 - DNA, 1184 bp, Homo sapiens
aggaagtttccagagctttcgaggaaggtttcttcaactcaaattcatccgcctgataattttcttatattttcctaaagaaggaagagaagcgcatagaggagaagggaaataattttttaggagcctttcttacggctatgaggaatttggggctcagttgaaaagcctaaactgcctctcgggaggttgggcgcggcgaactactttcagcggcgcacggagacggcgtctacgtgaggggtgataagtgacgcaacactcgttgcataaatttgcgctccgccagcccggagcatttaggggcggttggctttgttgggtgagcttgtttgtgtccctgtgggtggacgtggttggtgattggcaggatcctggtatccgctaacaggtcaaaatgcagatcttcgtgaaaacccttaccggcaagaccatcacccttgaggtggagcccagtgacaccatcgaaaatgtgaaggccaagatccaggataaggaaggcattccccccgaccagcagaggctcatctttgcaggcaagcagctggaagatggccgtactctttctgactacaacatccagaaggagtcgaccctgcacctggtcctgcgtctgagaggtggtatgcagatcttcgtgaagaccctgaccggcaagaccatcaccctggaagtggagcccagtgacaccatcgaaagcagaggctcatctttgcaggcaagcagctggaagatggccgcactctttctgactacaacatccagaaggagtcgaccctgcacctggtcctgcgtctgagaggtggtatgcagatcttcgtgaagaccctgaccggcaagaccatcactctggaggtggagcccagtgacaccatcgaaaatgtgaaggccaagatccaagataaagaaggcatcccccccgaccagcagaggctcatctttgcaggcaagcagctggaagatggccgcactctttctgactacaacatccagaaagagtcgaccctgcacctggtcctgcgcctgaggggtggctgttaattcttcagtcatggcattcgcagtgcccagtgatggcattactctgcactatagccatttgccccaacttaagtttagaaattacaagtttcagtaatagctgaacctgttcaaaatgttaataaaggtttcgttgcatggta

SEQ ID NO: 310824 - DNA, 603 bp, Homo sapiens
ccaaaaaaaaaaaaaaaaataaaaaaaaaaaaaaaaaggatcgggtacctctagatcagtgtagaaattgaatgtgaaggccaagatccaggataaagaaggcatccctcccgaccagcagaggctcatctttgcaggcaagcagctggaagatggccgcactctttctgactacaacatccagaaggagtcgaccctgcacctggtcctgcgtctgagaggtggtatgcagatcttcgtgaagaccctgaccggcaagaccatcactctggaggtggagcccagtgacaccatcgaaaatgtgaaggccaagatccaagataaagaaggcatcccccccgaccagcagaggctcatctttgcaggcaagcagctggaagatggccgcactctttctgactacaacatccagaaagagtcgaccctgcacctggtcctgcgcctgaggggtggctgttaattcttcagtcatggcattcgcagtgcccagtgatggcattactctgcactatagccatttgccccaacttaagtttagaaattacaagtttcagtaatagctgaacctgttcaaaatgttaataaaggtttcgttgcatggta

SEQ ID NO: 310825 - DNA, 1392 bp, Homo sapiens
  misc_feature (955)..(955): n is a, c, g, or t
  misc_feature (1076)..(1076): n is a, c, g, or t
aggaagtttccagagctttcgaggaaggtttcttcaactcaaattcatccgcctgataattttcttatattttcctaaagaaggaagagaagcgcatagaggagaagggaaataattttttaggagcctttcttacggctatgaggaatttggggctcagttgaaaagcctaaactgcctctcgggaggttgggcgcggcgaactactttcagcggcgcacggagacggcgtctacgtgaggggtgataagtgacgcaacactcgttgcataaatttgcgctccgccagcccggagcatttaggggcggttggctttgttgggtgagcttgtttgtgtccctgtgggtggacgtggttggtgattggcaggatcctggtatccgctaacaggtcaaaatgcagatcttcgtgaaaacccttaccggcaagaccatcacccttgaggtggagcccagtgacaccatcgaaaatgtgaaggccaagatccaggataaggaaggcattccccccgaccagcagaggctcatctttgcaggcaagcagctggaagatggccgtactctttctgactacaacatccagaaggagtcgaccctgcacctggtcctgcgtctgagaggtggtatgcagatcttcgtgaagaccctgaccggcaagaccatcaccctggaagtggagcccagtgacaccatcgaaaatgtgaaggccaagatccaggataaagaaggcatccctcccgaccagcagaggctcatctttgcaggcaagcagctggaagatggccgcactctttctgactacaacatccagaaggagtcgaccctgcacctggtcctgcgtctgagaggtggtatgcagatcttcgtgaagaccctgaccggcaagaccatcgtcatccctgtgaaggctggacgcccatgtgaccatccagtcgacaaactgtgagatggccanagattccacggattatacggatacggtcagtcctctccctggatcccaagcagtagtgctactatctttggcacggctaagctagcgtggaaggaatggccagcactacatttctggactnacatactagtccgagaagcgcagtcgacccgtgtcacctggagtccgtgccgtcgtgacggaggtgggttatggcaggagtcctttcggtgtccaatgagcgcctgcagccgggcgacgcaccatgtcatcgtcctgtgtacggtctggagcccatggtgcactccaggtcgcaaaatgctgcaatggccaagcatccaatgatttagagtagggggcaatcccgacccctgatccagcagagtgctctatctgtggcacggcaggctagctaggaagatgggccgcacatctttcctgagctacaactatccaga

SEQ ID NO: 310826 - DNA, 918 bp, Homo sapiens
gtatcaacgcagagtggccattacggccgggagttgggtgagcttgtttgtgtccctgtgggtggacgtggttggtgattggcaggatcctggtatccgctaacaggtcaaaatgcagatcttcgtgaaaacccttaccggcaagaccatcacccttgaggtggagcccagtgacaccatcgaaaatgtgaaggccaagatccaggataaggaaggcattccccccgaccagcagaggctcatctttgcaggcaagcagctggaagatggccgtactctttctgactacaacatccagaaggagtcgaccctgcacctggtcctgcgtctgagaggtggtatgcagatcttcgtgaagaccctgaccggcaagaccatcaccctggaagtggagcccagtgacaccatcgaaaatgtgaaggccaagatccaggataaagaaggcatccctcccgaccagcagaggctcatctttgcaggcaagcagctggaagatggccgcactctttctgactacaacatccagaaggagtcgaccctgcacctggtcctgcgtctgagaggtggtatgcagatcttcgtgaagaccctgaccggcaagaccatcactctggaggtggagcccagtgacaccatcgaaaatgtgaaggccaagatccaagataggctcatctttgcaggcaagcagctggaagatggccgcactctttctgactacaacatccagaaagagtcgaccctgcacctggtcctgcgcctgaggggtggctgttaattcttcagtcatggcattcgcagtgcccagtgatggcattactctgcactatagccatttgccccaacttaagtttagaaattacaagtttcagtaatagctgaacctgttcaaaatgttaataaaggtttcgttgcatggta

SEQ ID NO: 310827 - DNA, 1084 bp, Homo sapiens
aggaagtttccagagctttcgaggaaggtttcttcaactcaaattcatccgcctgataattttcttatattttcctaaagaaggaagagaagcgcatagaggagaagggaaataattttttaggagcctttcttacggctatgaggaatttggggctcagttgaaaagcctaaactgcctctcgggaggttgggcgcggcgaactactttcagcggcgcacggagacggcgtctacgtgaggggtgataagtgacgcaacactcgttgcataaatttgcgctccgccagcccggagcatttaggggcggttggctttgttgggtgagcttgtttgtgtccctgtgggtggacgtggttggtgattggcaggatcctggtatccgctaacaggtcaaaatgcagatcttcgtgaaaacccttaccggcaagaccatcacccttgaggtggagcccagtgacaccatcgaaaatgtgaaggccaagatccaggataaggaaggcattccccccgaccagcagaggctcatctttgcaggcaagcagctggaagatggccgtactctttctgactacaacatccagaaggagtcgaccctgcacctggtcctgcgtctgagaggtggagctggaagatggccgcactctttctgactacaacatccagaaggagtcgaccctgcacctggtcctgcgtctgagaggtggtatgcagatcttcgtgaagaccctgaccggcaagaccatcactctggaggtggagcccagtgacaccatcgaaaatgtgaaggccaagatccaagataaagaaggcatcccccccgaccagcagaggctcatctttgcaggcaagcagctggaagatggccgcactctttctgactacaacatccagaaagagtcgaccctgcacctggtcctgcgcctgaggggtggctgttaattcttcagtcatggcattcgcagtgcccagtgatggcattactctgcactatagccatttgccccaacttaagtttagaaattacaagtttcagtaatagctgaacctgttcaaaatgttaataaaggtttcgttgcatggta

SEQ ID NO: 310828 - DNA, 884 bp, Homo sapiens
aggaagtttccagagctttcgaggaaggtttcttcaactcaaattcatccgcctgataattttcttatattttcctaaagaaggaagagaagcgcatagaggagaagggaaataattttttaggagcctttcttacggctatgaggaatttggggctcagttgaaaagcctaaactgcctctcgggaggttgggcgcggcgaactactttcagcggcgcacggagacggcgtctacgtgaggggtgataagtgacgcaacactcgttgcataaatttgcgctccgccagcccggagcatttaggggcggttggctttgttgggtgagcttgtttgtgtccctgtgggtggacgtggttggtgattggcaggatcctggtatccgctaacaggtcaaaatgcagatcttcgtgaaaacccttaccggcaagaccatcacccttgaggtggagcccagtgacaccatcgaaaatgtgaaggccaagatccaggataaggaaggcattccccccgaccagcagaggctcatctttgcaggcaagcagctggaagatggccgtactctttctgactacaacatccagaaggagtcgaccctgcacctggtcctgcgtctgagaggtggtatgcagatcttcgtgaagaccctgaccggcaagaccatcaccctggaagtggagcccagtgacaccatcgaaaatgtgaaggccaagatccaggataaagaaggcatccctcccgaccatgagctggcagagtcgctggtgcaggcgggcacggtaccagtagctggcaccaagcatcaccaggaccaataagaccaggaggctgaggagcagccctgtggtcagggagctggttgctttgagctgagtggtgcagtca

SEQ ID NO: 310829 - DNA, 865 bp, Homo sapiens
aggaagtttccagagctttcgaggaaggtttcttcaactcaaattcatccgcctgataattttcttatattttcctaaagaaggaagagaagcgcatagaggagaagggaaataattttttaggagcctttcttacggctatgaggaatttggggctcagttgaaaagcctaaactgcctctcgggaggttgggcgcggcgaactactttcagcggcgcacggagacggcgtctacgtgaggggtgataagtgacgcaacactcgttgcataaatttgcgctccgccagcccggagcatttaggggcggttggctttgttgggtgagcttgtttgtgtccctgtgggtggacgtggttggtgattggcaggatcctggtatccgctaacaggtcaaaatgcagatcttcgtgaaaacccttaccggcaagaccatcacccttgaggtggagcccagtgacaccatcgaaaatgtgaaggccaagatccaggataaggaaggcattccccccgaccagcagaggctcatctttgcaggcaagcagctggaagatggccgtactctttctgactacaacatccagaaggagtcgaccctgcacctggtcctgcgtctgagaggtggtatgcagatcttcgtgaagaccctgaccggcaagaccatcaccctggaagtggagcccagtgacaccatcgaaaaaaaaaacaacaaaaaaaaaaaaaacatttggggcggctcgggcaatcgactttaaactgagcaagttatgcatgcggcgcatttgagccacttggcaattcgccataggagggggttaaattactgggcggggttacaaacccggaagggaaacccggcctaccca

SEQ ID NO: 310830 - DNA, 682 bp, Homo sapiens
  misc_feature (666)..(667): n is a, c, g, or t
aggaagtttccagagctttcgaggaaggtttcttcaactcaaattcatccgcctgataattttcttatattttcctaaagaaggaagagaagcgcatagaggagaagggaaataattttttaggagcctttcttacggctatgaggaatttggggctcagttgaaaagcctaaactgcctctcgggaggttgggcgcggcgaactactttcagcggcgcacggagacggcgtctacgtgaggggtgataagtgacgcaacactcgttgcataaatttgcgctccgccagcccggagcatttaggggcggttggctttgttgggtgagcttgtttgtgtccctgtgggtggacgtggttggtgattggcaggatcctggtatccgctaacaggtcaaaatgcagatcttcgtgaaaacccttaccggcaagaccatcacccttgaggtggagcccagtgacaccatcgaaaatgtgaaggccaagatccaggataaggaaggcattccccccgaccagcagaggctcatctttgcaggcaagcagctggaagatggccgtactctttctgactacaacatccagaaggagtcgaccctgcacctggtcctgcgtctgagaggtggtatgcagatcttcgtgaagaccccaccgccatcttcgagggnncctctagacaccgca

SEQ ID NO: 310831 - DNA, 1198 bp, Homo sapiens
gcggccgctactactactaaatttacccccgatcgaccacactctggaggtggagcccagtgacaccatcgaaaatgtgaaggccaagatccaagataaagaaggcatcccccccgaccagcagaggctcatctttgcaggcaagcagctggaagatggccgcactctttctgactacaacatccagaaagagtcgaccctgcacctggtcctgcgcctgaggggtggctgttaattcttcagtcatggcattcgcagtgcccagtgatggcattactctgcactatagccatttgccccaacttaagtttagaaattacaagtttcagtaatagctgaacctgttcaaaatgttaataaaggtttcgttgcatggtacatacttggtgttttgtcatgaaattctctagtgatgtgtgggtacgcttaaaactggtgaaaatgtttagggatttaattttgagattggtaatgtgctcaaagttaagtcacttgactttggtatacacttgggtgggctgaggggcaagagccttctttgctgtttaagtcattacaagttaggatcctgggtaaatggcaaactttctgaagctcgaatttaaagtctgttgggaggccgaggcaggcggatcacgaggtcaagatatggagaccaccctggccaacatggtgaaaccttgtctctactaaaagaaaaaaattagctgggcgtcgtgtcgcctgcctcagtcccccacatagctgggactacaggggcacaccagctaatttttgtattttcagtagagttggggttttaccatgttgaccaagctggtctcaaactcctggcctcaagtgatccgcccaccttgacctctcgaagtgctgggattacaggcatgagccatcacgcccggccacgctgttggttcttaatgacacagcttaactttattgtgaaaagattgcagcaacaaatgagattttacctgtatttgttaaaaatgcttatccttgtctaagactggcaacataagcagttcttaggcttctatgccaatggacactaggcagtaatacatgtgcagtgctaatagaaaatattggagtaagggtgtactaaggaagttctcaatctttccccttcactatcttctgtaatgtaacttcaataaatgtgattctcatcttggcacaaaattgggaatggtgt

SEQ ID NO: 310832 - DNA, 565 bp, Homo sapiens
  misc_feature (1)..(1): n is a, c, g, or t
naagagtagcacctatggagtctcactatactgcacaggccggagtgcagtggtgccatctcgggcaagcaattctcctgcctcagcctcccaagtagctgagactacaggaacgaactttatattgctgttggaatatctggagccatccaacatttagctgggatgaaagacagcaagacaattgtggcaattaataaagacccagaagctccaattttccaagtggcagattatggaatagttgcagatttatttaaggtagttcctgaaatgactgagatattgaagaaaaaatgaatcaggatcatgccttaaaaagaaaacttttgttaaagtattccactgaaatcacagatatttgtgggtattataacaatcattggaaagcatggagagctacatttcataatttgagggaaaatttctaacagatgccagaatgcttgtttatgggattgctgtgtttccttttaattatttgtggttccaaacaattattgtttgaacttttttaattctgtactaaaatctataataaagcttttccacagctttaaaacta

SEQ ID NO: 310833 - DNA, 1910 bp, Homo sapiens
cacctcccagagttgagcgattctcctgtctgagcctcccaaacagctgggagtacaggtgcgcaccaccacacctggctaatttttgtgtgtttagtagaggtggggtttcaccatattggccaggctggtctcgaactcctgacctcaagtgatccgcctgcctcagcctctcaaagtgctgggattacaggcataagcttttattttttattgtagagatggggtctccctgtgttgcgcaggctggtcttgaacgcctgggctgaagtgatcctcccacttccacctcccaaagtgctgggattataggtatgagttaccatgcctggcctgcatttaagaatatttttatagcaaataagagaaatgtttgacagcttttataagagatataagtaatttgcttcttttattaatctatttgctatgtacataaggacttaaagctgtttaacgtcccttactaacaggctgacaagatactttagctttcatattgttagaatatcccagaataattgttttattttattctattgtattttattttatttatttatttatttttgagacggagtctcgctctgtcgcccaggctggaatgcagtggcgcgatctcggctcactgcaacctccgcctcctgggttcacactattctcctgcctcagcctcccgagtagcttggactacagatgcccgccaccacgcccggctaattttttgtgttttttagtagagacggggtttcaccgtgttagccaggatggtcttgatctcctgaccttgtgatctgcccacctcggcctctcaaagtgctgggattacaggcgtgagccaccgtgcccggcctatttatttatttttatttttgttgagacagagtctcactgctggagtgcagtggcgtgatctctgctcactgcaacctctgcctcccaggttcaagtgagtctcctgcctcagtctcccaagtagttgggattacaggcacatgccaccatgcctggctaatgtttgtatttttagtagagacaggttttaccctgttggccaggctagtctcgaactcctgacctcaggtgattcacccgtcttggcctcccaaagtgctgggattacaggtatgagccactgtgcctgtcctcccgaataataattttaaaataataaatgaaggacaaaataatttgcactacaaaggctgtggatttgggtatagatttgttactttttcacctaaaatcaaatattttttttgtaagtcaaaagaagaacttttaaaaaataatgattttaaactctttaatactgagatgggctagatgtgggtaagagagaattttattacattccaacctggaaatttctaataaatttacagtgttgacacagatgcctcaaatcttatttggtagacattttaagaatattaatatattgtaagggaagttaaaatagaactatcagtctgtgtgaaatgttttcttggtaaaagtcaaactctttgtttttatttcacagacaattgtggcaattaataaagacccagaagctccaattttccaagtggcagattatggaatagttgcagatttatttaaggtagttcctgaaatgactgagatattgaagaaaaaatgaatcaggatcatgccttaaaaagaaaacttttgttaaagtattccactgaaatcacagatatttgtgggtattataacaatcattggaaagcatggagagctacatttcataatttgagggaaaatttctaacagatgccagaatgcttgtttatgggattgctgtgtttccttttaattatttgtggttccaaacaattattgtttgaacttttttaattctgtactaaaatctataataaagcttttccacagctttaaaacta

SEQ ID NO: 310834 - DNA, 503 bp, Homo sapiens
  misc_feature (11)..(11): n is a, c, g, or t
  misc_feature (19)..(19): n is a, c, g, or t
  misc_feature (43)..(43): n is a, c, g, or t
ataaaaaaaanttatatantttttaattttaattttttataanaatataaatcttaggacttctttgctgttttaattctggagcctccaacatttagctgggatgaaagacagcattacaattgtggcaattaataaagacccagaagctccaattttccaagtggcagattatggaatagttgcagatttatttaaggtagttcctgaaatgactgagatattgaagaaaaaatgaatcaggatcatgccttaaaaagaaaacttttgttaaagtattccactgaaatcacagatatttgtgggtattataacaatcattggaaagcatggagagctacatttcataatttgagggaaaatttctaacagatgccagaatgcttgtttatgggattgctgtgtttccttttaattatttgtggttccaaacaattattgtttgaacttttttaattctgtactaaaatctataataaagcttttccacagctttaaaacta

SEQ ID NO: 310835 - DNA, 522 bp, Homo sapiens
ttctgtccgtggaacatcctttgatgctgcagcaacaagtggcggtagtgccagttcagaaaaggcatcaagtacttcaccagtggaaatatcagagtggcttgaccagaaattaacaaaaagtgatcgaccagagctaacaggtgccaaagtggtggtatctggtggtcgaggcttgaagagtggagagaactttaagttgttatatgacttggcagatcaactacatgctgcagttggtgcttcccgtgctgctgttgatgctggctttgttcccaatgacatgcaagttggacagacgggaaaaatagtagcaccagaactttatattgctgttggaatatctggagccatccaacatttagctgggatgaaagacagcaagagttagagaaggaacggcagcgacacatcggcaagcctttacttgggggaccgttttccctcacaactcatactggggagcgtaaaactgacaaggactacttgggtcagtggttattgatttattttggcttcact

SEQ ID NO: 310836 - DNA, 541 bp, Homo sapiens
gtaccactgcactccagcctgagcaacacaatgagaccctgtctcaaagtaataatgataataacaattgttatatagtataatgaaaaagctttcggatgattaaactcccagatgtctgactaagtggcctctagaagaataatttaccatcaataactaaacaaatctctgcttatcgccgtgaagcaggttacacattcccaaaagagaaacacgccaatgcaaatcaacacctgcaattcagaatgtttgttcttgtgcctttggatttgaggctcacgtttgaaacttgtttattgtctctgactatgcatcttaatgtgtgtagcatgtttctctggattagcagttacctggctagaacaaatggacttaacagatatttacagaacattctacccaacaactgcagaatatacattcttctcattagcacatggaacattctccaagagggactattagataggccacaaaagtctcaataaatttaagaaaattgaaattataccaagcaccctctcagactcaggtggtg

SEQ ID NO: 310837 - DNA, 1387 bp, Homo sapiens
cacgcgtcgccacgcgtcgctagttctagatcgcgagcgattaggtgactggctgaggcggcgccagttggccgggcacggggctgctgtaaggccgaggttgcggcggaagcggagaccatgttccgagcggcggctccggggcagctccggcgggcggcctcattgctacgatttcagagtaccctggtaatagctgagcatgcaaatgattccctagcacccattactttaaataccattactgcagccacacgccttggaggtgaagtgtcctgcttagtagctggaaccaaatgtgacaaggtggcacaagatctctgtaaagtagcaggcatagcaaaagttctggtggctcagcatgatgtgtacaaaggcctacttccagaggaactgacaccattgattttggcaactcagaagcagttcaattacacacacatctgtgctggagcatctgccttcggaaagaaccttttgcccagagtagcagccaaacttgaggttgccccgatttctgacatcattgcaatcaagtcacctgacacatttgtgagaactatttatgcaggaaatgctctatgtacagtgaagtgtgatgagaaagtgaaagtgttttctgtccgtggaacatcctttgatgctgcagcaacaagtggcggtagtgccagttcagaaaaggcatcaagtacttcaccagtggaaatatcagagtggcttgaccagaaattaacaaaaagtgatcgaccagagctaacaggtgccaaagtggtggtatctggtggtcgaggcttgaagagtggagagaactttaagttgttatatgacttggcagatcaactacatgctgcagttggtgcttcccgtgctgctgttgatgctggctttgttcccaatgacatgcaagttggacagacgggaaaaatagtagcaccagaactttatattgctgttggaatatctggagccatccaacatttagctgggatgaaagacagcaagacaattgtggcaattaataaagacccagaagctccaattttccaagtggcagattatggaatagttgcagatttatttaaggtagttcctgaaatgactgagatattgaagaaaaaatgaatcaggatcatgccttaaaaagaaaacttttgttaaagtattccactgaaatcacagatatttgtgggtattataacaatcattggaaagcatggagagctacatttcataatttgagggaaaatttctaacagatgccagaatgcttgtttatgggattgctgtgtttccttttaattatttgtggttccaaacaattattgtttgaacttttttaattctgtactaaaatctataataaagcttttccacagctttaaaacta

SEQ ID NO: 310838 - DNA, 2517 bp, Homo sapiens
cacgcgtcgccacgcgtcgctagttctagatcgcgagcgattaggtgactggctgaggcggcgccagttggccgggcacggggctgctgtaaggccgaggttgcggcggaagcggagaccatgttccgagcggcggctccggggcagctccggcgggcggcctcattgctacgatttcagagtaccctggtaatagctgagcatgcaaatgattccctagcacccattactttaaataccattactgcagccacacgccttggaggtgaagtgtcctgcttagtagctggaaccaaatgtgacaaggtggcacaagatctctgtaaagtagcaggcatagcaaaagttctggtggctcagcatgatgtgtacaaaggcctacttccagaggaactgacaccattgattttggcaactcagaagcagttcaattacacacacatctgtgctggagcatctgccttcggaaagaaccttttgcccagagtagcagccaaacttgaggttgccccgatttctgacatcattgcaatcaagtcacctgacacatttgtgagaactatttatgcaggaaatgctctatgtacagtgaagtgtgatgagaaagtgaaagtgttttctgtccgtggaacatcctttgatgctgcagcaacaagtggcggtagtgccagttcagaaaaggcatcaagtacttcaccagtggaaatatcagagtggcttgaccagaaattaacaaaaagtgatcgaccagagctaacaggtgccaaagtggtggtatctggtggtcgaggcttgaagagtggagagaactttaagttgttatatgacttggcagatcaactacatgctgcagttggtgcttcccgtgctgctgttgatgctggctttgttcccaatgacatgcaagttggacagacgggaaaaatagtagcaccagaactttatattgctgttggaatatctggagccatccaacatttagctgggatgaaagacagcaagacaattgtggcaattaataaagacccagaagctccaattttccaagtggcagattatggaatagttgcagatttatttaaggtagttcctgaaatgactgagatattgaagaaaaaatgaatcaggatcatgccttaaaaagaaaacttttgttaaagtattccactgaaatcacagatatttgtgggtattataacaatcattggaaagcatggagagctacatttcataatttgagggaaaatttctaacagatgccagaatgcttgtttatgggattgctgtgtttccttttaattatttgtggttccaaacaattattgtttgaacttttttaattctgtactaaaatctataataaagcttttccacagctttaaaactatcagaaatatgcctagcctctagagaaaattgaagaaaaggagtaaaaattttgtttatttatttatttttttgcctttcttgttcatggagagctctatgttttaggaagattgtaaacatgattgtctccaccagcctaatcaacctactaatctcattgttgaagggcaaacttcataggagaaggtaactgaattggcaagtgcagagttaaaaaagcacggctataaagcatgaatattatcttaaacatactccagtcttcagaagaccatagctaatgtgacaaaagcagacctgacttaaacctgacccagctccatgtatttagttggcttaaggtaaatttcattttccgtttaattttaaggttttgtcagtttataggacttttgtctgtaaaggagggagagtggaggaggggctgctttgagacagcatggcctctgatgcaagcagatagtttgatgttattataaacattcaaaatcctgtgcagagaatgctctagcctttcttttgccttctgttggcttcttttgggctctcttaggaagcacccaggcctgtgtagtcacctctggcactctcattctgctgcccagggcacagctgaggtccaagagtgtcaccagggctgcagctggtgtggatgcaggcccaagagcagaggctggtgaggctttgaacaggcctgcaggaaggcgtgggtaggtaggtgagtagaacaaagagggctgccctcctgaatcagatctgcagaagtaggagtagtgacctggatcaagcagacactagggaagagaagggaagtgataagtgatggaggtggctagagtgcctttgtgtgaccagcctggggcccttccccagctgactagtgaaccctttctgatttgtgtcacaatcagttgctataaaacacttttaaaagttgtaacaaaaaaaaagggggcggtttagaaattcctggggggcaaattagggttccagtttttgtccagggccttgggtgattaagaaggaggcggtttaaggtaggatggaaagtatgggttggagaacaaatggggtgaaggaaactcagattaggcggaataaatagttgtgagattgggattgtatata

SEQ ID NO: 310839 - DNA, 1240 bp, Homo sapiens
cacgcgtcgccacgcgtcgctagttctagatcgcgagcgattaggtgactggctgaggcggcgccagttggccgggcacggggctgctgtaaggccgaggttgcggcggaagcggagaccatgttccgagcggcggctccggggcagctccggcgggcggtggcacaagatctctgtaaagtagcaggcatagcaaaagttctggtggctcagcatgatgtgtacaaaggcctacttccagaggaactgacaccattgattttggcaactcagaagcagttcaattacacacacatctgtgctggagcatctgccttcggaaagaaccttttgcccagagtagcagccaaacttgaggttgccccgatttctgacatcattgcaatcaagtcacctgacacatttgtgagaactatttatgcaggaaatgctctatgtacagtgaagtgtgatgagaaagtgaaagtgttttctgtccgtggaacatcctttgatgctgcagcaacaagtggcggtagtgccagttcagaaaaggcatcaagtacttcaccagtggaaatatcagagtggcttgaccagaaattaacaaaaagtgatcgaccagagctaacaggtgccaaagtggtggtatctggtggtcgaggcttgaagagtggagagaactttaagttgttatatgacttggcagatcaactacatgctgcagttggtgcttcccgtgctgctgttgatgctggctttgttcccaatgacatgcaagttggacagacgggaaaaatagtagcaccagaactttatattgctgttggaatatctggagccatccaacatttagctgggatgaaagacagcaagacaattgtggcaattaataaagacccagaagctccaattttccaagtggcagattatggaatagttgcagatttatttaaggtagttcctgaaatgactgagatattgaagaaaaaatgaatcaggatcatgccttaaaaagaaaacttttgttaaagtattccactgaaatcacagatatttgtgggtattataacaatcattggaaagcatggagagctacatttcataatttgagggaaaatttctaacagatgccagaatgcttgtttatgggattgctgtgtttccttttaattatttgtggttccaaacaattattgtttgaacttttttaattctgtactaaaatctataataaagcttttccacagctttaaaacta

SEQ ID NO: 310840 - DNA, 1520 bp, Homo sapiens
cacgcgtcgccacgcgtcgctagttctagatcgcgagcgattaggtgactggctgaggcggcgccagttggccgggcacggggctgctgtaaggccgaggttgcggcggaagcggagaccatgttccgagcggcggctccggggcagctccggcgggcgagacggggtttccccatgttacccaggctggtctcgaactcttgtcctcaagtgatccacctgcctcggcctcccaaagtcctggaattacaggcctgagctaccgcacctggccttagacatcttttttcttgcctcattgctacgatttcagagtaccctggtaatagctgagcatgcaaatgattccctagcacccattactttaaataccattactgcagccacacgccttggaggtgaagtgtcctgcttagtagctggaaccaaatgtgacaaggtggcacaagatctctgtaaagtagcaggcatagcaaaagttctggtggctcagcatgatgtgtacaaaggcctacttccagaggaactgacaccattgattttggcaactcagaagcagttcaattacacacacatctgtgctggagcatctgccttcggaaagaaccttttgcccagagtagcagccaaacttgaggttgccccgatttctgacatcattgcaatcaagtcacctgacacatttgtgagaactatttatgcaggaaatgctctatgtacagtgaagtgtgatgagaaagtgaaagtgttttctgtccgtggaacatcctttgatgctgcagcaacaagtggcggtagtgccagttcagaaaaggcatcaagtacttcaccagtggaaatatcagagtggcttgaccagaaattaacaaaaagtgatcgaccagagctaacaggtgccaaagtggtggtatctggtggtcgaggcttgaagagtggagagaactttaagttgttatatgacttggcagatcaactacatgctgcagttggtgcttcccgtgctgctgttgatgctggctttgttcccaatgacatgcaagttggacagacgggaaaaatagtagcaccagaactttatattgctgttggaatatctggagccatccaacatttagctgggatgaaagacagcaagacaattgtggcaattaataaagacccagaagctccaattttccaagtggcagattatggaatagttgcagatttatttaaggtagttcctgaaatgactgagatattgaagaaaaaatgaatcaggatcatgccttaaaaagaaaacttttgttaaagtattccactgaaatcacagatatttgtgggtattataacaatcattggaaagcatggagagctacatttcataatttgagggaaaatttctaacagatgccagaatgcttgtttatgggattgctgtgtttccttttaattatttgtggttccaaacaattattgtttgaacttttttaattctgtactaaaatctataataaagcttttccacagctttaaaacta

SEQ ID NO: 310841 - DNA, 1685 bp, Homo sapiens
cacgcgtcgccacgcgtcgctagttctagatcgcgagcgattaggtgactggctgaggcggcgccagttggccgggcacggggctgctgtaaggccgaggttgcggcggaagcggagaccatgttccgagcggcggctccggggcagctccggcgggcggcctcattgctacgatttcagagtaccctggtaatagctgagcatgcaaatgattccctagcacccattactttaaataccattactgcagccacacgccttggaggtgaagtgtcctgcttagtagctggaaccaaatgtgacaaggtggcacaagatctctgtaaagtagcaggcatagcaaaagttctggtggctcagcatgatgtgtacaaaggcctacttccagaggaactgacaccattgattttggcaactcagaagcagttcaattacacacacatctgtgctggagcatctgccttcggaaagaaccttttgcccagagtagcagccaaacttgaggttgccccgatttctgacatcattgcaatcaagtcacctgacacatttgtgagaactatttatgcaggaaatgctctatgtacagtgaagtgtgatgagaaagtgaaagtgttttctgtccgtggaacatcctttgatgctgcagcaacaagtggcggtagtgccagttcagaaaaggcatcaagtacttcaccagtggaaatatcagagtggcttgaccagaaattaacaaaaagtgatcgaccagagctaacaggtgccaaagtggtggtatctggtggtcgaggcttgaagagtggagagaactttaagttgttatatgacttggcagatcaactacatgctgcagttggtgcttcccgtgctgctgttgatgctggctttgttcccaatgacatgcaagttggacagacgggaaaaatagtagcaccagaactttatattgctgttggaatatctggagccatccaacatttagctgggatgaaagacagcaagacaattgtggcaattaataaagacccagaagctccaattttccaagtggcagattatggaatagttgcagatttatttaaggtagttcctgaaatgactgagatattgaagaaaaaatgaatcaggatcatgccttaaaaagaaaacttttgttaaagtattccactgaaatcacagatatttgtgggtattataacaatcattggaaagcatggagagctacatttcataatttgagggaaaatttctaacagatgccagaatgcttgtttatgggattgctgtgtttccttttaattatttgtggttccaaacaattattgtttgaacttttttaattctgtactaaaatctataataaagcttttccacagctttaaaactaaaaaaaaaaaaaaaaaaaaaaaaaaaaaaaaaaaaaaaaaaaaaaaaaaaaaaaaaaaaaaaaaaaaaaaaaaaaaacaaaaaaaagaaaaaaaagaacaaaaaaaaaaaaacaagagaggaggaggagcaataaaagaaaacagaagagagaaaagaaaaagaacaaaaagagagaaaaaagaaataaaaacaagaaagaaaaaaaaagaagaagaaagaaaaaagaaaagaaagaacgaaaaaaaaaaaaaagaaaaaagaaaagacaagaaaaaaacaaaagaagacaaaaaaaa

SEQ ID NO: 310842 - DNA, 1340 bp, Homo sapiens
cacgcgtcgccacgcgtcgctagttctagatcgcgagcgattaggtgactggctgaggcggcgccagttggccgggcacggggctgctgtaaggccgaggttgcggcggaagcggagaccatgttccgagcggcggctccggggcagctccggcgggcggcctcattgctacgatttcagagtaccctggtaatagctgagcatgcaaatgattccctagcacccattactttaaataccattactgcagccacacgccttggaggtgaagtgtcctgcttagtagctggaaccaaatgtgacaaggtggcacaagatctctgtaaagtagcaggcatagcaggaactgacaccattgattttggcaactcagaagcagttcaattacacacacatctgtgctggagcatctgccttcggaaagaaccttttgcccagagtagcagccaaacttgaggttgccccgatttctgacatcattgcaatcaagtcacctgacacatttgtgagaactatttatgcaggaaatgctctatgtacagtgaagtgtgatgagaaagtgaaagtgttttctgtccgtggaacatcctttgatgctgcagcaacaagtggcggtagtgccagttcagaaaaggcatcaagtacttcaccagtggaaatatcagagtggcttgaccagaaattaacaaaaagtgatcgaccagagctaacaggtgccaaagtggtggtatctggtggtcgaggcttgaagagtggagagaactttaagttgttatatgacttggcagatcaactacatgctgcagttggtgcttcccgtgctgctgttgatgctggctttgttcccaatgacatgcaagttggacagacgggaaaaatagtagcaccagaactttatattgctgttggaatatctggagccatccaacatttagctgggatgaaagacagcaagacaattgtggcaattaataaagacccagaagctccaattttccaagtggcagattatggaatagttgcagatttatttaaggtagttcctgaaatgactgagatattgaagaaaaaatgaatcaggatcatgccttaaaaagaaaacttttgttaaagtattccactgaaatcacagatatttgtgggtattataacaatcattggaaagcatggagagctacatttcataatttgagggaaaatttctaacagatgccagaatgcttgtttatgggattgctgtgtttccttttaattatttgtggttccaaacaattattgtttgaacttttttaattctgtactaaaatctataataaagcttttccacagctttaaaacta

SEQ ID NO: 310843 - DNA, 1158 bp, Homo sapiens
cacgcgtcgccacgcgtcgctagttctagatcgcgagcgattaggtgactggctgaggcggcgccagttggccgggcacggggctgctgtaaggccgaggttgcggcggaagcggagaccatgttccgagcggcggctccggggcagctccggcgggcgaggaactgacaccattgattttggcaactcagaagcagttcaattacacacacatctgtgctggagcatctgccttcggaaagaaccttttgcccagagtagcagccaaacttgaggttgccccgatttctgacatcattgcaatcaagtcacctgacacatttgtgagaactatttatgcaggaaatgctctatgtacagtgaagtgtgatgagaaagtgaaagtgttttctgtccgtggaacatcctttgatgctgcagcaacaagtggcggtagtgccagttcagaaaaggcatcaagtacttcaccagtggaaatatcagagtggcttgaccagaaattaacaaaaagtgatcgaccagagctaacaggtgccaaagtggtggtatctggtggtcgaggcttgaagagtggagagaactttaagttgttatatgacttggcagatcaactacatgctgcagttggtgcttcccgtgctgctgttgatgctggctttgttcccaatgacatgcaagttggacagacgggaaaaatagtagcaccagaactttatattgctgttggaatatctggagccatccaacatttagctgggatgaaagacagcaagacaattgtggcaattaataaagacccagaagctccaattttccaagtggcagattatggaatagttgcagatttatttaaggtagttcctgaaatgactgagatattgaagaaaaaatgaatcaggatcatgccttaaaaagaaaacttttgttaaagtattccactgaaatcacagatatttgtgggtattataacaatcattggaaagcatggagagctacatttcataatttgagggaaaatttctaacagatgccagaatgcttgtttatgggattgctgtgtttccttttaattatttgtggttccaaacaattattgtttgaacttttttaattctgtactaaaatctataataaagcttttccacagctttaaaacta

SEQ ID NO: 310844 - DNA, 1483 bp, Homo sapiens
cacgcgtcgccacgcgtcgctagttctagatcgcgagcgattaggtgactggctgaggcggcgccagttggccgggcacggggctgctgtaaggccgaggttgcggcggaagcggagaccatgttccgagcggcggctccggggcagctccggcgggcggcctcattgctacgatttcagagtaccctggtaatagctgagcatgcaaatgattccctagcacccattactttaaataccattactgcagccacacgccttggaggtgaagtgtcctgcttagtagctggaaccaaatgtgacaaggtggcacaagatctctgtaaagtagcaggcatagcaaaagttctggtggctcagcatgatgtgtacaaaggcctacttccagaggaactgacaccattgattttggcaactcagaagcagttcaattacacacacatctgtgctggagcatctgccttcggaaagaaccttttgcccagagtagcagccaaacttgaggttgccccgatttctgacatcattgcaatcaagtcacctgacacatttgtgagaactatttatgcaggaaatgctctatgtacagtgaagtgtgatgagaaagtgaaagtgttttctgtccgtggaacatcctttgatgctgcagcaacaagtggcggtagtgccagttcagaaaaggcatcaagtacttcaccagtggaaatatcagagtggcttgaccagaaattaacaaaaagtgatcgaccagagctaacaggtgccaaagtggtggtatctggtgtagagacggaggttctgcatgttggtcaggctggtctcgaaatcctgacctcaggtgatccgcccacttcagcctcccaaagtgttgggattacaggtcgaggcttgaagagtggagagaactttaagttgttatatgacttggcagatcaactacatgctgcagttggtgcttcccgtgctgctgttgatgctggctttgttcccaatgacatgcaagttggacagacgggaaaaatagtagcaccagaactttatattgctgttggaatatctggagccatccaacatttagctgggatgaaagacagcaagacaattgtggcaattaataaagacccagaagctccaattttccaagtggcagattatggaatagttgcagatttatttaaggtagttcctgaaatgactgagatattgaagaaaaaatgaatcaggatcatgccttaaaaagaaaacttttgttaaagtattccactgaaatcacagatatttgtgggtattataacaatcattggaaagcatggagagctacatttcataatttgagggaaaatttctaacagatgccagaatgcttgtttatgggattgctgtgtttccttttaattatttgtggttccaaacaattattgtttgaacttttttaattctgtactaaaatctataataaagcttttccacagctttaaaacta

SEQ ID NO: 310845 - DNA, 1075 bp, Homo sapiens
cacgcgtcgccacgcgtcgctagttctagatcgcgagcgattaggtgactggctgaggcggcgccagttggccgggcacggggctgctgtaaggccgaggttgcggcggaagcggagaccatgttccgagcggcggctccggggcagctccggcgggcgaaccttttgcccagagtagcagccaaacttgaggttgccccgatttctgacatcattgcaatcaagtcacctgacacatttgtgagaactatttatgcaggaaatgctctatgtacagtgaagtgtgatgagaaagtgaaagtgttttctgtccgtggaacatcctttgatgctgcagcaacaagtggcggtagtgccagttcagaaaaggcatcaagtacttcaccagtggaaatatcagagtggcttgaccagaaattaacaaaaagtgatcgaccagagctaacaggtgccaaagtggtggtatctggtggtcgaggcttgaagagtggagagaactttaagttgttatatgacttggcagatcaactacatgctgcagttggtgcttcccgtgctgctgttgatgctggctttgttcccaatgacatgcaagttggacagacgggaaaaatagtagcaccagaactttatattgctgttggaatatctggagccatccaacatttagctgggatgaaagacagcaagacaattgtggcaattaataaagacccagaagctccaattttccaagtggcagattatggaatagttgcagatttatttaaggtagttcctgaaatgactgagatattgaagaaaaaatgaatcaggatcatgccttaaaaagaaaacttttgttaaagtattccactgaaatcacagatatttgtgggtattataacaatcattggaaagcatggagagctacatttcataatttgagggaaaatttctaacagatgccagaatgcttgtttatgggattgctgtgtttccttttaattatttgtggttccaaacaattattgtttgaacttttttaattctgtactaaaatctataataaagcttttccacagctttaaaacta

SEQ ID NO: 310846 - DNA, 2609 bp, Homo sapiens
cacgcgtcgccacgcgtcgctagttctagatcgcgagcgattaggtgactggctgaggcggcgccagttggccgggcacggggctgctgtaaggccgaggttgcggcggaagcggagaccatgttccgagcggcggctccggggcagctccggcgggcggcctcattgctacgatttcagagtaccctggtaatagctgagcatgcaaatgattccctagcacccattactttaaataccattactgcagccacacgccttggaggtgaagtgtcctgcttagtagctggaaccaaatgtgacaaggtggcacaagatctctgtaaagtagcaggcatagcaaaagttctggtggctcagcatgatgtgtacaaaggcctacttccagaggaactgacaccattgattttggcaactcagaagcagttcaattacacacacatctgtgctggagcatctgccttcggaaagaaccttttgcccagagtagcagccaaacttgaggttgccccgatttctgacatcattgcaatcaagtcacctgacacatttgtgagaactatttatgcaggaaatgctctatgtacagtgaagtgtgatgagaaagtgaaagtgttttctgtccgtggaacatcctttgatgctgcagcaacaagtggcggtagtgccagttcagaaaaggcatcaagtacttcaccagtggaaatatcagagtggcttgaccagaaattaacaaaaagtgatcgaccagagctaacaggtgccaaagtggtggtatctggtggtcgaggcttgaagagtggagagaactttaagttgttatatgacttggcagatcaactacatgctgcagttggtgcttcccgtgctgctgttgatgctggctttgttcccaatgacatgcaagttggacagacgggaaaaatagtagcaccagaactttatattgctgttggaatatctggagccatccaacatttagctgggatgaaagacagcaagacaattgtggcaattaataaagacccagaagctccaattttccaagtggcagattatggaatagttgcagatttatttaagcccccttggacagctctcctctgtccaagcagtcacaaagcagctctacactggaagctccagttgcagccactgcactgccacgactaagggtagttcctgaaatgactgagatattgaagaaaaaatgaatcaggatcatgccttaaaaagaaaacttttgttaaagtattccactgaaatcacagatatttgtgggtattataacaatcattggaaagcatggagagctacatttcataatttgagggaaaatttctaacagatgccagaatgcttgtttatgggattgctgtgtttccttttaattatttgtggttccaaacaattattgtttgaacttttttaattctgtactaaaatctataataaagcttttccacagctttaaaactatcagaaatatgcctagcctctagagaaaattgaagaaaaggagtaaaaattttgtttatttatttatttttttgcctttcttgttcatggagagctctatgttttaggaagattgtaaacatgattgtctccaccagcctaatcaacctactaatctcattgttgaagggcaaacttcataggagaaggtaactgaattggcaagtgcagagttaaaaaagcacggctataaagcatgaatattatcttaaacatactccagtcttcagaagaccatagctaatgtgacaaaagcagacctgacttaaacctgacccagctccatgtatttagttggcttaaggtaaatttcattttccgtttaattttaaggttttgtcagtttataggacttttgtctgtaaaggagggagagtggaggaggggctgctttgagacagcatggcctctgatgcaagcagatagtttgatgttattataaacattcaaaatcctgtgcagagaatgctctagcctttcttttgccttctgttggcttcttttgggctctcttaggaagcacccaggcctgtgtagtcacctctggcactctcattctgctgcccagggcacagctgaggtccaagagtgtcaccagggctgcagctggtgtggatgcaggcccaagagcagaggctggtgaggctttgaacaggcctgcaggaaggcgtgggtaggtaggtgagtagaacaaagagggctgccctcctgaatcagatctgcagaagtaggagtagtgacctggatcaagcagacactagggaagagaagggaagtgataagtgatggaggtggctagagtgcctttgtgtgaccagcctggggcccttccccagctgactagtgaaccctttctgatttgtgtcacaatcagttgctataaaacacttttaaaagttgtaacaaaaaaaaagggggcggtttagaaattcctggggggcaaattagggttccagtttttgtccagggccttgggtgattaagaaggaggcggtttaaggtaggatggaaagtatgggttggagaacaaatggggtgaaggaaactcagattaggcggaataaatagttgtgagattgggattgtatata

SEQ ID NO: 310847 - DNA, 1318 bp, Homo sapiens
cacgcgtcgccacgcgtcgctagttctagatcgcgagcgattaggtgactggctgaggcggcgccagttggccgggcacggggctgctgtaaggccgaggttgcggcggaagcggagaccatgttccgagcggcggctccggggcagctccggcgggcggcctcattgctacgatttcagagtaccctggtaatagctgagcatgcaaatgattccctagcacccattactttaaataccattactgcagccacacgccttggaggtgaagtgtcctgcttagtagctggaaccaaatgtgacaaggtggcacaagatctctgtaaagtagcaggcatagcaaaagttctggtggctcagcatgatgtgtacaaaggcctacttccagaggaactgacaccattgattttggcaactcagaagcagttcaattacacacacatctgtgctggagcatctgccttcggaaagaaccttttgcccagagtagcagccaaacttgaggttgccccgatttctgacatcattgcaatcaagtcacctgacacatttgtgagaactatttatgcaggaaatgctctatgtacagtgaagtgtgatgagaaagtgaaagtgttttctgtccgtggaacatcctttgatgctgcagcaacaagtggcggtagtgccagttcagaaaaggcatcaagtacttcaccagtggaaatatcagagtggcttgaccagaaattaacaaaaagtgatcgaccagagctaacaggtgccaaagtggtggtatctggtgttggtgcttcccgtgctgctgttgatgctggctttgttcccaatgacatgcaagttggacagacgggaaaaatagtagcaccagaactttatattgctgttggaatatctggagccatccaacatttagctgggatgaaagacagcaagacaattgtggcaattaataaagacccagaagctccaattttccaagtggcagattatggaatagttgcagatttatttaaggtagttcctgaaatgactgagatattgaagaaaaaatgaatcaggatcatgccttaaaaagaaaacttttgttaaagtattccactgaaatcacagatatttgtgggtattataacaatcattggaaagcatggagagctacatttcataatttgagggaaaatttctaacagatgccagaatgcttgtttatgggattgctgtgtttccttttaattatttgtggttccaaacaattattgtttgaacttttttaattctgtactaaaatctataataaagcttttccacagctttaaaacta

SEQ ID NO: 310848 - DNA, 1564 bp, Homo sapiens
cacgcgtcgccacgcgtcgctagttctagatcgcgagcgattaggtgactggctgaggcggcgccagttggccgggcacggggctgctgtaaggccgaggttgcggcggaagcggagaccatgttccgagcggcggctccggggcagctccggcgggcggcctcattgctacgatttcagagtaccctggtaatagctgagcatgcaaatgattccctagcacccattactttaaataccattactgcagccacacgccttggaggtgaagtgtcctgcttagtagctggaaccaaatgtgacaaggtggcacaagatctctgtaaagtagcaggcatagcaaaagttctggtggctcagcatgatgtgtacaaaggcctacttccagaggaactgacaccattgattttggcaactcagaagcagttcaattacacacacatctgtgctggagcatctgccttcggaaagaaccttttgcccagagtagcagccaaacttgaggttgccccgatttctgacatcattgcaatcaagtcacctgacacatttgtgagaactatttatgcaggaaatgctctatgtacagtgaagtgtgatgagaaagtgaaagtgttttctgtccgtggaacatcctttgatgctgcagcaacaagtggcggtagtgccagttcagaaaaggcatcaagtacttcaccagtggaaatatcagagtggcttgaccagaaattaacaaaaagtgatcgaccagagctaacaggtgccaaagtggtggtatctggtggtcgaggcttgaagagtggagagaactttaagttgttatatgacttggcagatcaactacatgctgcagttggtgcttcccgtgctgctgttgatgctggctttgttcccaatgacatgcaagttggacagacgggaaaaatagtagcaccagaactttatattgctgttggaatatctggagccatccaacatttagctgggatgaaagacagcaagactataccatgttccaatcttagacattctggcatcttctgcacatctctctgaggaacccctctaagggaaatacacagatgttggatatcctgtagcctgtattttaagtcaggctacatcaaaatacttaatgtattttttaataccagctgttttcacaacatacaatgccagacaattgtggcaattaataaagacccagaagctccaattttccaagtggcagattatggaatagttgcagatttatttaaggtagttcctgaaatgactgagatattgaagaaaaaatgaatcaggatcatgccttaaaaagaaaacttttgttaaagtattccactgaaatcacagatatttgtgggtattataacaatcattggaaagcatggagagctacatttcataatttgagggaaaatttctaacagatgccagaatgcttgtttatgggattgctgtgtttccttttaattatttgtggttccaaacaattattgtttgaacttttttaattctgtactaaaatctataataaagcttttccacagctttaaaacta

SEQ ID NO: 310849 - DNA, 1311 bp, Homo sapiens
cacgcgtcgccacgcgtcgctagttctagatcgcgagcgattaggtgactggctgaggcggcgccagttggccgggcacggggctgctgtaaggccgaggttgcggcggaagcggagaccatgttccgagcggcggctccggggcagctccggcgggcggcctcattgctacgatttcagagtaccctggtaatagctgagcatgcaaatgattccctagcacccattactttaaataccattactgcagccacacgccttggaggtgaagtgtcctgcttagtagctggaaccaaatgtgacaaggtggcacaagatctctgtaaagtagcaggcatagcaaaagttctggtggctcagcatgatgtgtacaaaggcctacttccagaggaactgacaccattgattttggcaactcagaagcagttcaattacacacacatctgtgctggagcatctgccttcggaaagaaccttttgcccagagtagcagccaaacttgaggttgccccgatttctgacatcattgcaatcaagtcacctgacacatttgtgagaactatttatgcaggaaatgctctatgtacagtgaagtgtgatgagaaagtgaaagtgttttctgtccgtggaacatcctttgatgctgcagcaacaagtggcggtagtgccagttcagaaaaggcatcaagtacttcaccagtggaaatatcagagtggcttgaccagaaattaacaaaaagtgatcgaccagagctaacaggtgccaaagtggtggtatctggtgtagagacggaggttctgcatgttggtcaggctggtctcgaaatcctgacctcaggtgatccgcccacttcagcctcccaaagtgttgggattacaggtcgaggcttgaagagtggagagaactttaagttgttatatgacttggcagatcaactacatgctgcagttggtgcttcccgtgctgctgttgatgctggctttgttcccaatgacatgcaagttggacagacgggaaaaatagtagcaccagtaagtattgcaataaaatatgctgtgtaaaatgttatggggataagtactgtatgtatttgttgaacagtgatctcagtgatttaccttactcagtgttcctgagcagttagccagtaccatggtgaatatgtcattttcacaaggtctgtgtagttcttgatcctagtaaaatgcccagcagttcttaaatccagcttattattcaagtattttaaagcagtggaacattttatcaaattaagtcatattacatcaaataaaacattgataaaagca

SEQ ID NO: 310850 - DNA, 1068 bp, Homo sapiens
cacgcgtcgccacgcgtcgctagttctagatcgcgagcgattaggtgactggctgaggcggcgccagttggccgggcacggggctgctgtaaggccgaggttgcggcggaagcggagaccatgttccgagcggcggctccggggcagctccggcgggcggcctcattgctacgatttcagagtaccctggtaatagctgagcatgcaaatgattccctagcacccattactttaaataccattactgcagccacacgccttggaggtgaagtgtcctgcttagtagctggaaccaaatgtgacaaggtggcacaagatctctgtaaagtagcaggcatagcaaaagttctggtggctcagcatgatgtgtacaaaggcctacttccagaggaactgacaccattgattttggcaactcagaagcagttcaattacacacacatctgtgctggagcatctgccttcggaaagaaccttttgcccagagtagcagccaaacttgaggttgccccgatttctgacatcattgcaatcaagtcacctgacacatttgtgagaactatttatgcaggaaatgctctatgtacagtgaagtgtgatgagaaagtgaaagtgttttctgtccgtggaacatcctttgatgctgcagcaacaagtggcggtagtgccagttcagaaaaggcatcaagtacttcaccagtggaaatatcagagtggcttgaccagaaattaacaaaaagtgatcgaccagagctaacaggtgccaaagtggtggtatctggtggaactttatattgctgttggaatatctggagccatccaacatttagctgggatgaaagacagcaaggacattgtgggcatataagaccgagctcaattccagtgggcattgggattgtgcgattctttacggagtcctgaaggcgggtttgtggaaaatggtcggctcgtctaaagaacttgtgaggtcccggacccattgggcttcacaccggggcggggccctccctggaggtacaagcgaggtgaggggctctattgcgcccacgtgtttcactactcctt

SEQ ID NO: 310851 - DNA, 919 bp, Homo sapiens
cacgcgtcgccacgcgtcgctagttctagatcgcgagcgattaggtgactggctgaggcggcgccagttggccgggcacggggctgctgtaaggccgaggttgcggcggaagcggagaccatgttccgagcggcggctccggggcagctccggcgggcggcctcattgctacgatttcagagtaccctggtaatagctgagcatgcaaatgattccctagcacccattactttaaataccattactgcagccacacgccttggaggtgaagtgtcctgcttagtagctggaaccaaatgtgacaaggtggcacaagatctctgtaaagtagcaggcatagcaaaagttctggtggctcagcatgatgtgtacaaaggcctacttccagaggaactgacaccattgattttggcaactcagaagcagttcaattacacacacatctgtgctggagcatctgccttcggaaagaaccttttgcccagagtagcagccaaacttgaggttgccccgatttctgacatcattgcaatcaagtcacctgacacatttgtgagaactatttatgcaggaaatgctctatgtacagtgaagtgtgatgagaaagtgaaagtgttttctgtccgtggaacatcctttgatgctgcagcaacaagtggcggtagtgccagttcagaaaaggcatcaagtacttcaccagtggaaatatcagagtggcttgaccagaaattaacaaaaagtgatcgaccagagctaacaggtgccaaagtggtggtatctggtgttggtgcttcccgtgctgctgttgatgctggctttgttcccaatgacatgcaagttggacagacgggaaaaatagtagcaccacgcactttataattgctactgaacttctaaaactaaggggtaccgggctcga

SEQ ID NO: 310852 - DNA, 501 bp, Homo sapiens
  misc_feature (38)..(39): n is a, c, g, or t
  misc_feature (43)..(43): n is a, c, g, or t
gggtggggccggctcgggccggcgcgctttgtatttcnncggntttgcgagaactttatattgctgttggaatatctggagccatccaacatttagctgggatgaaagacagcaagacaattgtggcaattaataaagacccagaagctccaattttccaagtggcagattatggaatagttgcagatttatttaaggtagttcctgaaatgactgagatattgaagaaaaaatgaatcaggatcatgccttaaaaagaaaacttttgttaaagtattccactgaaatcacagatatttgtgggtattataacaatcattggaaagcatggagagctacatttcataatttgagggaaaatttctaacagatgccagaatgcttgtttatgggattgctgtgtttccttttaattatttgtggttccaaacaattattgtttgaacttttttaattctgtactaaaatctataataaagcttttccacagctttaaaacta

SEQ ID NO: 310853 - DNA, 1005 bp, Homo sapiens
cacgcgtcgccacgcgtcgctagttctagatcgcgagcgattaggtgactggctgaggcggcgccagttggccgggcacggggctgctgtaaggccgaggttgcggcggaagcggagaccatgttccgagcggcggctccggggcagctccggcgggcgaggaactgacaccattgattttggcaactcagaagcagttcaattacacacacatctgtgctggagcatctgccttcggaaagaaccttttgcccagagtagcagccaaacttgaggttgccccgatttctgacatcattgcaatcaagtcacctgacacatttgtgagaactatttatgcaggaaatgctctatgtacagtgaagtgtgatgagaaagtgaaagtgttttctgtccgtggaacatcctttgatgctgcagcaacaagtggcggtagtgccagttcagaaaaggcatcaagtacttcaccagtggaaatatcagagtggcttgaccagaaattaacaaaaagtgatcgaccagagctaacaggtgccaaagtggtggtatctggtggtcgaggcttgaagagtggagagaactttaagttgttatatgacttggcagatcaactacatgctgcagttggtgcttcccgtgctgctgttgatgctggctttgttcccaatgacatgcaagttggacagacgggaaaaatagtagcaccagaactttatattgctgttggaatatctggagccatccaacatttagctgggatgaaagacagcaagcatgtttctctggattagcagttacctggactataccatgttccaatcttagacattctggcatcttctgcacatctctctgaggaacccctctaagggaaatacacagatgttggatatcctgtagcctgtattttaagtcaggctacatcaaaatacttaatgtattttttaataccagctgttttcacaacatacaatgccagaccaattgtgggcattaataaaaacc

SEQ ID NO: 310854 - DNA, 922 bp, Homo sapiens
gtaccactgcactccagcctgagcaacacaatgagaccctgtctcaaagtaataatgataataacaattgttatatagtataatgaaaaagctttcggatgattaaactcccagatgtctgactaagtggcctctagaagaataatttaccatcaataactaaacaaatctctgcttatcgccgtgaagcaggttacacattcccaaaagagaaacacgccaatgcaaatcaacacctgcaattcagaatgtttgttcttgtgcctttggatttgaggctcacgtttgaaacttgtttattgtctctgactatgcatcttaatgtgtgtagcatgtttctctggattagcagttacctggactataccatgttccaatcttagacattctggcatcttctgcacatctctctgaggaacccctctaagggaaatacacagatgttggatatcctgtagcctgtattttaagtcaggctacatcaaaatacttaatgtattttttaataccagctgttttcacaacatacaatgccagacaattgtggcaattaataaagacccagaagctccaattttccaagtggcagattatggaatagttgcagatttatttaaggtagttcctgaaatgactgagatattgaagaaaaaatgaatcaggatcatgccttaaaaagaaaacttttgttaaagtattccactgaaatcacagatatttgtgggtattataacaatcattggaaagcatggagagctacatttcataatttgagggaaaatttctaacagatgccagaatgcttgtttatgggattgctgtgtttccttttaattatttgtggttccaaacaattattgtttgaacttttttaattctgtactaaaatctataataaagcttttccacagctttaaaacta

SEQ ID NO: 310855 - DNA, 567 bp, Homo sapiens
cacgcgtcgccacgcgtcgctagttctagatcgcgagcgattaggtgactggctgaggcggcgccagttggccgggcacggggctgctgtaaggccgaggttgcggcggaagcggagaccatgttccgagcggcggctccggggcagctccggcgggcggcctcattgctacgatttcagagtaccctggtaatagctgagcatgcaaatgattccctagcacccattactttaaataccattactgcagccacacgccttggaggtgaagtgtcctgcttagtagctggaaccaaatgtgacaagaggaactgacaccattgattttggcaactcagaagcagttcaattacacacacatctgtgctggagcatctgccttcggaaagaaccttttgcccagagtagcagccaaacttgaggttgccccgatttctgacatcattgcaatcaagtcacctgacacatttgtgagaactatttatgcaggtgagtactcaaggaagataattaatcaacatgttaaattttagtgaaaagcataaattaatcttgaagatagaattt

SEQ ID NO: 310856 - DNA, 214 bp, Homo sapiens
cttaacaattagtaaaaaaaaaaaaaaaaaccctgtgacaacattctttacctttttttttcctttttgctctttttaggcctcattgctacgatttcagagtaccctggtaatagctgagcatgcaaatgattccctagcacccattactttaaataccattactgcagccacacgccttggaggtgaagtgtcctgcttagtagctggaacc

SEQ ID NO: 310857 - DNA, 451 bp, Homo sapiens
gagctcatggtctctccactgaggaaagctgggagaagtggtgccagcacttaatgccacccctgagcaaatgcctgctggctccatggtaaacatgggccttttaataggctggagacagtgacattcggaagaaacaacatgtcgacaatttccttaataaattttgtacgaacacattatttccacctaatggaaatgtagctctcttaaataattgagaggctgtattcatcagtggtgagttcagctggaatctttgtgagctaaggcagccgaaagccccttggaagactgggtaattgatactttgcacaagtggctggaccagttttcagagtatctgtgtgacattccctgcagcccccttggacagctctcctctgtccaagcagtcacaaagcagctctacactggaagctccagttgcagccactgcactgccacgact

SEQ ID NO: 310858 - DNA, 738 bp, Homo sapiens
aaagaaaaaaaaaaaagaaaaggaatttgaaaagttgattaaaatgaaattttagtgaagaaaactcagtcttaagggaaatctgaaatgagaaaaacgtttttatttgaagacagtgcagtgtattttgggttgcaagcataagtgattgcttgatgtttattcttctttccagagctgaaaaataatatttttgaggaaaacagcaactattaatggaatgctacatttcttttttttatttattatttactgttgattaaaaaaaattaatagagatggggtctcgccatgttacccaggctggtttcgaactcctaggctcaatcagtactcctgcctcagcctcccagagtgctgggatttataggtgggagccaccacgcctggcctagaatgctgtgtttcacatacgacccagaaacagagcttccaaggtttaaaacattagaaaatggaaaaaccattattctggagacccaaaaagtacatcatatcaaaattagaacaaaggacagtgttgatttgtttctttcgtataattagcaatgcttctgtacagactttttttaagttgaaatttttattaagataattgtaatttctcatgcagttgtaaaaggtaatacaaagggatctcttgtatactttgcccagtttcttccaatggtagcagttttgggaaatttttataacatcacaaccagaatattgacatctggtgtagtacaccagcct

SEQ ID NO: 310859 - DNA, 541 bp, Homo sapiens
caagaaagtggtgaatcccctgtttgagaaaaggcctaagaattttggcattggacaggacatccagcccaaaagagacctcacctcgctttgtgaaatggccccgctatatcaggttgcaatggcagagatccatactctataagcagctgaaagtgcctcctgcgattaaccagttcacccaggccctggaaggccaaacagctactcagctgcttaagctggcccacaaatacagaccagagacaaagcaagagaagaagtggaggctgttggcccaggcagagttgtgggcaaaggggacctccccatgaagagactacctgtctttcgagcaggagttaacaccgtcaccacctttgtggataacaagaaagctccgctggtggtgactacacacgacatggatcccattgagctgactgttttcctgcctgtcctgtgtcataaaatgggggccacttgctgcattatcaaggggaaggcaagactgggatgtctagttcacaggaagacctacaccactgtcgacttcacacag

SEQ ID NO: 310860 - DNA, 1037 bp, Homo sapiens
gaaaagcgaccccacattcaaggacgccaatggcatgttgagctttcccaatctaaaccaggtgcgtggagggaagcaagtgcttactcccagcttgaaccctgagcagcggttctctaactttagtgtcctgtgggcgacacctgggaggcggttaggaacgctactcctagggcccttcgtaagacctgctgagcctcagggtctgggatagagcctgggaatctgcgctttcaccagcttcccaggtgattcaaacgcagtggctcacggaccccactttgagaaacgcagactgggctgtttgccttcagaagctggactggaaattggtattttgaggagaactgaatccactttgcaaagaatgtatgttggacaaagacaaagtatctctgttgggagacgttgttcactgaggatttagcaagggagagcgtaacttgagtgtttgaagccgtctcgttcaaccgatgggggttgtgaattttgtgttcagagcgtcagaggacttgcaggtgaaatagcttccttttggattactcccacaaagctcagacactttgagacatattcgggtaattatctgctgataccagtagtaacaggttatactaagatgtcagttcctaagatctgtcacacagcgaggttgtggtgcggatagcataagtgtctcttgacactgtagtttatatgtaatggttgtaattcagttttaatgatgagtgaagctcagacttaattttctctcttattttgaagtgagttttctgcttcaaaggtgttgtgcaaaaaaaaaaaaatagactgtattgggggggttgacacaaacctgaagtacacctttttctttctcgaagtctgtaaaagttacagatttataaaaactgaaggaatttgggctacagaattttcattggtgcttgctatcctcttccctagtcatttgttgcccagggaacaaaaatagcaattgtttgtatgctgaagttttgtgcttcagtttattttggcctggcatgtgaagtttgaag

SEQ ID NO: 310861 - DNA, 788 bp, Homo sapiens
gaaaagcgaccccacattcaaggacgccaatggcatgttgagctttcccaatctaaaccaggtgcgtggagggaagcaagtgcttactcccagcttgaaccctgagcagcggttctctaactttagtgtcctgtgggcgacacctgggaggcggttaggaacgctactcctagggcccttcgtaagacctgctgagcctcagggtctgggatagagcctgggaatctgcgctttcaccagcttcccaggtgattcaaacgcagtggctcacggaccccactttgagaaacgcagactgggctgtttgccttcagaagctggactggaaattggtattttgaggagaactgaatccactttgcaaagaatgtatgttggacaaagacaaagtatctctgttgggagacgttgttcactgaggatttagcaagggagagcgtaacttgagtgtttgaagccgtctcgttcaaccgatgggggttgtgaattttgtgttcagagcgtcagaggacttgcaggtattagaaaactactcggatgctccaatgacaccaaaacagattctgcaggtcatagaggcagaaggactaaaggaaatgagaagtgggacttcccctctcgcatgcctcaatgctatgctacattccaattcaagaggaggagaggggttgttttataaactgcctggccgaatcagccttttcacgctcaaggtgtgagccactgcaccaggccccttcatcttaattttaatatatctttgaataaacaccattgtatgaacctgc

SEQ ID NO: 310862 - DNA, 293 bp, Homo sapiens
cgtgggccgaggccgcgcgcctggtattagaaaactactcggatgctccaatgacaccaaaacagattctgcaggtcatagaggcagaaggactaaaggaaatgagaagtgggacttcccctctcgcatgcctcaatgctatgctacattccaattcaagaggaggagaggggttgttttataaactgcctggccgaatcagccttttcacgctcaaggtgtgagccactgcaccaggccccttcatcttaattttaatatatctttgaataaacaccattgtatgaacctgc

SEQ ID NO: 310863 - DNA, 7165 bp, Homo sapiens
gaaaagcgaccccacattcaaggacgccaatggcatgttgagctttcccaatctaaaccaggtgcgtggagggaagcaagtgcttactcccagcttgaaccctgagcagcggttctctaactttagtgtcctgtgggcgacacctgggaggcggttaggaacgctactcctagggcccttcgtaagacctgctgagcctcagggtctgggatagagcctgggaatctgcgctttcaccagcttcccaggtgattcaaacgcagtggctcacggaccccactttgagaaacgcagactgggctgtttgccttcagaagctggactggaaattggtattttgaggagaactgaatccactttgcaaagaatgtatgttggacaaagacaaagtatctctgttgggagacgttgttcactgaggatttagcaagggagagcgtaacttgagtgtttgaagccgtctcgttcaaccgatgggggttgtgaattttgtgttcagagcgtcagaggacttgcaggtattagaaaactactcggatgctccaatgacaccaaaacagattctgcaggtcatagaggcagaaggactaaaggaaatgagaagtgggacttcccctctcgcatgcctcaatgctatgctacattccaattcaagaggaggagaggggttgttttataaactgcctggccgaatcagccttttcacgctcaagagatgaagtcttgctatgttggttaaactggtctcaaactcctggcctcaagtgatcttcccaccacagcttcacaaagcactgggatggattacagaaggatgccctgcagtggtctcgccatccagctacagtggagggagaggagccagaggacacggctgatgtggagagctgtgggtctaatgaagccagcactgtgagtggtgaaaacgatgtatctcttgatgaaacatcttcgaacgcatcctgttctacagaatctcagagtcgacctctttccaatcccagggacagctacagagcttcctcacaggcgaacaaacaaaagaaaaagactggggtgatgctgcctcgagttgtcctgactcctctgaaggtaaacggggcccacgtggaatctgcatcagggttctcgggctgccacgccgatggcgagagcggcagcccgtccagcagcagcagcggctctctggccctgggcagcgctgctattcgtggccaggccgaggtcacccaggaccctgccccgctcctgagaggcttccggaagccagccacaggtcaaatgaagcgcaacagaggggaagaaatagattttgagacacctgggtccattcttgtcaacaccaacctccgtgccctgatcaactctcggaccttccatgccttaccatcacacttccagcagcagctcctcttcctcctgcctgaagtagacagacaggtggggacggatggcctgttgcgtctcagcagcagtgcactaaataacgagttttttacccatgcggctcagagctggcgggagcgcctggctgatggtgaatttactcatgagatgcaagtcaggatacgacaggaaatggagaaggaaaagaaggtggaacaatggaaagaaaagttctttgaagactactatggacagaagctgggtttgaccaaagaagagtcattgcagcagaacgtgggccaggaggaggctgaaatcaaaagtggcttgtgtgtcccaggagaatcagtgcgtatacagcgtggtccagccacccgacagcgagatgggcattttaagaaacgctctcggccagatctccgaaccagagccagaaggaatctgtacaaaaaacaggagtcagaacaagcaggggttgctaaggatgcaaaatctgtggcctcagatgttcccctctacaaggatggggaggctaagactgacccagcagggctgagcagtccccatctgccaggcacatcctctgcagcacccgacctggagggtcccgaattcccagttgagtctgtggcttctcggatccaggctgagccagacaacttggcacgtgcctctgcatctccagacagaattcctagcctgcctcaggaaactgtggatcaggaacccaaggatcagaagaggaaatcctttgagcaggcggcctctgcatcctttcccgaaaagaagccccggcttgaagatcgtcagtcctttcgtaacacaattgaaagtgttcacaccgaaaagccacagcccactaaagaggagcccaaagtcccgcccatccggattcaactttcacgtatcaaaccaccctgggtggttaaaggtcagcccacttaccagatatgcccccggatcatccccaccacggagtcctcctgccggggttggactggcgccaggaccctcgcagacattaaagcccgtgctctgcaggtccgaggggcgagaggtcaccactgccatagagaggcggccaccactgccatcggaggggggggtggcccgggtggaggtggcggcggggccaccgatgagggaggtggcagaggcagcagcagtggtgatggtggtgaggcctgtggccaccctgagcccaggggaggcccgagcacccctggaaagtgtacgtcagatctacagcgaacacaactactgccgccttatcctctaaatggggagcatacccaggccggaactgccatgtccagagctaggagagaggacctgccttctctgagaaaggaggaaagctgcctactacagagggctacagttggactcacagatgggctaggagatgcctcccaactccccgttgctcccactggggaccagccatgccaggccttgcccctactgtcctcccaaacctcagtagctgagagattagtggagcagcctcagttgcatccggatgttagaactgaatgtgagtctggcaccacttcctgggaaagtgatgatgaggagcaaggacccaccgttcctgcagacaatggtcccattccgtctctagtgggagatgatacattagagaaaggaactggccaagctcttgacagtcatcccactatgaaggatcctgtaaatgtgacccccagttccacacctgaatcctcaccgactgattgcctgcagaacagagcatttgatgacgaattagggcttggtggctcatgccctcctatgagggaaagtgatactagacaagaaaacttgaaaaccaaggctctcgtttctaacagttctttgcattggatacccatcccatcgaatgatgaggtagtgaaacagcccaaaccagaatccagagaacacataccatctgttgagccccaggttggagaggagtgggagaaagctgctcccacccctcctgcattgcctggggatttgacagctgaggagggtctagatcctcttgacagccttacttcactctggactgtgccatctcgaggaggcagtgacagcaatggcagttactgtcaacaggtggacattgaaaagctgaaaatcaacggagactctgaagcactgagtcctcacggtgagtccacggatacagcctctgactttgaaggtcacctcacggaggacagcagtgaggctgacactagagaagctgcagtgacaaagggatcttcggtggacaaggatgagaaacccaattggaaccaatctgccccactgtccaaggtgaatggtgacatgcgtctggttacaaggacagatgggatggttgctcctcagagctgggtgtctcgagtatgtgcggtccgccaaaagatcccagattccctactgctggccagtactgagtaccagccaagagccgtgtgcctgtccatgcctgggtcctcagtggaggccactaacccacttgtgatgcagttgctgcagggtagcttgcccctagagaaggttcttccaccagcccacgatgacagcatgtcagaatccccacaagtaccacttacaaaagaccagagccatggctcgctacgcatgggatctttacatggtcttggaaaaaacagtggcatggttgatggaagcagccccagttctttaagggctttgaaggagcctcttctgccagatagctgtgaaacaggcactggtcttgccaggattgaggccacccaggctcctggagcaccccaaaagaattgcaaggcagtcccaagttttgactccctccatccagtgacaaatcccattacatcctctaggaaactggaagaaatggattccaaagagcagttctcttcctttagttgtgaagatcagaaggaagtccgtgctatgtcacaggacagtaattcaaatgctgctccaggaaagagcccaggagatcttactacctcgagaacacctcgtttctcatctccaaatgtgatctcctttggtccagagcagacaggtcgggccctgggtgatcagagcaatgttacaggccaagggaagaagctttttggctctgggaatgtggctgcaacccttcagcgccccaggcctgcggacccgatgcctcttcctgctgagatccctccagtttttcccagtgggaagttgggaccaagcacaaactccatgtctggtggggtacagactccaagggaagactgggctccaaagccacatgcctttgttggcagcgtcaagaatgagaagacttttgtggggggtcctcttaaggcaaatgccgagaacaggaaagctactgggcatagtcccctggaactggtgggtcacttggaagggatgccctttgtcatggacttgcccttctggaaattaccccgagagccagggaaggggctcagtgagcctctggagccttcttctctcccctcccaactcagcatcaagcaggcattttatgggaagctttctaaactccaactgagttccaccagctttaattattcctctagctctcccacctttcccaaaggccttgctggaagtgtggtgcagctgagccacaaagcaaactttggtgcgagccacagtgcatcactttccttgcaaatgttcactgacagcagcacggtggaaagcatctcgctccagtgtgcgtgcagcctgaaagccatgatcatgtgccaaggctgcggtgcgttctgtcacgatgactgtattggaccctcaaagctctgtgtattgtgccttgtggtgagataataaattatggccatgggaaacattgtatatttagtgtgtgtattttgataatgattgatcttaaatctgtatacagaatatcattgatataatactctttaggcaggagcactcttgccttcccccaaaatttacactgctaaagccctctgtcacttggcgacccttctggtcttgctggaggggtttcctgggtataacccattgggctgcccaaggccagccagcctgagctctcctgcaagacagagcctgatgtggcacggagtggggttgcggggggtggggggactgcctgactcccagagggacttgaaactgaagcaagaaggttgcattctccaccaagggagttaacctacctgaactaagtagaaatgccagtcttccactaccccctccctgccatcttttcttctgctactttggggagttgatggccaggaaagaagccagcacagggttaaagtaactcctggcattgcccaccagggggctggtgcacctgctgacctcagggtcacagttgagtcatttgccagttgacggagcaagtttgaccttggttctgttgctgaagcaaatttggaacttttctgtctcagtgtgatccactaacccacaggatcatttggaaccttgaatagctctgcttggacaatggggttggggaatagggttgtctttcctatgaaaatgccatctgtagaccttgtgagtcagccgtccagatgtttgcaggtgaattcctctgcttgacatcctccctgtcactttggaccctatgggagtgggcatctccacgcacctgtgtatgtgaaagtcattttacatttcaaagcagtgtgtgtttcttatttttatatttttaactctttattcttggatgtataaagtgaactttttggcttctgtaagtatgctctatgcacctctaatgttttatcatgtatttatatgttgtacacagtactggctgattctgtaaatggatgtattgtacagagaacatgaacgtctcttcctaattttacatcttcagcatcattgcattaaagtggtgtaatctccttctctacatctgttgtcagagccactgagtgctgtgctgctcgacgtgagggtgaaatgattgacttgtgacctgccaggttgcccgatgccctgttgggtcaccggctggacctgctgcagcctgcagagccacagtcagcctgcccacatgccaccgagcaaacgcatcttgcttttcacatctctcctcctacagccttaatggctgcttgctgccatatgtgacaaatcaccaccaccagtgttaagtgcttctggattcatgggtgagttccctgggcagcccccaggaaggccttccagatctggctccagggtcaccacctgtcacagcaatacctgggaccatgctctcctgggactgtgaggctccttttgacgtacttttgacatcaggcaggtttgggaagaaacaaagccatgcctgctcctgcctctctcccaacatgtttccagcaagtagatgcccctgtgtgtgttttcccttgccttgtttcctgccttatatcttgtatttcgacttattacagagttgagggttcttgcttaatttagatcaagtataaaatttgtatgacttcaagtctcattttatctgaaaggtttttttctcatttaatctgatgtggcattttcgtcatctgaagcatgagtgacaagttgggaatgatgtggtgatttagaatgcagtattggccaagtccaagttgtcaacttaagcgtctgtttaccaaagaccgggaacaggggcccaaacatgtccagtcctcttcttccctctgctggaacctttggggacactcaagggtacagtttgacactgatctggtccatgaggctgcccagagaaagcactgcttctgtatgtctcttgtggtattggaacaataaacccgtacaacctgca

SEQ ID NO: 310864 - DNA, 7068 bp, Homo sapiens
gaaaagcgaccccacattcaaggacgccaatggcatgttgagctttcccaatctaaaccaggtgcgtggagggaagcaagtgcttactcccagcttgaaccctgagcagcggttctctaactttagtgtcctgtgggcgacacctgggaggcggttaggaacgctactcctagggcccttcgtaagacctgctgagcctcagggtctgggatagagcctgggaatctgcgctttcaccagcttcccaggtgattcaaacgcagtggctcacggaccccactttgagaaacgcagactgggctgtttgccttcagaagctggactggaaattggtattttgaggagaactgaatccactttgcaaagaatgtatgttggacaaagacaaagtatctctgttgggagacgttgttcactgaggatttagcaagggagagcgtaacttgagtgtttgaagccgtctcgttcaaccgatgggggttgtgaattttgtgttcagagcgtcagaggacttgcaggtattagaaaactactcggatgctccaatgacaccaaaacagattctgcaggtcatagaggcagaaggactaaaggaaatgagaagtgggacttcccctctcgcatgcctcaatgctatgctacattccaattcaagaggaggagaggggttgttttataaactgcctggccgaatcagccttttcacgctcaagaaggatgccctgcagtggtctcgccatccagctacagtggagggagaggagccagaggacacggctgatgtggagagctgtgggtctaatgaagccagcactgtgagtggtgaaaacgatgtatctcttgatgaaacatcttcgaacgcatcctgttctacagaatctcagagtcgacctctttccaatcccagggacagctacagagcttcctcacaggcgaacaaacaaaagaaaaagactggggtgatgctgcctcgagttgtcctgactcctctgaaggtaaacggggcccacgtggaatctgcatcagggttctcgggctgccacgccgatggcgagagcggcagcccgtccagcagcagcagcggctctctggccctgggcagcgctgctattcgtggccaggccgaggtcacccaggaccctgccccgctcctgagaggcttccggaagccagccacaggtcaaatgaagcgcaacagaggggaagaaatagattttgagacacctgggtccattcttgtcaacaccaacctccgtgccctgatcaactctcggaccttccatgccttaccatcacacttccagcagcagctcctcttcctcctgcctgaagtagacagacaggtggggacggatggcctgttgcgtctcagcagcagtgcactaaataacgagttttttacccatgcggctcagagctggcgggagcgcctggctgatggtgaatttactcatgagatgcaagtcaggatacgacaggaaatggagaaggaaaagaaggtggaacaatggaaagaaaagttctttgaagactactatggacagaagctgggtttgaccaaagaagagtcattgcagcagaacgtgggccaggaggaggctgaaatcaaaagtggcttgtgtgtcccaggagaatcagtgcgtatacagcgtggtccagccacccgacagcgagatgggcattttaagaaacgctctcggccagatctccgaaccagagccagaaggaatctgtacaaaaaacaggagtcagaacaagcaggggttgctaaggatgcaaaatctgtggcctcagatgttcccctctacaaggatggggaggctaagactgacccagcagggctgagcagtccccatctgccaggcacatcctctgcagcacccgacctggagggtcccgaattcccagttgagtctgtggcttctcggatccaggctgagccagacaacttggcacgtgcctctgcatctccagacagaattcctagcctgcctcaggaaactgtggatcaggaacccaaggatcagaagaggaaatcctttgagcaggcggcctctgcatcctttcccgaaaagaagccccggcttgaagatcgtcagtcctttcgtaacacaattgaaagtgttcacaccgaaaagccacagcccactaaagaggagcccaaagtcccgcccatccggattcaactttcacgtatcaaaccaccctgggtggttaaaggtcagcccacttaccagatatgcccccggatcatccccaccacggagtcctcctgccggggttggactggcgccaggaccctcgcagacattaaagcccgtgctctgcaggtccgaggggcgagaggtcaccactgccatagagaggcggccaccactgccatcggaggggggggtggcccgggtggaggtggcggcggggccaccgatgagggaggtggcagaggcagcagcagtggtgatggtggtgaggcctgtggccaccctgagcccaggggaggcccgagcacccctggaaagtgtacgtcagatctacagcgaacacaactactgccgccttatcctctaaatggggagcatacccaggccggaactgccatgtccagagctaggagagaggacctgccttctctgagaaaggaggaaagctgcctactacagagggctacagttggactcacagatgggctaggagatgcctcccaactccccgttgctcccactggggaccagccatgccaggccttgcccctactgtcctcccaaacctcagtagctgagagattagtggagcagcctcagttgcatccggatgttagaactgaatgtgagtctggcaccacttcctgggaaagtgatgatgaggagcaaggacccaccgttcctgcagacaatggtcccattccgtctctagtgggagatgatacattagagaaaggaactggccaagctcttgacagtcatcccactatgaaggatcctgtaaatgtgacccccagttccacacctgaatcctcaccgactgattgcctgcagaacagagcatttgatgacgaattagggcttggtggctcatgccctcctatgagggaaagtgatactagacaagaaaacttgaaaaccaaggctctcgtttctaacagttctttgcattggatacccatcccatcgaatgatgaggtagtgaaacagcccaaaccagaatccagagaacacataccatctgttgagccccaggttggagaggagtgggagaaagctgctcccacccctcctgcattgcctggggatttgacagctgaggagggtctagatcctcttgacagccttacttcactctggactgtgccatctcgaggaggcagtgacagcaatggcagttactgtcaacaggtggacattgaaaagctgaaaatcaacggagactctgaagcactgagtcctcacggtgagtccacggatacagcctctgactttgaaggtcacctcacggaggacagcagtgaggctgacactagagaagctgcagtgacaaagggatcttcggtggacaaggatgagaaacccaattggaaccaatctgccccactgtccaaggtgaatggtgacatgcgtctggttacaaggacagatgggatggttgctcctcagagctgggtgtctcgagtatgtgcggtccgccaaaagatcccagattccctactgctggccagtactgagtaccagccaagagccgtgtgcctgtccatgcctgggtcctcagtggaggccactaacccacttgtgatgcagttgctgcagggtagcttgcccctagagaaggttcttccaccagcccacgatgacagcatgtcagaatccccacaagtaccacttacaaaagaccagagccatggctcgctacgcatgggatctttacatggtcttggaaaaaacagtggcatggttgatggaagcagccccagttctttaagggctttgaaggagcctcttctgccagatagctgtgaaacaggcactggtcttgccaggattgaggccacccaggctcctggagcaccccaaaagaattgcaaggcagtcccaagttttgactccctccatccagtgacaaatcccattacatcctctaggaaactggaagaaatggattccaaagagcagttctcttcctttagttgtgaagatcagaaggaagtccgtgctatgtcacaggacagtaattcaaatgctgctccaggaaagagcccaggagatcttactacctcgagaacacctcgtttctcatctccaaatgtgatctcctttggtccagagcagacaggtcgggccctgggtgatcagagcaatgttacaggccaagggaagaagctttttggctctgggaatgtggctgcaacccttcagcgccccaggcctgcggacccgatgcctcttcctgctgagatccctccagtttttcccagtgggaagttgggaccaagcacaaactccatgtctggtggggtacagactccaagggaagactgggctccaaagccacatgcctttgttggcagcgtcaagaatgagaagacttttgtggggggtcctcttaaggcaaatgccgagaacaggaaagctactgggcatagtcccctggaactggtgggtcacttggaagggatgccctttgtcatggacttgcccttctggaaattaccccgagagccagggaaggggctcagtgagcctctggagccttcttctctcccctcccaactcagcatcaagcaggcattttatgggaagctttctaaactccaactgagttccaccagctttaattattcctctagctctcccacctttcccaaaggccttgctggaagtgtggtgcagctgagccacaaagcaaactttggtgcgagccacagtgcatcactttccttgcaaatgttcactgacagcagcacggtggaaagcatctcgctccagtgtgcgtgcagcctgaaagccatgatcatgtgccaaggctgcggtgcgttctgtcacgatgactgtattggaccctcaaagctctgtgtattgtgccttgtggtgagataataaattatggccatgggaaacattgtatatttagtgtgtgtattttgataatgattgatcttaaatctgtatacagaatatcattgatataatactctttaggcaggagcactcttgccttcccccaaaatttacactgctaaagccctctgtcacttggcgacccttctggtcttgctggaggggtttcctgggtataacccattgggctgcccaaggccagccagcctgagctctcctgcaagacagagcctgatgtggcacggagtggggttgcggggggtggggggactgcctgactcccagagggacttgaaactgaagcaagaaggttgcattctccaccaagggagttaacctacctgaactaagtagaaatgccagtcttccactaccccctccctgccatcttttcttctgctactttggggagttgatggccaggaaagaagccagcacagggttaaagtaactcctggcattgcccaccagggggctggtgcacctgctgacctcagggtcacagttgagtcatttgccagttgacggagcaagtttgaccttggttctgttgctgaagcaaatttggaacttttctgtctcagtgtgatccactaacccacaggatcatttggaaccttgaatagctctgcttggacaatggggttggggaatagggttgtctttcctatgaaaatgccatctgtagaccttgtgagtcagccgtccagatgtttgcaggtgaattcctctgcttgacatcctccctgtcactttggaccctatgggagtgggcatctccacgcacctgtgtatgtgaaagtcattttacatttcaaagcagtgtgtgtttcttatttttatatttttaactctttattcttggatgtataaagtgaactttttggcttctgtaagtatgctctatgcacctctaatgttttatcatgtatttatatgttgtacacagtactggctgattctgtaaatggatgtattgtacagagaacatgaacgtctcttcctaattttacatcttcagcatcattgcattaaagtggtgtaatctccttctctacatctgttgtcagagccactgagtgctgtgctgctcgacgtgagggtgaaatgattgacttgtgacctgccaggttgcccgatgccctgttgggtcaccggctggacctgctgcagcctgcagagccacagtcagcctgcccacatgccaccgagcaaacgcatcttgcttttcacatctctcctcctacagccttaatggctgcttgctgccatatgtgacaaatcaccaccaccagtgttaagtgcttctggattcatgggtgagttccctgggcagcccccaggaaggccttccagatctggctccagggtcaccacctgtcacagcaatacctgggaccatgctctcctgggactgtgaggctccttttgacgtacttttgacatcaggcaggtttgggaagaaacaaagccatgcctgctcctgcctctctcccaacatgtttccagcaagtagatgcccctgtgtgtgttttcccttgccttgtttcctgccttatatcttgtatttcgacttattacagagttgagggttcttgcttaatttagatcaagtataaaatttgtatgacttcaagtctcattttatctgaaaggtttttttctcatttaatctgatgtggcattttcgtcatctgaagcatgagtgacaagttgggaatgatgtggtgatttagaatgcagtattggccaagtccaagttgtcaacttaagcgtctgtttaccaaagaccgggaacaggggcccaaacatgtccagtcctcttcttccctctgctggaacctttggggacactcaagggtacagtttgacactgatctggtccatgaggctgcccagagaaagcactgcttctgtatgtctcttgtggtattggaacaataaacccgtacaacctgca

SEQ ID NO: 310865 - DNA, 6328 bp, Homo sapiens
ctttgtctcccagggcagtcgtgaggatccaacggaggatttgattatgccagtgctttgtaaaaggtgtagtgctatacaaataaagatggcagtttggcacctgtaaggtgatattttaaagccagaccatgaagtggtggtttctctcagcctaaggctgggagatggaagcatcccagtattgctggcagcatctcagggagagctgggagaaatgagcttgtctgagagccatgggcgcggcttggtgatacttttgaccagtggaatgctgtgccttcagggttctcgggctgccacgccgatggcgagagcggcagcccgtccagcagcagcagcggctctctggccctgggcagcgctgctattcgtggccaggccgaggtcacccaggaccctgccccgctcctgagaggcttccggaagccagccacaggtcaaatgaagcgcaacagaggggaagaaatagattttgagacacctgggtccattcttgtcaacaccaacctccgtgccctgatcaactctcggaccttccatgccttaccatcacacttccagcagcagctcctcttcctcctgcctgaagtagacagacaggtggggacggatggcctgttgcgtctcagcagcagtgcactaaataacgagttttttacccatgcggctcagagctggcgggagcgcctggctgatggtgaatttactcatgagatgcaagtcaggatacgacaggaaatggagaaggaaaagaaggtggaacaatggaaagaaaagttctttgaagactactatggacagaagctgggtttgaccaaagaagagtcattgcagcagaacgtgggccaggaggaggctgaaatcaaaagtggcttgtgtgtcccaggagaatcagtgcgtatacagcgtggtccagccacccgacagcgagatgggcattttaagaaacgctctcggccagatctccgaaccagagccagaaggaatctgtacaaaaaacaggagtcagaacaagcaggggttgctaaggatgcaaaatctgtggcctcagatgttcccctctacaaggatggggaggctaagactgacccagcagggctgagcagtccccatctgccaggcacatcctctgcagcacccgacctggagggtcccgaattcccagttgagtctgtggcttctcggatccaggctgagccagacaacttggcacgtgcctctgcatctccagacagaattcctagcctgcctcaggaaactgtggatcaggaacccaaggatcagaagaggaaatcctttgagcaggcggcctctgcatcctttcccgaaaagaagccccggcttgaagatcgtcagtcctttcgtaacacaattgaaagtgttcacaccgaaaagccacagcccactaaagaggagcccaaagtcccgcccatccggattcaactttcacgtatcaaaccaccctgggtggttaaaggtcagcccacttaccagatatgcccccggatcatccccaccacggagtcctcctgccggggttggactggcgccaggaccctcgcagacattaaagcccgtgctctgcaggtccgaggggcgagaggtcaccactgccatagagaggcggccaccactgccatcggaggggggggtggcccgggtggaggtggcggcggggccaccgatgagggaggtggcagaggcagcagcagtggtgatggtggtgaggcctgtggccaccctgagcccaggggaggcccgagcacccctggaaagtgtacgtcagatctacagcgaacacaactactgccgccttatcctctaaatggggagcatacccaggccggaactgccatgtccagagctaggagagaggacctgccttctctgagaaaggaggaaagctgcctactacagagggctacagttggactcacagatgggctaggagatgcctcccaactccccgttgctcccactggggaccagccatgccaggccttgcccctactgtcctcccaaacctcagtagctgagagattagtggagcagcctcagttgcatccggatgttagaactgaatgtgagtctggcaccacttcctgggaaagtgatgatgaggagcaaggacccaccgttcctgcagacaatggtcccattccgtctctagtgggagatgatacattagagaaaggaactggccaagctcttgacagtcatcccactatgaaggatcctgtaaatgtgacccccagttccacacctgaatcctcaccgactgattgcctgcagaacagagcatttgatgacgaattagggcttggtggctcatgccctcctatgagggaaagtgatactagacaagaaaacttgaaaaccaaggctctcgtttctaacagttctttgcattggatacccatcccatcgaatgatgaggtagtgaaacagcccaaaccagaatccagagaacacataccatctgttgagccccaggttggagaggagtgggagaaagctgctcccacccctcctgcattgcctggggatttgacagctgaggagggtctagatcctcttgacagccttacttcactctggactgtgccatctcgaggaggcagtgacagcaatggcagttactgtcaacaggtggacattgaaaagctgaaaatcaacggagactctgaagcactgagtcctcacggtgagtccacggatacagcctctgactttgaaggtcacctcacggaggacagcagtgaggctgacactagagaagctgcagtgacaaagggatcttcggtggacaaggatgagaaacccaattggaaccaatctgccccactgtccaaggtgaatggtgacatgcgtctggttacaaggacagatgggatggttgctcctcagagctgggtgtctcgagtatgtgcggtccgccaaaagatcccagattccctactgctggccagtactgagtaccagccaagagccgtgtgcctgtccatgcctgggtcctcagtggaggccactaacccacttgtgatgcagttgctgcagggtagcttgcccctagagaaggttcttccaccagcccacgatgacagcatgtcagaatccccacaagtaccacttacaaaagaccagagccatggctcgctacgcatgggatctttacatggtcttggaaaaaacagtggcatggttgatggaagcagccccagttctttaagggctttgaaggagcctcttctgccagatagctgtgaaacaggcactggtcttgccaggattgaggccacccaggctcctggagcaccccaaaagaattgcaaggcagtcccaagttttgactccctccatccagtgacaaatcccattacatcctctaggaaactggaagaaatggattccaaagagcagttctcttcctttagttgtgaagatcagaaggaagtccgtgctatgtcacaggacagtaattcaaatgctgctccaggaaagagcccaggagatcttactacctcgagaacacctcgtttctcatctccaaatgtgatctcctttggtccagagcagacaggtcgggccctgggtgatcagagcaatgttacaggccaagggaagaagctttttggctctgggaatgtggctgcaacccttcagcgccccaggcctgcggacccgatgcctcttcctgctgagatccctccagtttttcccagtgggaagttgggaccaagcacaaactccatgtctggtggggtacagactccaagggaagactgggctccaaagccacatgcctttgttggcagcgtcaagaatgagaagacttttgtggggggtcctcttaaggcaaatgccgagaacaggaaagctactgggcatagtcccctggaactggtgggtcacttggaagggatgccctttgtcatggacttgcccttctggaaattaccccgagagccagggaaggggctcagtgagcctctggagccttcttctctcccctcccaactcagcatcaagcaggcattttatgggaagctttctaaactccaactgagttccaccagctttaattattcctctagctctcccacctttcccaaaggccttgctggaagtgtggtgcagctgagccacaaagcaaactttggtgcgagccacagtgcatcactttccttgcaaatgttcactgacagcagcacggtggaaagcatctcgctccagtgtgcgtgcagcctgaaagccatgatcatgtgccaaggctgcggtgcgttctgtcacgatgactgtattggaccctcaaagctctgtgtattgtgccttgtggtgagataataaattatggccatgggaaacattgtatatttagtgtgtgtattttgataatgattgatcttaaatctgtatacagaatatcattgatataatactctttaggcaggagcactcttgccttcccccaaaatttacactgctaaagccctctgtcacttggcgacccttctggtcttgctggaggggtttcctgggtataacccattgggctgcccaaggccagccagcctgagctctcctgcaagacagagcctgatgtggcacggagtggggttgcggggggtggggggactgcctgactcccagagggacttgaaactgaagcaagaaggttgcattctccaccaagggagttaacctacctgaactaagtagaaatgccagtcttccactaccccctccctgccatcttttcttctgctactttggggagttgatggccaggaaagaagccagcacagggttaaagtaactcctggcattgcccaccagggggctggtgcacctgctgacctcagggtcacagttgagtcatttgccagttgacggagcaagtttgaccttggttctgttgctgaagcaaatttggaacttttctgtctcagtgtgatccactaacccacaggatcatttggaaccttgaatagctctgcttggacaatggggttggggaatagggttgtctttcctatgaaaatgccatctgtagaccttgtgagtcagccgtccagatgtttgcaggtgaattcctctgcttgacatcctccctgtcactttggaccctatgggagtgggcatctccacgcacctgtgtatgtgaaagtcattttacatttcaaagcagtgtgtgtttcttatttttatatttttaactctttattcttggatgtataaagtgaactttttggcttctgtaagtatgctctatgcacctctaatgttttatcatgtatttatatgttgtacacagtactggctgattctgtaaatggatgtattgtacagagaacatgaacgtctcttcctaattttacatcttcagcatcattgcattaaagtggtgtaatctccttctctacatctgttgtcagagccactgagtgctgtgctgctcgacgtgagggtgaaatgattgacttgtgacctgccaggttgcccgatgccctgttgggtcaccggctggacctgctgcagcctgcagagccacagtcagcctgcccacatgccaccgagcaaacgcatcttgcttttcacatctctcctcctacagccttaatggctgcttgctgccatatgtgacaaatcaccaccaccagtgttaagtgcttctggattcatgggtgagttccctgggcagcccccaggaaggccttccagatctggctccagggtcaccacctgtcacagcaatacctgggaccatgctctcctgggactgtgaggctccttttgacgtacttttgacatcaggcaggtttgggaagaaacaaagccatgcctgctcctgcctctctcccaacatgtttccagcaagtagatgcccctgtgtgtgttttcccttgccttgtttcctgccttatatcttgtatttcgacttattacagagttgagggttcttgcttaatttagatcaagtataaaatttgtatgacttcaagtctcattttatctgaaaggtttttttctcatttaatctgatgtggcattttcgtcatctgaagcatgagtgacaagttgggaatgatgtggtgatttagaatgcagtattggccaagtccaagttgtcaacttaagcgtctgtttaccaaagaccgggaacaggggcccaaacatgtccagtcctcttcttccctctgctggaacctttggggacactcaagggtacagtttgacactgatctggtccatgaggctgcccagagaaagcactgcttctgtatgtctcttgtggtattggaacaataaacccgtacaacctgca

SEQ ID NO: 310866 - DNA, 6912 bp, Homo sapiens
gaaaagcgaccccacattcaaggacgccaatggcatgttgagctttcccaatctaaaccaggtgcgtggagggaagcaagtgcttactcccagcttgaaccctgagcagcggttctctaactttagtgtcctgtgggcgacacctgggaggcggttaggaacgctactcctagggcccttcgtaagacctgctgagcctcagggtctgggatagagcctgggaatctgcgctttcaccagcttcccaggtgattcaaacgcagtggctcacggaccccactttgagaaacgcagactgggctgtttgccttcagaagctggactggaaattggtattttgaggagaactgaatccactttgcaaagaatgtatgttggacaaagacaaagtatctctgttgggagacgttgttcactgaggatttagcaagggagagcgtaacttgagtgtttgaagccgtctcgttcaaccgatgggggttgtgaattttgtgttcagagcgtcagaggacttgcaggtattagaaaactactcggatgctccaatgacaccaaaacagattctgcaggtcatagaggcagaaggactaaaggaaatgagaagtgggacttcccctctcgcatgcctcaatgctatgctacattccaattcaagaggaggagaggggttgttttataaactgcctggccgaatcagccttttcacgctcaagagatgaagtcttgctatgttggttaaactggtctcaaactcctggcctcaagtgatcttcccaccacagcttcacaaagcactgggatggattacagaaggatgccctgcagtggtctcgccatccagctacagtggagggagaggagccagaggacacggctgatgtggagagctgtgggtctaatgaagccagcactgtgagtggtgaaaacgatgtatctcttgatgaaacatcttcgaacgcatcctgttctacagaatctcagagtcgacctctttccaatcccagggacagctacagagcttcctcacaggcgaacaaacaaaagaaaaagactggggtgatgctgcctcgagttgtcctgactcctctgaaggtaaacggggcccacgtggaatctgcatcagggttctcgggctgccacgccgatggcgagagcggcagcccgtccagcagcagcagcggctctctggccctgggcagcgctgctattcgtggccaggccgaggtcacccaggaccctgccccgctcctgagaggcttccggaagccagccacaggtcaaatgaagcgcaacagaggggaagaaatagattttgagacacctgggtccattcttgtcaacaccaacctccgtgccctgatcaactctcggaccttccatgccttaccatcacacttccagcagcagctcctcttcctcctgcctgaagtagacagacaggtggggacggatggcctgttgcgtctcagcagcagtgcactaaataacgagttttttacccatgcggctcagagctggcgggagcgcctggctgatggtgaatttactcatgagatgcaagtcaggatacgacaggaaatggagaaggaaaagaaggtggaacaatggaaagaaaagttctttgaagactactatggacagaagctgggtttgaccaaagaagagtcattgcagcagaacgtgggccaggaggaggctgaaatcaaaagtggcttgtgtgtcccaggagaatcagtgcgtatacagcgtggtccagccacccgacagcgagatgggcattttaagaaacgctctcggccagatctccgaaccagagccagaaggaatctgtacaaaaaacaggagtcagaacaagcaggggttgctaaggatgcaaaatctgtggcctcagatgttcccctctacaaggatggggaggctaagactgacccagcagggctgagcagtccccatctgccaggcacatcctctgcagcacccgacctggagggtcccgaattcccagttgagtctgtggcttctcggatccaggctgagccagacaacttggcacgtgcctctgcatctccagacagaattcctagcctgcctcaggaaactgtggatcaggaacccaaggatcagaagaggaaatcctttgagcaggcggcctctgcatcctttcccgaaaagaagccccggcttgaagatcgtcagtcctttcgtaacacaattgaaagtgttcacaccgaaaagccacagcccactaaagaggagcccaaagtcccgcccatccggattcaactttcacgtatcaaaccaccctgggtggtgaggcctgtggccaccctgagcccaggggaggcccgagcacccctggaaagtgtacgtcagatctacagcgaacacaactactgccgccttatcctctaaatggggagcatacccaggccggaactgccatgtccagagctaggagagaggacctgccttctctgagaaaggaggaaagctgcctactacagagggctacagttggactcacagatgggctaggagatgcctcccaactccccgttgctcccactggggaccagccatgccaggccttgcccctactgtcctcccaaacctcagtagctgagagattagtggagcagcctcagttgcatccggatgttagaactgaatgtgagtctggcaccacttcctgggaaagtgatgatgaggagcaaggacccaccgttcctgcagacaatggtcccattccgtctctagtgggagatgatacattagagaaaggaactggccaagctcttgacagtcatcccactatgaaggatcctgtaaatgtgacccccagttccacacctgaatcctcaccgactgattgcctgcagaacagagcatttgatgacgaattagggcttggtggctcatgccctcctatgagggaaagtgatactagacaagaaaacttgaaaaccaaggctctcgtttctaacagttctttgcattggatacccatcccatcgaatgatgaggtagtgaaacagcccaaaccagaatccagagaacacataccatctgttgagccccaggttggagaggagtgggagaaagctgctcccacccctcctgcattgcctggggatttgacagctgaggagggtctagatcctcttgacagccttacttcactctggactgtgccatctcgaggaggcagtgacagcaatggcagttactgtcaacaggtggacattgaaaagctgaaaatcaacggagactctgaagcactgagtcctcacggtgagtccacggatacagcctctgactttgaaggtcacctcacggaggacagcagtgaggctgacactagagaagctgcagtgacaaagggatcttcggtggacaaggatgagaaacccaattggaaccaatctgccccactgtccaaggtgaatggtgacatgcgtctggttacaaggacagatgggatggttgctcctcagagctgggtgtctcgagtatgtgcggtccgccaaaagatcccagattccctactgctggccagtactgagtaccagccaagagccgtgtgcctgtccatgcctgggtcctcagtggaggccactaacccacttgtgatgcagttgctgcagggtagcttgcccctagagaaggttcttccaccagcccacgatgacagcatgtcagaatccccacaagtaccacttacaaaagaccagagccatggctcgctacgcatgggatctttacatggtcttggaaaaaacagtggcatggttgatggaagcagccccagttctttaagggctttgaaggagcctcttctgccagatagctgtgaaacaggcactggtcttgccaggattgaggccacccaggctcctggagcaccccaaaagaattgcaaggcagtcccaagttttgactccctccatccagtgacaaatcccattacatcctctaggaaactggaagaaatggattccaaagagcagttctcttcctttagttgtgaagatcagaaggaagtccgtgctatgtcacaggacagtaattcaaatgctgctccaggaaagagcccaggagatcttactacctcgagaacacctcgtttctcatctccaaatgtgatctcctttggtccagagcagacaggtcgggccctgggtgatcagagcaatgttacaggccaagggaagaagctttttggctctgggaatgtggctgcaacccttcagcgccccaggcctgcggacccgatgcctcttcctgctgagatccctccagtttttcccagtgggaagttgggaccaagcacaaactccatgtctggtggggtacagactccaagggaagactgggctccaaagccacatgcctttgttggcagcgtcaagaatgagaagacttttgtggggggtcctcttaaggcaaatgccgagaacaggaaagctactgggcatagtcccctggaactggtgggtcacttggaagggatgccctttgtcatggacttgcccttctggaaattaccccgagagccagggaaggggctcagtgagcctctggagccttcttctctcccctcccaactcagcatcaagcaggcattttatgggaagctttctaaactccaactgagttccaccagctttaattattcctctagctctcccacctttcccaaaggccttgctggaagtgtggtgcagctgagccacaaagcaaactttggtgcgagccacagtgcatcactttccttgcaaatgttcactgacagcagcacggtggaaagcatctcgctccagtgtgcgtgcagcctgaaagccatgatcatgtgccaaggctgcggtgcgttctgtcacgatgactgtattggaccctcaaagctctgtgtattgtgccttgtggtgagataataaattatggccatgggaaacattgtatatttagtgtgtgtattttgataatgattgatcttaaatctgtatacagaatatcattgatataatactctttaggcaggagcactcttgccttcccccaaaatttacactgctaaagccctctgtcacttggcgacccttctggtcttgctggaggggtttcctgggtataacccattgggctgcccaaggccagccagcctgagctctcctgcaagacagagcctgatgtggcacggagtggggttgcggggggtggggggactgcctgactcccagagggacttgaaactgaagcaagaaggttgcattctccaccaagggagttaacctacctgaactaagtagaaatgccagtcttccactaccccctccctgccatcttttcttctgctactttggggagttgatggccaggaaagaagccagcacagggttaaagtaactcctggcattgcccaccagggggctggtgcacctgctgacctcagggtcacagttgagtcatttgccagttgacggagcaagtttgaccttggttctgttgctgaagcaaatttggaacttttctgtctcagtgtgatccactaacccacaggatcatttggaaccttgaatagctctgcttggacaatggggttggggaatagggttgtctttcctatgaaaatgccatctgtagaccttgtgagtcagccgtccagatgtttgcaggtgaattcctctgcttgacatcctccctgtcactttggaccctatgggagtgggcatctccacgcacctgtgtatgtgaaagtcattttacatttcaaagcagtgtgtgtttcttatttttatatttttaactctttattcttggatgtataaagtgaactttttggcttctgtaagtatgctctatgcacctctaatgttttatcatgtatttatatgttgtacacagtactggctgattctgtaaatggatgtattgtacagagaacatgaacgtctcttcctaattttacatcttcagcatcattgcattaaagtggtgtaatctccttctctacatctgttgtcagagccactgagtgctgtgctgctcgacgtgagggtgaaatgattgacttgtgacctgccaggttgcccgatgccctgttgggtcaccggctggacctgctgcagcctgcagagccacagtcagcctgcccacatgccaccgagcaaacgcatcttgcttttcacatctctcctcctacagccttaatggctgcttgctgccatatgtgacaaatcaccaccaccagtgttaagtgcttctggattcatgggtgagttccctgggcagcccccaggaaggccttccagatctggctccagggtcaccacctgtcacagcaatacctgggaccatgctctcctgggactgtgaggctccttttgacgtacttttgacatcaggcaggtttgggaagaaacaaagccatgcctgctcctgcctctctcccaacatgtttccagcaagtagatgcccctgtgtgtgttttcccttgccttgtttcctgccttatatcttgtatttcgacttattacagagttgagggttcttgcttaatttagatcaagtataaaatttgtatgacttcaagtctcattttatctgaaaggtttttttctcatttaatctgatgtggcattttcgtcatctgaagcatgagtgacaagttgggaatgatgtggtgatttagaatgcagtattggccaagtccaagttgtcaacttaagcgtctgtttaccaaagaccgggaacaggggcccaaacatgtccagtcctcttcttccctctgctggaacctttggggacactcaagggtacagtttgacactgatctggtccatgaggctgcccagagaaagcactgcttctgtatgtctcttgtggtattggaacaataaacccgtacaacctgca

SEQ ID NO: 310867 - DNA, 7111 bp, Homo sapiens
gaaaagcgaccccacattcaaggacgccaatggcatgttgagctttcccaatctaaaccaggtgcgtggagggaagcaagtgcttactcccagcttgaaccctgagcagcggttctctaactttagtgtcctgtgggcgacacctgggaggcggttaggaacgctactcctagggcccttcgtaagacctgctgagcctcagggtctgggatagagcctgggaatctgcgctttcaccagcttcccaggtgattcaaacgcagtggctcacggaccccactttgagaaacgcagactgggctgtttgccttcagaagctggactggaaattggtattttgaggagaactgaatccactttgcaaagaatgtatgttggacaaagacaaagtatctctgttgggagacgttgttcactgaggatttagcaagggagagcgtaacttgagtgtttgaagccgtctcgttcaaccgatgggggttgtgaattttgtgttcagagcgtcagaggacttgcaggtattagaaaactactcggatgctccaatgacaccaaaacagattctgcaggtcatagaggcagaaggactaaaggaaatgagaagtgggacttcccctctcgcatgcctcaatgctatgctacattccaattcaagaggaggagaggggttgttttataaactgcctggccgaatcagccttttcacgctcaagagatgaagtcttgctatgttggttaaactggtctcaaactcctggcctcaagtgatcttcccaccacagcttcacaaagcactgggatggattacagaaggatgccctgcagtggtctcgccatccagctacagtggagggagaggagccagaggacacggctgatgtggagagctgtgggtctaatgaagccagcactgtgagtggtgaaaacgatgtatctcttgatgaaacatcttcgaacgcatcctgttctacagaatctcagagtcgacctctttccaatcccagggacagctacagagcttcctcacaggcgaacaaacaaaagaaaaagactggggtgatgctgcctcgagttgtcctgactcctctgaaggtaaacggggcccacgtggaatctgcatcagggttctcgggctgccacgccgatggcgagagcggcagcccgtccagcagcagcagcggctctctggccctgggcagcgctgctattcgtggccaggccgaggtcacccaggaccctgccccgctcctgagaggcttccggaagccagccacaggtcaaatgaagcgcaacagaggggaagaaatagattttgagacacctgggtccattcttgtcaacaccaacctccgtgccctgatcaactctcggaccttccatgccttaccatcacacttccagcagcagctcctcttcctcctgcctgaagtagacagacaggtggggacggatggcctgttgcgtctcagcagcagtgcactaaataacgagttttttacccatgcggctcagagctggcgggagcgcctggctgatggtgaatttactcatgagatgcaagtcaggatacgacaggaaatggagaaggaaaagaaggtggaacaatggaaagaaaagttctttgaagactactatggacagaagctgggtttgaccaaagaagagtcattgcagcagaacgtgggccaggaggaggctgaaatcaaaagtggcttgtgtgtcccaggagaatcagtgcgtatacagcgtggtccagccacccgacagcgagatgggcattttaagaaacgctctcggccagatctccgaaccagagccagaaggaatctgtacaaaaaacaggagtcagaacaagcaggggttgctaaggatgcaaaatctgtggcctcagatgttcccctctacaaggatggggaggctaagactgacccagcagggctgagcagtccccatctgccaggcacatcctctgcagcacccgacctggagggtcccgaattcccagttgagtctgtggcttctcggatccaggctgagccagacaacttggcacgtgcctctgcatctccagacagaattcctagcctgcctcaggaaactgtggatcaggaacccaaggatcagaagaggaaatcctttgagcaggcggcctctgcatcctttcccgaaaagaagccccggcttgaagatcgtcagtcctttcgtaacacaattgaaagtgttcacaccgaaaagccacagcccactaaagaggagcccaaagtcccgcccatccggattcaactttcacgtatcaaaccaccctgggtggttaaaggtcagcccacttaccagatatgcccccggatcatccccaccacggagtcctcctgccggggttggactggcgccaggaccctcgcagacattaaagcccgtgctctgcaggtccgaggggcgagaggtcaccactgccatagagaggcggccaccactgccatcggaggggggggtggcccgggtggaggtggcggcggggccaccgatgagggaggtggcagaggcagcagcagtggtgatggtggtgaggcctgtggccaccctgagcccaggggaggcccgagcacccctggaaagtgtacgtcagatctacagcgaacacaactactgccgccttatcctctaaatggggagcatacccaggccggaactgccatgtccagagctaggagagaggacctgccttctctgagaaaggaggaaagctgcctactacagagggctacagttggactcacagatgggctaggagatgcctcccaactccccgttgctcccactggggaccagccatgccaggccttgcccctactgtcctcccaaacctcagtagctgagagattagtggagcagcctcagttgcatccggatgttagaactgaatgtgagtctggcaccacttcctgggaaagtgatgatgaggagcaaggacccaccgttcctgcagacaatggtcccattccgtctctagtgggagatgatacattagagaaaggaactggccaagctcttgacagtcatcccactatgaaggatcctgtaaatgtgacccccagttccacacctgaatcctcaccgactgattgcctgcagaacagagcatttgatgacgaattagggcttggtggctcatgccctcctatgagggaaagtgatactagacaagaaaacttgaaaaccaaggctctcgtttctaacagttctttgcattggatacccatcccatcgaatgatgaggtagtgaaacagcccaaaccagaatccagagaacacataccatctgttgagccccaggttggagaggagtgggagaaagctgctcccacccctcctgcattgcctggggatttgacagctgaggagggtctagatcctcttgacagccttacttcactctggactgtgccatctcgaggaggcagtgacagcaatggcagttactgtcaacaggtggacattgaaaagctgaaaatcaacggagactctgaagcactgagtcctcacggtgagtccacggatacagcctctgactttgaaggtcacctcacggaggacagcagtgaggctgacactagagaagctgcagtgacaaagggatcttcggtggacaaggatgagaaacccaattggaaccaatctgccccactgtccaaggtgaatggtgacatgcgtctggttacaaggacagatgggatggttgctcctcagagctgggtgtctcgagtatgtgcggtccgccaaaagatcccagattccctactgctggccagtactgagtaccagccaagagccgtgtgcctgtccatgcctgggtcctcagtggaggccactaacccacttgtgatgcagttgctgcagggtagcttgcccctagagaaggttcttccaccagcccacgatgacagcatgtcagaatccccacaagtaccacttacaaaagaccagagccatggctcgctacgcatgggatctttacatggtcttggaaaaaacagtggcatggttgatggaagcagccccagttctttaagggctttgaaggagcctcttctgccagatagctgtgaaacaggcactggtcttgccaggattgaggccacccaggctcctggagcaccccaaaagaattgcaaggcagtcccaagttttgactccctccatccagtgacaaatcccattacatcctctaggaaactggaagaaatggattccaaagagcagttctcttcctttagttgtgaagatcagaaggaagtccgtgctatgtcacaggacagtaattcaaatgctgctccaggaaagagcccaggagatcttactacctcgagaacacctcgtttctcatctccaaatgtgatctcctttggtccagagcagacaggtcgggccctgggtgatcagagcaatgttacaggccaagggaagaagctttttggctctgggaatgtggctgcaacccttcagcgccccaggcctgcggacccgatgcctcttcctgctgagatccctccagtttttcccagtgggaagttgggaccaagcacaaactccatgtctggtggggtacagactccaagggaagactgggctccaaagccacatgcctttgttggcagcgtcaagaatgagaagacttttgtggggggtcctcttaaggcaaatgccgagaacaggaaagctactgggcatagtcccctggaactggtgggtcacttggaagggatgccctttgtcatggacttgcccttctggaaattaccccgagagccagggaaggggctcagtgagcctctggagccttcttctctcccctcccaactcagcatcaagcaggcattttatgggaagctttctaaactccaactgagttccaccagctttaattattcctctagctctcccacctttcccaaaggccttgctggaagtgtggtgcagctgagccacaaagcaaactttggtgcgagccacagtgcatcactttccttgcaaatgttcactgacagcagcacggtggaaagcatctcgctccagtgtgcgtgcagcctgaaagccatgatcatgtgccaaggctgcggtgcgttctgtcacgatgactgtattggaccctcaaagctctgtgtattgtgccttgtggtgagataataaattatggccatgggaaacattgtatatttagtgtgtgtattttgataatgattgatcttaaatctgtatacagaatatcattgatataatactctttaggcaggagcactcttgccttcccccgaggggtttcctgggtataacccattgggctgcccaaggccagccagcctgagctctcctgcaagacagagcctgatgtggcacggagtggggttgcggggggtggggggactgcctgactcccagagggacttgaaactgaagcaagaaggttgcattctccaccaagggagttaacctacctgaactaagtagaaatgccagtcttccactaccccctccctgccatcttttcttctgctactttggggagttgatggccaggaaagaagccagcacagggttaaagtaactcctggcattgcccaccagggggctggtgcacctgctgacctcagggtcacagttgagtcatttgccagttgacggagcaagtttgaccttggttctgttgctgaagcaaatttggaacttttctgtctcagtgtgatccactaacccacaggatcatttggaaccttgaatagctctgcttggacaatggggttggggaatagggttgtctttcctatgaaaatgccatctgtagaccttgtgagtcagccgtccagatgtttgcaggtgaattcctctgcttgacatcctccctgtcactttggaccctatgggagtgggcatctccacgcacctgtgtatgtgaaagtcattttacatttcaaagcagtgtgtgtttcttatttttatatttttaactctttattcttggatgtataaagtgaactttttggcttctgtaagtatgctctatgcacctctaatgttttatcatgtatttatatgttgtacacagtactggctgattctgtaaatggatgtattgtacagagaacatgaacgtctcttcctaattttacatcttcagcatcattgcattaaagtggtgtaatctccttctctacatctgttgtcagagccactgagtgctgtgctgctcgacgtgagggtgaaatgattgacttgtgacctgccaggttgcccgatgccctgttgggtcaccggctggacctgctgcagcctgcagagccacagtcagcctgcccacatgccaccgagcaaacgcatcttgcttttcacatctctcctcctacagccttaatggctgcttgctgccatatgtgacaaatcaccaccaccagtgttaagtgcttctggattcatgggtgagttccctgggcagcccccaggaaggccttccagatctggctccagggtcaccacctgtcacagcaatacctgggaccatgctctcctgggactgtgaggctccttttgacgtacttttgacatcaggcaggtttgggaagaaacaaagccatgcctgctcctgcctctctcccaacatgtttccagcaagtagatgcccctgtgtgtgttttcccttgccttgtttcctgccttatatcttgtatttcgacttattacagagttgagggttcttgcttaatttagatcaagtataaaatttgtatgacttcaagtctcattttatctgaaaggtttttttctcatttaatctgatgtggcattttcgtcatctgaagcatgagtgacaagttgggaatgatgtggtgatttagaatgcagtattggccaagtccaagttgtcaacttaagcgtctgtttaccaaagaccgggaacaggggcccaaacatgtccagtcctcttcttccctctgctggaacctttggggacactcaagggtacagtttgacactgatctggtccatgaggctgcccagagaaagcactgcttctgtatgtctcttgtggtattggaacaataaacccgtacaacctgca

SEQ ID NO: 310868 - DNA, 7030 bp, Homo sapiens
gaaaagcgaccccacattcaaggacgccaatggcatgttgagctttcccaatctaaaccaggtgcgtggagggaagcaagtgcttactcccagcttgaaccctgagcagcggttctctaactttagtgtcctgtgggcgacacctgggaggcggttaggaacgctactcctagggcccttcgtaagacctgctgagcctcagggtctgggatagagcctgggaatctgcgctttcaccagcttcccaggtgattcaaacgcagtggctcacggaccccactttgagaaacgcagactgggctgtttgccttcagaagctggactggaaattggtattttgaggagaactgaatccactttgcaaagaatgtatgttggacaaagacaaagtatctctgttgggagacgttgttcactgaggatttagcaagggagagcgtaacttgagtgtttgaagccgtctcgttcaaccgatgggggttgtgaattttgtgttcagagcgtcagaggacttgcaggtattagaaaactactcggatgctccaatgacaccaaaacagattctgcaggtcatagaggcagaaggactaaaggaaatgagaagtgggacttcccctctcgcatgcctcaatgctatgctacattccaattcaagaggaggagaggggttgttttataaactgcctggccgaatcagccttttcacgctcaagagatgaagtcttgctatgttggttaaactggtctcaaactcctggcctcaagtgatcttcccaccacagcttcacaaagcactgggatggattacagaaggatgccctgcagtggtctcgccatccagctacagtggagggagaggagccagaggacacggctgatgtggagagctgtgggtctaatgaagccagcactgtgagtggtgaaaacgatgtatctcttgatgaaacatcttcgaacgcatcctgttctacagaatctcagagtcgacctctttccaatcccagggacagctacagagcttcctcacaggcgaacaaacaaaagaaaaagactggggtgatgctgcctcgagttgtcctgactcctctgaaggtaaacggggcccacgtggaatctgcatcagggttctcgggctgccacgccgatggcgagagcggcagcccgtccagcagcagcagcggctctctggccctgggcagcgctgctattcgtggccaggccgaggtcacccaggaccctgccccgctcctgagaggcttccggaagccagccacaggtcaaatgaagcgcaacagaggggaagaaatagattttgagacacctgggtccattcttgtcaacaccaacctccgtgccctgatcaactctcggaccttccatgccttaccatcacacttccagcagcagctcctcttcctcctgcctgaagtagacagacaggtggggacggatggcctgttgcgtctcagcagcagtgcactaaataacgagttttttacccatgcggctcagagctggcgggagcgcctggctgatggtgaatttactcatgagatgcaagtcaggatacgacaggaaatggagaaggaaaagaaggtggaacaatggaaagaaaagttctttgaagactactatggacagaagctgggtttgaccaaagaagagtcattgcagcagaacgtgggccaggaggaggctgaaatcaaaagtggcttgtgtgtcccaggagaatcagtgcgtatacagcgtggtccagccacccgacagcgagatgggcattttaagaaacgctctcggccagatctccgaaccagagccagaaggaatctgtacaaaaaacaggagtcagaacaagcaggggttgctaaggatgcaaaatctgtggcctcagatgttcccctctacaaggatggggaggctaagactgacccagcagggctgagcagtccccatctgccaggcacatcctctgcagcacccgacctggagggtcccgaattcccagttgagtctgtggcttctcggatccaggctgagccagacaacttggcacgtgcctctgcatctccagacagaattcctagcctgcctcaggaaactgtggatcaggaacccaaggatcagaagaggaaatcctttgagcaggcggcctctgcatcctttcccgaaaagaagccccggcttgaagatcgtcagtcctttcgtaacacaattgaaagtgttcacaccgaaaagccacagcccactaaagaggagcccaaagtcccgcccatccggattcaactttcacgtatcaaaccaccctgggtggttaaaggtcagcccacttaccagatatgcccccggatcatccccaccacggagtcctcctgccggggttggactggcgccaggaccctcgcagacattaaagcccgtgctctgcaggtccgaggggcgagaggtcaccactgccatagagaggcggccaccactgccatcggaggggggggtggcccgggtggaggtggcggcggggccaccgatgagggaggtggcagaggcagcagcagtggtgatggtggtgaggcctgtggccaccctgagcccaggggaggcccgagcacccctggaaagtgtacgtcagatctacagcgaacacaactactgccgccttatcctctaaatggggagcatacccaggccggaactgccatgtccagagctaggagagaggacctgccttctctgagaaaggaggaaagctgcctactacagagggctacagttggactcacagatgggctaggagatgcctcccaactccccgttgctcccactggggaccagccatgccaggccttgcccctactgtcctcccaaacctcagtagctgagagattagtggagcagcctcagttgcatccggatgttagaactgaatgtgagtctggcaccacttcctgggaaagtgatgatgaggagcaaggacccaccgttcctgcagacaatggtcccattccgtctctagtgggagatgatacattagagaaaggaactggccaagctcttgacagtcatcccactatgaaggatcctgtaaatgtgacccccagttccacacctgaatcctcaccgactgattgcctgcagaacagagcatttgatgacgaattagggcttggtggctcatgccctcctatgagggaaagtgatactagacaagaaaacttgaaaaccaaggctctcgtttctaacagttctttgcattggatacccatcccatcgaatgatgaggtagtgaaacagcccaaaccagaatccagagaacacataccatctgttgagccccaggttggagaggagtgggagaaagctgctcccacccctcctgcattgcctggggatttgacagctgaggagggtctagatcctcttgacagccttacttcactctggactgtgccatctcgaggaggcagtgacagcaatggcagttactgtcaacaggtggacattgaaaagctgaaaatcaacggagactctgaagcactgagtcctcacggtgagtccacggatacagcctctgactttgaaggtcacctcacggaggacagcagtgaggctgacactagagaagctgcagtgacaaagggatcttcggtggacaaggatgagaaacccaattggaaccaatctgccccactgtccaaggtgaatggtgacatgcgtctggttacaaggacagatgggatggttgctcctcagagctgggtgtctcgagtatgtgcggtccgccaaaagatcccagattccctactgctggccagtactgagtaccagccaagagccgtgtgcctgtccatgcctgggtcctcagtggaggccactaacccacttgtgatgcagttgctgcagggtagcttgcccctagagaaggttcttccaccagcccacgatgacagcatgtcagaatccccacaagtaccacttacaaaagaccagagccatggctcgctacgcatgggatctttacatggtcttggaaaaaacagtggcatggttgatggaagcagccccagttctttaagggctttgaaggagcctcttctgccagatagctgtgaaacaggcactggtcttgccaggattgaggccacccaggctcctggagcaccccaaaagaattgcaaggcagtcccaagttttgactccctccatccagtgacaaatcccattacatcctctaggaaactggaagaaatggattccaaagagcagttctcttcctttagttgtgaagatcagaaggaagtccgtgctatgtcacaggacagtaattcaaatgctgctccaggaaagagcccaggagatcttactacctcgagaacacctcgtttctcatctccaaatgtgatctcctttggtccagagcagacaggtcgggccctgggtgatcagagcaatgttacaggccaagggaagaagctttttggctctgggaatgtggctgcaacccttcagcgccccaggcctgcggacccgatgcctcttcctgctgagatccctccagtttttcccagtgggaagttgggaccaagcacaaactccatgtctggtggggtacagactccaagggaagactgggctccaaagccacatgcctttgttggcagcgtcaagaatgagaagacttttgtggggggtcctcttaaggcaaatgccgagaacaggaaagctactgggcatagtcccctggaactggtgggtcacttggaagggatgccctttgtcatggacttgcccttctggaaattaccccgagagccagggaaggggctcagtgagcctctggagccttcttctctcccctcccaactcagcatcaagcaggcattttatgggaagctttctaaactccaactgagttccaccagctttaattattcctctagctctcccacctttcccaaaggccttgctggaagtgtggtgcagctgagccacaaagcaaactttggtgcgagccacagtgcatcactttccttgcaaatgttcactgacagcagcacggtggaaagcatctcgctccagtgtgcgtgcagcctgaaagccatgatcatgtgccaaggctgcggtgcgttctgtcacgatgactgtattggaccctcaaagctctgtgtattgtgccttgtggtgagataataaattatggccatgggaaacattgtatatttagtgtgtgtattttgataatgattgatcttaaatctgtatacagaatatcattgatataatactctttaggcaggagcactcttgccttcccccgaggggtttcctgggtataacccattgggctgcccaaggccagccagcctgagctctcctgcaagacagagcctgatgtggcacggagtggggttgcggggggtggggggactgcctgactcccagagggacttgaaactgaagcaagaaggttgcattctccaccaagggattgatggccaggaaagaagccagcacagggttaaagtaactcctggcattgcccaccagggggctggtgcacctgctgacctcagggtcacagttgagtcatttgccagttgacggagcaagtttgaccttggttctgttgctgaagcaaatttggaacttttctgtctcagtgtgatccactaacccacaggatcatttggaaccttgaatagctctgcttggacaatggggttggggaatagggttgtctttcctatgaaaatgccatctgtagaccttgtgagtcagccgtccagatgtttgcaggtgaattcctctgcttgacatcctccctgtcactttggaccctatgggagtgggcatctccacgcacctgtgtatgtgaaagtcattttacatttcaaagcagtgtgtgtttcttatttttatatttttaactctttattcttggatgtataaagtgaactttttggcttctgtaagtatgctctatgcacctctaatgttttatcatgtatttatatgttgtacacagtactggctgattctgtaaatggatgtattgtacagagaacatgaacgtctcttcctaattttacatcttcagcatcattgcattaaagtggtgtaatctccttctctacatctgttgtcagagccactgagtgctgtgctgctcgacgtgagggtgaaatgattgacttgtgacctgccaggttgcccgatgccctgttgggtcaccggctggacctgctgcagcctgcagagccacagtcagcctgcccacatgccaccgagcaaacgcatcttgcttttcacatctctcctcctacagccttaatggctgcttgctgccatatgtgacaaatcaccaccaccagtgttaagtgcttctggattcatgggtgagttccctgggcagcccccaggaaggccttccagatctggctccagggtcaccacctgtcacagcaatacctgggaccatgctctcctgggactgtgaggctccttttgacgtacttttgacatcaggcaggtttgggaagaaacaaagccatgcctgctcctgcctctctcccaacatgtttccagcaagtagatgcccctgtgtgtgttttcccttgccttgtttcctgccttatatcttgtatttcgacttattacagagttgagggttcttgcttaatttagatcaagtataaaatttgtatgacttcaagtctcattttatctgaaaggtttttttctcatttaatctgatgtggcattttcgtcatctgaagcatgagtgacaagttgggaatgatgtggtgatttagaatgcagtattggccaagtccaagttgtcaacttaagcgtctgtttaccaaagaccgggaacaggggcccaaacatgtccagtcctcttcttccctctgctggaacctttggggacactcaagggtacagtttgacactgatctggtccatgaggctgcccagagaaagcactgcttctgtatgtctcttgtggtattggaacaataaacccgtacaacctgca

SEQ ID NO: 310869 - DNA, 7111 bp, Homo sapiens
gaaaagcgaccccacattcaaggacgccaatggcatgttgagctttcccaatctaaaccaggtgcgtggagggaagcaagtgcttactcccagcttgaaccctgagcagcggttctctaactttagtgtcctgtgggcgacacctgggaggcggttaggaacgctactcctagggcccttcgtaagacctgctgagcctcagggtctgggatagagcctgggaatctgcgctttcaccagcttcccaggtgattcaaacgcagtggctcacggaccccactttgagaaacgcagactgggctgtttgccttcagaagctggactggaaattggtattttgaggagaactgaatccactttgcaaagaatgtatgttggacaaagacaaagtatctctgttgggagacgttgttcactgaggatttagcaagggagagcgtaacttgagtgtttgaagccgtctcgttcaaccgatgggggttgtgaattttgtgttcagagcgtcagaggacttgcaggtattagaaaactactcggatgctccaatgacaccaaaacagattctgcaggtcatagaggcagaaggactaaaggaaatgagaagtgggacttcccctctcgcatgcctcaatgctatgctacattccaattcaagaggaggagaggggttgttttataaactgcctggccgaatcagccttttcacgctcaagagatgaagtcttgctatgttggttaaactggtctcaaactcctggcctcaagtgatcttcccaccacagcttcacaaagcactgggatggattacagaaggatgccctgcagtggtctcgccatccagctacagtggagggagaggagccagaggacacggctgatgtggagagctgtgggtctaatgaagccagcactgtgagtggtgaaaacgatgtatctcttgatgaaacatcttcgaacgcatcctgttctacagaatctcagagtcgacctctttccaatcccagggacagctacagagcttcctcacaggcgaacaaacaaaagaaaaagactggggtgatgctgcctcgagttgtcctgactcctctgaaggtaaacggggcccacgtggaatctgcatcagggttctcgggctgccacgccgatggcgagagcggcagcccgtccagcagcagcagcggctctctggccctgggcagcgctgctattcgtggccaggccgaggtcacccaggaccctgccccgctcctgagaggcttccggaagccagccacaggtcaaatgaagcgcaacagaggggaagaaatagattttgagacacctgggtccattcttgtcaacaccaacctccgtgccctgatcaactctcggaccttccatgccttaccatcacacttccagcagcagctcctcttcctcctgcctgaagtagacagacaggtggggacggatggcctgttgcgtctcagcagcagtgcactaaataacgagttttttacccatgcggctcagagctggcgggagcgcctggctgatggtgaatttactcatgagatgcaagtcaggatacgacaggaaatggagaaggaaaagaaggtggaacaatggaaagaaaagttctttgaagactactatggacagaagctgggtttgaccaaagaagagtcattgcagcagaacgtgggccaggaggaggctgaaatcaaaagtggcttgtgtgtcccaggagaatcagtgcgtatacagcgtggtccagccacccgacagcgagatgggcattttaagaaacgctctcggccagatctccgaaccagagccagaaggaatctgtacaaaaaacaggagtcagaacaagcaggggttgctaaggatgcaaaatctgtggcctcagatgttcccctctacaaggatggggaggctaagactgacccagcagggctgagcagtccccatctgccaggcacatcctctgcagcacccgacctggagggtcccgaattcccagttgagtctgtggcttctcggatccaggctgagccagacaacttggcacgtgcctctgcatctccagacagaattcctagcctgcctcaggaaactgtggatcaggaacccaaggatcagaagaggaaatcctttgagcaggcggcctctgcatcctttcccgaaaagaagccccggcttgaagatcgtcagtcctttcgtaacacaattgaaagtgttcacaccgaaaagccacagcccactaaagaggagcccaaagtcccgcccatccggattcaactttcacgtatcaaaccaccctgggtggttaaaggtcagcccacttaccagatatgcccccggatcatccccaccacggagtcctcctgccggggttggactggcgccaggaccctcgcagacattaaagcccgtgctctgcaggtccgaggggcgagaggtcaccactgccatagagaggcggccaccactgccatcggaggggggggtggcccgggtggaggtggcggcggggccaccgatgagggaggtggcagaggcagcagcagtggtgatggtggtgaggcctgtggccaccctgagcccaggggaggcccgagcacccctggaaagtgtacgtcagatctacagcgaacacaactactgccgccttatcctctaaatggggagcatacccaggccggaactgccatgtccagagctaggagagaggacctgccttctctgagaaaggaggaaagctgcctactacagagggctacagttggactcacagatgggctaggagatgcctcccaactccccgttgctcccactggggaccagccatgccaggccttgcccctactgtcctcccaaacctcagtagctgagagattagtggagcagcctcagttgcatccggatgttagaactgaatgtgagtctggcaccacttcctgggaaagtgatgatgaggagcaaggacccaccgttcctgcagacaatggtcccattccgtctctagtgggagatgatacattagagaaaggaactggccaagctcttgacagtcatcccactatgaaggatcctgtaaatgtgacccccagttccacacctgaatcctcaccgactgattgcctgcagaacagagcatttgatgacgaattagggcttggtggctcatgccctcctatgagggaaagtgatactagacaagaaaacttgaaaaccaaggctctcgtttctaacagttctttgcattggatacccatcccatcgaatgatgaggtagtgaaacagcccaaaccagaatccagagaacacataccatctgttgagccccaggttggagaggagtgggagaaagctgctcccacccctcctgcattgcctggggatttgacagctgaggagggtctagatcctcttgacagccttacttcactctggactgtgccatctcgaggaggcagtgacagcaatggcagttactgtcaacaggtggacattgaaaagctgaaaatcaacggagactctgaagcactgagtcctcacggtgagtccacggatacagcctctgactttgaaggtcacctcacggaggacagcagtgaggctgacactagagaagctgcagtgacaaagggatcttcggtggacaaggatgagaaacccaattggaaccaatctgccccactgtccaaggtgaatggtgacatgcgtctggttacaaggacagatgggatggttgctcctcagagctgggtgtctcgagtatgtgcggtccgccaaaagatcccagattccctactgctggccagtactgagtaccagccaagagccgtgtgcctgtccatgcctgggtcctcagtggaggccactaacccacttgtgatgcagttgctgcagggtagcttgcccctagagaaggttcttccaccagcccacgatgacagcatgtcagaatccccacaagtaccacttacaaaagaccagagccatggctcgctacgcatgggatctttacatggtcttggaaaaaacagtggcatggttgatggaagcagccccagttctttaagggctttgaaggagcctcttctgccagatagctgtgaaacaggcactggtcttgccaggattgaggccacccaggctcctggagcaccccaaaagaattgcaaggcagtcccaagttttgactccctccatccagtgacaaatcccattacatcctctaggaaactggaagaaatggattccaaagagcagttctcttcctttagttgtgaagatcagaaggaagtccgtgctatgtcacaggacagtaattcaaatgctgctccaggaaagagcccaggagatcttactacctcgagaacacctcgtttctcatctccaaatgtgatctcctttggtccagagcagacaggtcgggccctgggtgatcagagcaatgttacaggccaagggaagaagctttttggctctgggaatgtggctgcaacccttcagcgccccaggcctgcggacccgatgcctcttcctgctgagatccctccagtttttcccagtgggaagttgggaccaagcacaaactccatgtctggtggggtacagactccaagggaagactgggctccaaagccacatgcctttgttggcagcgtcaagaatgagaagacttttgtggggggtcctcttaaggcaaatgccgagaacaggaaagctactgggcatagtcccctggaactggtgggtcacttggaagggatgccctttgtcatggacttgcccttctggaaattaccccgagagccagggaaggggctcagtgagcctctggagccttcttctctcccctcccaactcagcatcaagcaggcattttatgggaagctttctaaactccaactgagttccaccagctttaattattcctctagctctcccacctttcccaaaggccttgctggaagtgtggtgcagctgagccacaaagcaaactttggtgcgagccacagtgcatcactttccttgcaaatgttcactgacagcagcacggtggaaagcatctcgctccagtgtgcgtgcagcctgaaagccatgatcatgtgccaaggctgcggtgcgttctgtcacgatgactgtattggaccctcaaagctctgtgtattgtgccttgtggtgagataataaattatggccatgggaaacattgtatatttagtgtgtgtattttgataatgattgatcttaaatctgtatacagaatatcattgatataatactctttaggcaggagcactcttgccttcccccaaaatttacactgctaaagccctctgtcacttggcgacccttctggtcttgctggaggggtttcctgggtataacccattgggctgcccaaggccagccagcctgagctctcctgcaagacagagcctgatgtggcacggagtggggttgcggggggtggggggactgcctgactcccagagggacttgaaactgaagcaagaaggttgcattctccaccaagggagttaacctacctgaactaagtagaaatgccagtcttccactaccccctccctgccatcttttcttctgctactttggggagttgatggccaggaaagaagccagcacagggttaaagtaactcctggcattgcccaccagggggctggtgcacctgctgacctcagggtcacagttgagtcatttgccagttgacggagcaagtttgaccttggttctgttgctgaagcaaatttggaacttttctgtctcagtgtgatccactaacccacaggatcatttggaaccttgaatagctctgcttggacaatggggttggggaatagggttgtctttcctatgtcctctgcttgacatcctccctgtcactttggaccctatgggagtgggcatctccacgcacctgtgtatgtgaaagtcattttacatttcaaagcagtgtgtgtttcttatttttatatttttaactctttattcttggatgtataaagtgaactttttggcttctgtaagtatgctctatgcacctctaatgttttatcatgtatttatatgttgtacacagtactggctgattctgtaaatggatgtattgtacagagaacatgaacgtctcttcctaattttacatcttcagcatcattgcattaaagtggtgtaatctccttctctacatctgttgtcagagccactgagtgctgtgctgctcgacgtgagggtgaaatgattgacttgtgacctgccaggttgcccgatgccctgttgggtcaccggctggacctgctgcagcctgcagagccacagtcagcctgcccacatgccaccgagcaaacgcatcttgcttttcacatctctcctcctacagccttaatggctgcttgctgccatatgtgacaaatcaccaccaccagtgttaagtgcttctggattcatgggtgagttccctgggcagcccccaggaaggccttccagatctggctccagggtcaccacctgtcacagcaatacctgggaccatgctctcctgggactgtgaggctccttttgacgtacttttgacatcaggcaggtttgggaagaaacaaagccatgcctgctcctgcctctctcccaacatgtttccagcaagtagatgcccctgtgtgtgttttcccttgccttgtttcctgccttatatcttgtatttcgacttattacagagttgagggttcttgcttaatttagatcaagtataaaatttgtatgacttcaagtctcattttatctgaaaggtttttttctcatttaatctgatgtggcattttcgtcatctgaagcatgagtgacaagttgggaatgatgtggtgatttagaatgcagtattggccaagtccaagttgtcaacttaagcgtctgtttaccaaagaccgggaacaggggcccaaacatgtccagtcctcttcttccctctgctggaacctttggggacactcaagggtacagtttgacactgatctggtccatgaggctgcccagagaaagcactgcttctgtatgtctcttgtggtattggaacaataaacccgtacaacctgca

SEQ ID NO: 310870 - DNA, 5204 bp, Homo sapiens
gaaaagcgaccccacattcaaggacgccaatggcatgttgagctttcccaatctaaaccaggtgcgtggagggaagcaagtgcttactcccagcttgaaccctgagcagcggttctctaactttagtgtcctgtgggcgacacctgggaggcggttaggaacgctactcctagggcccttcgtaagacctgctgagcctcagggtctgggatagagcctgggaatctgcgctttcaccagcttcccaggtgattcaaacgcagtggctcacggaccccactttgagaaacgcagactgggctgtttgccttcagaagctggactggaaattggtattttgaggagaactgaatccactttgcaaagaatgtatgttggacaaagacaaagtatctctgttgggagacgttgttcactgaggatttagcaagggagagcgtaacttgagtgtttgaagccgtctcgttcaaccgatgggggttgtgaattttgtgttcagagcgtcagaggacttgcaggtattagaaaactactcggatgctccaatgacaccaaaacagattctgcaggtcatagaggcagaaggactaaaggaaatgagaagtgggacttcccctctcgcatgcctcaatgctatgctacattccaattcaagaggaggagaggggttgttttataaactgcctggccgaatcagccttttcacgctcaagagatgaagtcttgctatgttggttaaactggtctcaaactcctggcctcaagtgatcttcccaccacagcttcacaaagcactgggatggattacagaaggatgccctgcagtggtctcgccatccagctacagtggagggagaggagccagaggacacggctgatgtggagagctgtgggtctaatgaagccagcactgtgagtggtgaaaacgatgtatctcttgatgaaacatcttcgaacgcatcctgttctacagaatctcagagtcgacctctttccaatcccagggacagctacagagcttcctcacaggcgaacaaacaaaagaaaaagactggggtgatgctgcctcgagttgtcctgactcctctgaaggtaaacggggcccacgtggaatctgcatcagggttctcgggctgccacgccgatggcgagagcggcagcccgtccagcagcagcagcggctctctggccctgggcagcgctgctattcgtggccaggccgaggtcacccaggaccctgccccgctcctgagaggcttccggaagccagccacaggtcaaatgaagcgcaacagaggggaagaaatagattttgagacacctgggtccattcttgtcaacaccaacctccgtgccctgatcaactctcggaccttccatgccttaccatcacacttccagcagcagctcctcttcctcctgcctgaagtagacagacaggtggggacggatggcctgttgcgtctcagcagcagtgcactaaataacgagttttttacccatgcggctcagagctggcgggagcgcctggctgatggtgaatttactcatgagatgcaagtcaggatacgacaggaaatggagaaggaaaagaaggtggaacaatggaaagaaaagttctttgaagactactatggacagaagctgggtttgaccaaagaagagtcattgcagcagaacgtgggccaggaggaggctgaaatcaaaagtggcttgtgtgtcccaggagaatcagtgcgtatacagcgtggtccagccacccgacagcgagatgggcattttaagaaacgctctcggccagatctccgaaccagagccagaaggaatctgtacaaaaaacaggagtcagaacaagcaggggttgctaaggatgcaaaatctgtggcctcagatgttcccctctacaaggatggggaggctaagactgacccagcagggctgagcagtccccatctgccaggcacatcctctgcagcacccgacctggagggtcccgaattcccagttgagtctgtggcttctcggatccaggctgagccagacaacttggcacgtgcctctgcatctccagacagaattcctagcctgcctcaggaaactgtggatcaggaacccaaggatcagaagaggaaatcctttgagcaggcggcctctgcatcctttcccgaaaagaagccccggcttgaagatcgtcagtcctttcgtaacacaattgaaagtgttcacaccgaaaagccacagcccactaaagaggagcccaaagtcccgcccatccggattcaactttcacgtatcaaaccaccctgggtggttaaaggtcagcccacttaccagatatgcccccggatcatccccaccacggagtcctcctgccggggttggactggcgccaggaccctcgcagacattaaagcccgtgctctgcaggtccgaggggcgagaggtcaccactgccatagagaggcggccaccactgccatcggaggggggggtggcccgggtggaggtggcggcggggccaccgatgagggaggtggcagaggcagcagcagtggtgatggtggtgaggcctgtggccaccctgagcccaggggaggcccgagcacccctggaaagtgtacgtcagatctacagcgaacacaactactgccgccttatcctctaaatggggagcatacccaggccggaactgccatgtccagagctaggagagaggacctgccttctctgagaaaggaggaaagctgcctactacagagggctacagttggactcacagatgggctaggagatgcctcccaactccccgttgctcccactggggaccagccatgccaggccttgcccctactgtcctcccaaacctcagtagctgagagattagtggagcagcctcagttgcatccggatgttagaactgaatgtgagtctggcaccacttcctgggaaagtgatgatgaggagcaaggacccaccgttcctgcagacaatggtcccattccgtctctagtgggagatgatacattagagaaaggaactggccaagctcttgacagtcatcccactatgaaggatcctgtaaatgtgacccccagttccacacctgaatcctcaccgactgattgcctgcagaacagagcatttgatgacgaattagggcttggtggctcatgccctcctatgagggaaagtgatactagacaagaaaacttgaaaaccaaggctctcgtttctaacagttctttgcattggatacccatcccatcgaatgatgaggtagtgaaacagcccaaaccagaatccagagaacacataccatctgttgagccccaggttggagaggagtgggagaaagctgctcccacccctcctgcattgcctggggatttgacagctgaggagggtctagatcctcttgacagccttacttcactctggactgtgccatctcgaggaggcagtgacagcaatggcagttactgtcaacaggtggacattgaaaagctgaaaatcaacggagactctgaagcactgagtcctcacggtgagtccacggatacagcctctgactttgaaggtcacctcacggaggacagcagtgaggctgacactagagaagctgcagtgacaaagggatcttcggtggacaaggatgagaaacccaattggaaccaatctgccccactgtccaaggtgaatggtgacatgcgtctggttacaaggacagatgggatggttgctcctcagagctgggtgtctcgagtatgtgcggtccgccaaaagatcccagattccctactgctggccagtactgagtaccagccaagagccgtgtgcctgtccatgcctgggtcctcagtggaggccactaacccacttgtgatgcagttgctgcagggtagcttgcccctagagaaggttcttccaccagcccacgatgacagcatgtcagaatccccacaagtaccacttacaaaagaccagagccatggctcgctacgcatgggatctttacatggtcttggaaaaaacagtggcatggttgatggaagcagccccagttctttaagggctttgaaggagcctcttctgccagatagctgtgaaacaggcactggtcttgccaggattgaggccacccaggctcctggagcaccccaaaagaattgcaaggcagtcccaagttttgactccctccatccagtgacaaatcccattacatcctctaggaaactggaagaaatggattccaaagagcagttctcttcctttagttgtgaagatcagaaggaagtccgtgctatgtcacaggacagtaattcaaatgctgctccaggaaagagcccaggagatcttactacctcgagaacacctcgtttctcatctccaaatgtgatctcctttggtccagagcagacaggtcgggccctgggtgatcagagcaatgttacaggccaagggaagaagctttttggctctgggaatgtggctgcaacccttcagcgccccaggcctgcggacccgatgcctcttcctgctgagatccctccagtttttcccagtgggaagttgggaccaagcacaaactccatgtctggtggggtacagactccaagggaagactgggctccaaagccacatgcctttgttggcagcgtcaagaatgagaagacttttgtggggggtcctcttaaggcaaatgccgagaacaggaaagctactgggcatagtcccctggaactggtgggtcacttggaagggatgccctttgtcatggacttgcccttctggaaattaccccgagagccagggaaggggctcagtgagcctctggagccttcttctctcccctcccaactcagcatcaagcaggcattttatgggaagctttctaaactccaactgagttccaccagctttaattattcctctagctctcccacctttcccaaaggccttgctggaagtgtggtgcagctgagccacaaagcaaactttggtgcgagccacagtgcatcactttccttgcaaatgttcactgacagcagcacggtggaaagcatctcgctccagtgtgcgtgcagcctgaaagccatgatcatgtgccaaggctgcggtgcgttctgtcacgatgactgtattggaccctcaaagctctgtgtattgtgccttgtggtgagataataaattatggccatgggaaa

SEQ ID NO: 310871 - DNA, 6262 bp, Homo sapiens
gaaaagcgaccccacattcaaggacgccaatggcatgttgagctttcccaatctaaaccaggtgcgtggagggaagcaagtgcttactcccagcttgaaccctgagcagcggttctctaactttagtgtcctgtgggcgacacctgggaggcggttaggaacgctactcctagggcccttcgtaagacctgctgagcctcagggtctgggatagagcctgggaatctgcgctttcaccagcttcccaggtgattcaaacgcagtggctcacggaccccactttgagaaacgcagactgggctgtttgccttcagaagctggactggaaattggtattttgaggagaactgaatccactttgcaaagaatgtatgttggacaaagacaaagtatctctgttgggagacgttgttcactgaggatttagcaagggagagcgtaacttgagtgtttgaagccgtctcgttcaaccgatgggggttgtgaattttgtgttcagagcgtcagaggacttgcaggtattagaaaactactcggatgctccaatgacaccaaaacagattctgcaggtcatagaggcagaaggactaaaggaaatgagaagtgggacttcccctctcgcatgcctcaatgctatgctacattccaattcaagaggaggagaggggttgttttataaactgcctggccgaatcagccttttcacgctcaagagatgaagtcttgctatgttggttaaactggtctcaaactcctggcctcaagtgatcttcccaccacagcttcacaaagcactgggatggattacagaaggatgccctgcagtggtctcgccatccagctacagtggagggagaggagccagaggacacggctgatgtggagagctgtgggtctaatgaagccagcactgtgagtggtgaaaacgatgtatctcttgatgaaacatcttcgaacgcatcctgttctacagaatctcagagtcgacctctttccaatcccagggacagctacagagcttcctcacaggcgaacaaacaaaagaaaaagactggggtgatgctgcctcgagttgtcctgactcctctgaaggtaaacggggcccacgtggaatctgcatcagggttctcgggctgccacgccgatggcgagagcggcagcccgtccagcagcagcagcggctctctggccctgggcagcgctgctattcgtggccaggccgaggtcacccaggaccctgccccgctcctgagaggcttccggaagccagccacaggtcaaatgaagcgcaacagaggggaagaaatagattttgagacacctgggtccattcttgtcaacaccaacctccgtgccctgatcaactctcggaccttccatgccttaccatcacacttccagcagcagctcctcttcctcctgcctgaagtagacagacaggtggggacggatggcctgttgcgtctcagcagcagtgcactaaataacgagttttttacccatgcggctcagagctggcgggagcgcctggctgatggtgaatttactcatgagatgcaagtcaggatacgacaggaaatggagaaggaaaagaaggtggaacaatggaaagaaaagttctttgaagactactatggacagaagctgggtttgaccaaagaagagtcattgcagcagaacgtgggccaggaggaggctgaaatcaaaagtggcttgtgtgtcccaggagaatcagtgcgtatacagcgtggtccagccacccgacagcgagatgggcattttaagaaacgctctcggccagatctccgaaccagagccagaaggaatctgtacaaaaaacaggagtcagaacaagcaggggttgctaaggatgcaaaatctgtggcctcagatgttcccctctacaaggatggggaggctaagactgacccagcagggctgagcagtccccatctgccaggcacatcctctgcagcacccgacctggagggtcccgaattcccagttgagtctgtggcttctcggatccaggctgagccagacaacttggcacgtgcctctgcatctccagacagaattcctagcctgcctcaggaaactgtggatcaggaacccaaggatcagaagaggaaatcctttgagcaggcggcctctgcatcctttcccgaaaagaagccccggcttgaagatcgtcagtcctttcgtaacacaattgaaagtgttcacaccgaaaagccacagcccactaaagaggagcccaaagtcccgcccatccggattcaactttcacgtatcaaaccaccctgggtggttaaaggtcagcccacttaccagatatgcccccggatcatccccaccacggagtcctcctgccggggttggactggcgccaggaccctcgcagacattaaagcccgtgctctgcaggtccgaggggcgagaggtcaccactgccatagagaggcggccaccactgccatcggaggggggggtggcccgggtggaggtggcggcggggccaccgatgagggaggtggcagaggcagcagcagtggtgatggtggtgaggcctgtggccaccctgagcccaggggaggcccgagcacccctggaaagtgtacgtcagatctacagcgaacacaactactgccgccttatcctctaaatggggagcatacccaggccggaactgccatgtccagagctaggagagaggacctgccttctctgagaaaggaggaaagctgcctactacagagggctacagttggactcacagatgggctaggagatgcctcccaactccccgttgctcccactggggaccagccatgccaggccttgcccctactgtcctcccaaacctcagtagctgagagattagtggagcagcctcagttgcatccggatgttagaactgaatgtgagtctggcaccacttcctgggaaagtgatgatgaggagcaaggacccaccgttcctgcagacaatggtcccattccgtctctagtgggagatgatacattagagaaaggaactggccaagctcttgacagtcatcccactatgaaggatcctgtaaatgtgacccccagttccacacctgaatcctcaccgactgattgcctgcagaacagagcatttgatgacgaattagggcttggtggctcatgccctcctatgagggaaagtgatactagacaagaaaacttgaaaaccaaggctctcgtttctaacagttctttgcattggatacccatcccatcgaatgatgaggtagtgaaacagcccaaaccagaatccagagaacacataccatctgttgagccccaggttggagaggagtgggagaaagctgctcccacccctcctgcattgcctggggatttgacagctgaggagggtctagatcctcttgacagccttacttcactctggactgtgccatctcgaggaggcagtgacagcaatggcagttactgtcaacaggtggacattgaaaagctgaaaatcaacggagactctgaagcactgagtcctcacggtgagtccacggatacagcctctgactttgaaggtcacctcacggaggacagcagtgaggctgacactagagaagctgcagtgacaaagggatcttcggtggacaaggatgagaaacccaattggaaccaatctgccccactgtccaaggtgaatggtgacatgcgtctggttacaaggacagatgggatggttgctcctcagagctgggtgtctcgagtatgtgcggtccgccaaaagatcccagattccctactgctggccagtactgagtaccagccaagagccgtgtgcctgtccatgcctgggtcctcagtggaggccactaacccacttgtgatgcagttgctgcagggtagcttgcccctagagaaggttcttccaccagcccacgatgacagcatgtcagaatccccacaagtaccacttacaaaagaccagagccatggctcgctacgcatgggatctttacatggtcttggaaaaaacagtggcatggttgatggaagcagccccagttctttaagggctttgaaggagcctcttctgccagatagctgtgaaacaggcactggtcttgccaggattgaggccacccaggctcctggagcaccccaaaagaattgcaaggcagtcccaagttttgactccctccatccagtgacaaatcccattacatcctctaggaaactggaagaaatggattccaaagagcagttctcttcctttagttgtgaagatcagaaggaagtccgtgctatgtcacaggacagtaattcaaatgctgctccaggaaagagcccaggagatcttactacctcgagaacacctcgtttctcatctccaaatgtgatctcctttggtccagagcagacaggtcgggccctgggtgatcagagcaatgttacaggccaagggaagaagctttttggctctgggaatgtggctgcaacccttcagcgccccaggcctgcggacccgatgcctcttcctgctgagatccctccagtttttcccagtgggaagttgggaccaagcacaaactccatgtctggtggggtacagactccaagggaagactgggctccaaagccacatgcctttgttggcagcgtcaagaatgagaagacttttgtggggggtcctcttaaggcaaatgccgagaacaggaaagctactgggcatagtcccctggaactggtgggtcacttggaagggatgccctttgtcatggacttgcccttctggaaattaccccgagagccagggaaggggctcagtgagcctctggagccttcttctctcccctcccaactcagcatcaagcaggcattttatgggaagctttctaaactccaactgagttccaccagctttaattattcctctagctctcccacctttcccaaaggccttgctggaagtgtggtgcagctgagccacaaagcaaactttggtgcgagccacagtgcatcactttccttgcaaatgttcactgacagcagcacggtggaaagcatctcgctccagtgtgcgtgcagcctgaaagccatgatcatgtgccaaggctgcggtgcgttctgtcacgatgactgtattggaccctcaaagctctgtgtattgtgccttgtggtgagataataaattatggccatgggaaacattgtatatttagtgtgtgtattttgataatgattgatcttaaatctgtatacagaatatcattgatataatactctttaggcaggagcactcttgccttcccccaaaatttacactgctaaagccctctgtcacttggcgacccttctggtcttgctggaggggtttcctgggtataacccattgggctgcccaaggccagccagcctgagctctcctgcaagacagagcctgatgtggcacggagtggggttgcggggggtggggggactgcctgactcccagagggacttgaaactgaagcaagaaggttgcattctccaccaagggagttaacctacctgaactaagtagaaatgccagtcttccactaccccctccctgccatcttttcttctgctactttggggagttgatggccaggaaagaagccagcacagggttaaagtaactcctggcattgcccaccagggggctggtgcacctgctgacctcagggtcacagttgagtcatttgccagttgacggagcaagtttgaccttggttctgttgctgaagcaaatttggaacttttctgtctcagtgtgatccactaacccacaggatcatttggaaccttgaatagctctgcttggacaatggggttggggaatagggttgtctttcctatgaaaatgccatctgtagaccttgtgagtcagccgtccagatgtttgcaggtgaattcctctgcttgacatcctccctgtcactttggaccctatgggagtgggcatctccacgcacctgtgtatgtgaaagtcattttacatttcaaagcagtgtgtgtttcttatttttatatttttaactctttattcttggatgtataaagtgaactttttggcttctgtaagtatgctctatgcacctctaatgttttatcatgtatttatatgttgtacacagtactggctgattctgtaaatggatgtattgtacagagaacatgaacgtctcttcctaattttacatcttcagcatcattgcattaaagtggtgtaatctccttctcta

SEQ ID NO: 310872 - DNA, 6059 bp, Homo sapiens
  misc_feature (6059)..(6059): n is a, c, g, or t
gaaaagcgaccccacattcaaggacgccaatggcatgttgagctttcccaatctaaaccaggtgcgtggagggaagcaagtgcttactcccagcttgaaccctgagcagcggttctctaactttagtgtcctgtgggcgacacctgggaggcggttaggaacgctactcctagggcccttcgtaagacctgctgagcctcagggtctgggatagagcctgggaatctgcgctttcaccagcttcccaggtgattcaaacgcagtggctcacggaccccactttgagaaacgcagactgggctgtttgccttcagaagctggactggaaattggtattttgaggagaactgaatccactttgcaaagaatgtatgttggacaaagacaaagtatctctgttgggagacgttgttcactgaggatttagcaagggagagcgtaacttgagtgtttgaagccgtctcgttcaaccgatgggggttgtgaattttgtgttcagagcgtcagaggacttgcaggtattagaaaactactcggatgctccaatgacaccaaaacagattctgcaggtcatagaggcagaaggactaaaggaaatgagaagtgggacttcccctctcgcatgcctcaatgctatgctacattccaattcaagaggaggagaggggttgttttataaactgcctggccgaatcagccttttcacgctcaagagatgaagtcttgctatgttggttaaactggtctcaaactcctggcctcaagtgatcttcccaccacagcttcacaaagcactgggatggattacagaaggatgccctgcagtggtctcgccatccagctacagtggagggagaggagccagaggacacggctgatgtggagagctgtgggtctaatgaagccagcactgtgagtggtgaaaacgatgtatctcttgatgaaacatcttcgaacgcatcctgttctacagaatctcagagtcgacctctttccaatcccagggacagctacagagcttcctcacaggcgaacaaacaaaagaaaaagactggggtgatgctgcctcgagttgtcctgactcctctgaaggtaaacggggcccacgtggaatctgcatcagggttctcgggctgccacgccgatggcgagagcggcagcccgtccagcagcagcagcggctctctggccctgggcagcgctgctattcgtggccaggccgaggtcacccaggaccctgccccgctcctgagaggcttccggaagccagccacaggtcaaatgaagcgcaacagaggggaagaaatagattttgagacacctgggtccattcttgtcaacaccaacctccgtgccctgatcaactctcggaccttccatgccttaccatcacacttccagcagcagctcctcttcctcctgcctgaagtagacagacaggtggggacggatggcctgttgcgtctcagcagcagtgcactaaataacgagttttttacccatgcggctcagagctggcgggagcgcctggctgatggtgaatttactcatgagatgcaagtcaggatacgacaggaaatggagaaggaaaagaaggtggaacaatggaaagaaaagttctttgaagactactatggacagaagctgggtttgaccaaagaagagtcattgcagcagaacgtgggccaggaggaggctgaaatcaaaagtggcttgtgtgtcccaggagaatcagtgcgtatacagcgtggtccagccacccgacagcgagatgggcattttaagaaacgctctcggccagatctccgaaccagagccagaaggaatctgtacaaaaaacaggagtcagaacaagcaggggttgctaaggatgcaaaatctgtggcctcagatgttcccctctacaaggatggggaggctaagactgacccagcagggctgagcagtccccatctgccaggcacatcctctgcagcacccgacctggagggtcccgaattcccagttgagtctgtggcttctcggatccaggctgagccagacaacttggcacgtgcctctgcatctccagacagaattcctagcctgcctcaggaaactgtggatcaggaacccaaggatcagaagaggaaatcctttgagcaggcggcctctgcatcctttcccgaaaagaagccccggcttgaagatcgtcagtcctttcgtaacacaattgaaagtgttcacaccgaaaagccacagcccactaaagaggagcccaaagtcccgcccatccggattcaactttcacgtatcaaaccaccctgggtggttaaaggtcagcccacttaccagatatgcccccggatcatccccaccacggagtcctcctgccggggttggactggcgccaggaccctcgcagacattaaagcccgtgctctgcaggtccgaggggcgagaggtcaccactgccatagagaggcggccaccactgccatcggaggggggggtggcccgggtggaggtggcggcggggccaccgatgagggaggtggcagaggcagcagcagtggtgatggtggtgaggcctgtggccaccctgagcccaggggaggcccgagcacccctggaaagtgtacgtcagatctacagcgaacacaactactgccgccttatcctctaaatggggagcatacccaggccggaactgccatgtccagagctaggagagaggacctgccttctctgagaaaggaggaaagctgcctactacagagggctacagttggactcacagatgggctaggagatgcctcccaactccccgttgctcccactggggaccagccatgccaggccttgcccctactgtcctcccaaacctcagtagctgagagattagtggagcagcctcagttgcatccggatgttagaactgaatgtgagtctggcaccacttcctgggaaagtgatgatgaggagcaaggacccaccgttcctgcagacaatggtcccattccgtctctagtgggagatgatacattagagaaaggaactggccaagctcttgacagtcatcccactatgaaggatcctgtaaatgtgacccccagttccacacctgaatcctcaccgactgattgcctgcagaacagagcatttgatgacgaattagggcttggtggctcatgccctcctatgagggaaagtgatactagacaagaaaacttgaaaaccaaggctctcgtttctaacagttctttgcattggatacccatcccatcgaatgatgaggtagtgaaacagcccaaaccagaatccagagaacacataccatctgttgagccccaggttggagaggagtgggagaaagctgctcccacccctcctgcattgcctggggatttgacagctgaggagggtctagatcctcttgacagccttacttcactctggactgtgccatctcgaggaggcagtgacagcaatggcagttactgtcaacaggtggacattgaaaagctgaaaatcaacggagactctgaagcactgagtcctcacggtgagtccacggatacagcctctgactttgaaggtcacctcacggaggacagcagtgaggctgacactagagaagctgcagtgacaaagggatcttcggtggacaaggatgagaaacccaattggaaccaatctgccccactgtccaaggtgaatggtgacatgcgtctggttacaaggacagatgggatggttgctcctcagagctgggtgtctcgagtatgtgcggtccgccaaaagatcccagattccctactgctggccagtactgagtaccagccaagagccgtgtgcctgtccatgcctgggtcctcagtggaggccactaacccacttgtgatgcagttgctgcagggtagcttgcccctagagaaggttcttccaccagcccacgatgacagcatgtcagaatccccacaagtaccacttacaaaagaccagagccatggctcgctacgcatgggatctttacatggtcttggaaaaaacagtggcatggttgatggaagcagccccagttctttaagggctttgaaggagcctcttctgccagatagctgtgaaacaggcactggtcttgccaggattgaggccacccaggctcctggagcaccccaaaagaattgcaaggcagtcccaagttttgactccctccatccagtgacaaatcccattacatcctctaggaaactggaagaaatggattccaaagagcagttctcttcctttagttgtgaagatcagaaggaagtccgtgctatgtcacaggacagtaattcaaatgctgctccaggaaagagcccaggagatcttactacctcgagaacacctcgtttctcatctccaaatgtgatctcctttggtccagagcagacaggtcgggccctgggtgatcagagcaatgttacaggccaagggaagaagctttttggctctgggaatgtggctgcaacccttcagcgccccaggcctgcggacccgatgcctcttcctgctgagatccctccagtttttcccagtgggaagttgggaccaagcacaaactccatgtctggtggggtacagactccaagggaagactgggctccaaagccacatgcctttgttggcagcgtcaagaatgagaagacttttgtggggggtcctcttaaggcaaatgccgagaacaggaaagctactgggcatagtcccctggaactggtgggtcacttggaagggatgccctttgtcatggacttgcccttctggaaattaccccgagagccagggaaggggctcagtgagcctctggagccttcttctctcccctcccaactcagcatcaagcaggcattttatgggaagctttctaaactccaactgagttccaccagctttaattattcctctagctctcccacctttcccaaaggccttgctggaagtgtggtgcagctgagccacaaagcaaactttggtgcgagccacagtgcatcactttccttgcaaatgttcactgacagcagcacggtggaaagcatctcgctccagtgtgcgtgcagcctgaaagccatgatcatgtgccaaggctgcggtgcgttctgtcacgatgactgtattggaccctcaaagctctgtgtattgtgccttgtggtgagataataaattatggccatgggaaacattgtatatttagtgtgtgtattttgataatgattgatcttaaatctgtatacagaatatcattgatataatactctttaggcaggagcactcttgccttcccccaaaatttacactgctaaagccctctgtcacttggcgacccttctggtcttgctggaggggtttcctgggtataacccattgggctgcccaaggccagccagcctgagctctcctgcaagacagagcctgatgtggcacggagtggggttgcggggggtggggggactgcctgactcccagagggacttgaaactgaagcaagaaggttgcattctccaccaagggagttaacctacctgaactaagtagaaatgccagtcttccactaccccctccctgccatcttttcttctgctactttggggagttgatggccaggaaagaagccagcacagggttaaagtaactcctggcattgcccaccagggggctggtgcacctgctgacctcagggtcacagttgagtcatttgccagttgacggagcaagtttgaccttggttctgttgctgaagcaaatttggaacttttctgtctcagtgtgatccactaacccacaggatcatttggaaccttgaatagctctgcttggacaatggggttggggaatagggttgtctttcctatgtcctctgcttgacatcctccctgtcactttggaccctatgggagtgggcatctccacgcacctgtgtatgtgaaagtcattttacatttcaaaggagccgtgacttttttctttttcatttacccaacaatttattttagagtgtttaaggtgtcctgtggggcctctgggagcaatctctn

SEQ ID NO: 310873 - DNA, 5898 bp, Homo sapiens
  misc_feature (5671)..(5671): n is a, c, g, or t
gaaaagcgaccccacattcaaggacgccaatggcatgttgagctttcccaatctaaaccaggtgcgtggagggaagcaagtgcttactcccagcttgaaccctgagcagcggttctctaactttagtgtcctgtgggcgacacctgggaggcggttaggaacgctactcctagggcccttcgtaagacctgctgagcctcagggtctgggatagagcctgggaatctgcgctttcaccagcttcccaggtgattcaaacgcagtggctcacggaccccactttgagaaacgcagactgggctgtttgccttcagaagctggactggaaattggtattttgaggagaactgaatccactttgcaaagaatgtatgttggacaaagacaaagtatctctgttgggagacgttgttcactgaggatttagcaagggagagcgtaacttgagtgtttgaagccgtctcgttcaaccgatgggggttgtgaattttgtgttcagagcgtcagaggacttgcaggtattagaaaactactcggatgctccaatgacaccaaaacagattctgcaggtcatagaggcagaaggactaaaggaaatgagaagtgggacttcccctctcgcatgcctcaatgctatgctacattccaattcaagaggaggagaggggttgttttataaactgcctggccgaatcagccttttcacgctcaagagatgaagtcttgctatgttggttaaactggtctcaaactcctggcctcaagtgatcttcccaccacagcttcacaaagcactgggatggattacagaaggatgccctgcagtggtctcgccatccagctacagtggagggagaggagccagaggacacggctgatgtggagagctgtgggtctaatgaagccagcactgtgagtggtgaaaacgatgtatctcttgatgaaacatcttcgaacgcatcctgttctacagaatctcagagtcgacctctttccaatcccagggacagctacagagcttcctcacaggcgaacaaacaaaagaaaaagactggggtgatgctgcctcgagttgtcctgactcctctgaaggtaaacggggcccacgtggaatctgcatcagggttctcgggctgccacgccgatggcgagagcggcagcccgtccagcagcagcagcggctctctggccctgggcagcgctgctattcgtggccaggccgaggtcacccaggaccctgccccgctcctgagaggcttccggaagccagccacaggtcaaatgaagcgcaacagaggggaagaaatagattttgagacacctgggtccattcttgtcaacaccaacctccgtgccctgatcaactctcggaccttccatgccttaccatcacacttccagcagcagctcctcttcctcctgcctgaagtagacagacaggtggggacggatggcctgttgcgtctcagcagcagtgcactaaataacgagttttttacccatgcggctcagagctggcgggagcgcctggctgatggtgaatttactcatgagatgcaagtcaggatacgacaggaaatggagaaggaaaagaaggtggaacaatggaaagaaaagttctttgaagactactatggacagaagctgggtttgaccaaagaagagtcattgcagcagaacgtgggccaggaggaggctgaaatcaaaagtggcttgtgtgtcccaggagaatcagtgcgtatacagcgtggtccagccacccgacagcgagatgggcattttaagaaacgctctcggccagatctccgaaccagagccagaaggaatctgtacaaaaaacaggagtcagaacaagcaggggttgctaaggatgcaaaatctgtggcctcagatgttcccctctacaaggatggggaggctaagactgacccagcagggctgagcagtccccatctgccaggcacatcctctgcagcacccgacctggagggtcccgaattcccagttgagtctgtggcttctcggatccaggctgagccagacaacttggcacgtgcctctgcatctccagacagaattcctagcctgcctcaggaaactgtggatcaggaacccaaggatcagaagaggaaatcctttgagcaggcggcctctgcatcctttcccgaaaagaagccccggcttgaagatcgtcagtcctttcgtaacacaattgaaagtgttcacaccgaaaagccacagcccactaaagaggagcccaaagtcccgcccatccggattcaactttcacgtatcaaaccaccctgggtggttaaaggtcagcccacttaccagatatgcccccggatcatccccaccacggagtcctcctgccggggttggactggcgccaggaccctcgcagacattaaagcccgtgctctgcaggtccgaggggcgagaggtcaccactgccatagagaggcggccaccactgccatcggaggggggggtggcccgggtggaggtggcggcggggccaccgatgagggaggtggcagaggcagcagcagtggtgatggtggtgaggcctgtggccaccctgagcccaggggaggcccgagcacccctggaaagtgtacgtcagatctacagcgaacacaactactgccgccttatcctctaaatggggagcatacccaggccggaactgccatgtccagagctaggagagaggacctgccttctctgagaaaggaggaaagctgcctactacagagggctacagttggactcacagatgggctaggagatgcctcccaactccccgttgctcccactggggaccagccatgccaggccttgcccctactgtcctcccaaacctcagtagctgagagattagtggagcagcctcagttgcatccggatgttagaactgaatgtgagtctggcaccacttcctgggaaagtgatgatgaggagcaaggacccaccgttcctgcagacaatggtcccattccgtctctagtgggagatgatacattagagaaaggaactggccaagctcttgacagtcatcccactatgaaggatcctgtaaatgtgacccccagttccacacctgaatcctcaccgactgattgcctgcagaacagagcatttgatgacgaattagggcttggtggctcatgccctcctatgagggaaagtgatactagacaagaaaacttgaaaaccaaggctctcgtttctaacagttctttgcattggatacccatcccatcgaatgatgaggtagtgaaacagcccaaaccagaatccagagaacacataccatctgttgagccccaggttggagaggagtgggagaaagctgctcccacccctcctgcattgcctggggatttgacagctgaggagggtctagatcctcttgacagccttacttcactctggactgtgccatctcgaggaggcagtgacagcaatggcagttactgtcaacaggtggacattgaaaagctgaaaatcaacggagactctgaagcactgagtcctcacggtgagtccacggatacagcctctgactttgaaggtcacctcacggaggacagcagtgaggctgacactagagaagctgcagtgacaaagggatcttcggtggacaaggatgagaaacccaattggaaccaatctgccccactgtccaaggtgaatggtgacatgcgtctggttacaaggacagatgggatggttgctcctcagagctgggtgtctcgagtatgtgcggtccgccaaaagatcccagattccctactgctggccagtactgagtaccagccaagagccgtgtgcctgtccatgcctgggtcctcagtggaggccactaacccacttgtgatgcagttgctgcagggtagcttgcccctagagaaggttcttccaccagcccacgatgacagcatgtcagaatccccacaagtaccacttacaaaagaccagagccatggctcgctacgcatgggatctttacatggtcttggaaaaaacagtggcatggttgatggaagcagccccagttctttaagggctttgaaggagcctcttctgccagatagctgtgaaacaggcactggtcttgccaggattgaggccacccaggctcctggagcaccccaaaagaattgcaaggcagtcccaagttttgactccctccatccagtgacaaatcccattacatcctctaggaaactggaagaaatggattccaaagagcagttctcttcctttagttgtgaagatcagaaggaagtccgtgctatgtcacaggacagtaattcaaatgctgctccaggaaagagcccaggagatcttactacctcgagaacacctcgtttctcatctccaaatgtgatctcctttggtccagagcagacaggtcgggccctgggtgatcagagcaatgttacaggccaagggaagaagctttttggctctgggaatgtggctgcaacccttcagcgccccaggcctgcggacccgatgcctcttcctgctgagatccctccagtttttcccagtgggaagttgggaccaagcacaaactccatgtctggtggggtacagactccaagggaagactgggctccaaagccacatgcctttgttggcagcgtcaagaatgagaagacttttgtggggggtcctcttaaggcaaatgccgagaacaggaaagctactgggcatagtcccctggaactggtgggtcacttggaagggatgccctttgtcatggacttgcccttctggaaattaccccgagagccagggaaggggctcagtgagcctctggagccttcttctctcccctcccaactcagcatcaagcaggcattttatgggaagctttctaaactccaactgagttccaccagctttaattattcctctagctctcccacctttcccaaaggccttgctggaagtgtggtgcagctgagccacaaagcaaactttggtgcgagccacagtgcatcactttccttgcaaatgttcactgacagcagcacggtggaaagcatctcgctccagtgtgcgtgcagcctgaaagccatgatcatgtgccaaggctgcggtgcgttctgtcacgatgactgtattggaccctcaaagctctgtgtattgtgccttgtggtgagataataaattatggccatgggaaaaaaaaaaaaaaaaacaacaaaaaaaaaaaaaaaaacaaaaaaaaaaaaaaaaaaaaaaaacggcggcgccgcgcgccgagaaaaatatgtccccgcagggggcgccccaaagcctccggccgcccccccgtttttttggaccaaaggggcgcccccaataaaggggcggctgttttatataacccagcggcgcgggggcgcccgttaaaaccacccgcgcgcggggggaacaaccgcgtcccctcgggggcgtccttgtgggggagagcgcccccctctcctgctgggggggggcgagcaccaattttgggggcacccctccaccctgccgtgatgattatgacgggcccctcgggcgcaatatcaaaccctgcggcgtgcctctgtggtggcttccccccccgcgcataatgtcctgcgcccgagaaaactggcccgcgggcatatctttcgccatttttcgcgcnggtcgtgtaaataactctccccctcctcctcaccccctcccgccaacgccccactcaccccaccaccacccccagcaccacctctcactccaactccccccacgcattccctctactcactgtcatcactaccgcctactcacaccccctaccacaacccatcacaccccatcccacacaacaacaccacctcctcttcacctaccacatccacactcccacccccc

SEQ ID NO: 310874 - DNA, 2070 bp, Homo sapiens
gaaaagcgaccccacattcaaggacgccaatggcatgttgagctttcccaatctaaaccaggtgcgtggagggaagcaagtgcttactcccagcttgaaccctgagcagcggttctctaactttagtgtcctgtgggcgacacctgggaggcggttaggaacgctactcctagggcccttcgtaagacctgctgagcctcagggtctgggatagagcctgggaatctgcgctttcaccagcttcccaggtgattcaaacgcagtggctcacggaccccactttgagaaacgcagactgggctgtttgccttcagaagctggactggaaattggtattttgaggagaactgaatccactttgcaaagaatgtatgttggacaaagacaaagtatctctgttgggagacgttgttcactgaggatttagcaagggagagcgtaacttgagtgtttgaagccgtctcgttcaaccgatgggggttgtgaattttgtgttcagagcgtcagaggacttgcaggtattagaaaactactcggatgctccaatgacaccaaaacagattctgcaggtcatagaggcagaaggactaaaggaaatgagaagtgggacttcccctctcgcatgcctcaatgctatgctacattccaattcaagaggaggagaggggttgttttataaactgcctggccgaatcagccttttcacgctcaagagatgaagtcttgctatgttggttaaactggtctcaaactcctggcctcaagtgatcttcccaccacagcttcacaaagcactgggatggattacagaaggatgccctgcagtggtctcgccatccagctacagtggagggagaggagccagaggacacggctgatgtggagagctgtgggtctaatgaagccagcactgtgagtggtgaaaacgatgtatctcttgatgaaacatcttcgaacgcatcctgttctacagaatctcagagtcgacctctttccaatcccagggacagctacagagcttcctcacaggcgaacaaacaaaagaaaaagactggggtgatgctgcctcgagttgtcctgactcctctgaaggtaaacggggcccacgtggaatctgcatcagggttctcgggctgccacgccgatggcgagagcggcagcccgtccagcagcagcagcggctctctggccctgggcagcgctgctattcgtggccaggccgaggtcacccaggaccctgccccgctcctgagaggcttccggaagccagccacaggtcaaatgaagcgcaacagaggggaagaaatagattttgagacacctgggtccattcttgtcaacaccaacctccgtgccctgatcaactctcggaccttccatgccttaccatcacacttccagcagcagctcctcttcctcctgcctgaagtagacagacaggtggggacggatggcctgttgcgtctcagcagcagtgcactaaataacgagttttttacccatgcggctcagagctggcgggagcgcctggctgatggtgaatttactcatgagatgcaagtcaggatacgacaggaaatggagaaggaaaagaaggtggaacaatggaaagaaaagttctttgaagactactatggacagaagctgggtttgaccaaagaagagtcattgcagcagaacgtgggccaggaggaggctgaaatcaaaagtggcttgtgtgtcccaggagaatcagtgcgtatacagcgtggtccagccacccgacagcgagatgggcattttaagaaacgctctcggccagatctccgaaccagagccagaaggaatctgtacaaaaaacaggagtcagaacaaagcaaactttggtgcgagccacagtgcatcactttccttgcaaatgttcactgacagcagcacggtggaaagcatctcgctccagtgtgcgtgcagcctgaaagccatgatcatgtgccaaggctgcggtgcgttctgtcacgatgactgtattggaccctcaaagctctgtgtattgtgccttgtggtgagataataaattatggccatgggaaa

SEQ ID NO: 310875 - DNA, 1212 bp, Homo sapiens
gaaaagcgaccccacattcaaggacgccaatggcatgttgagctttcccaatctaaaccaggtgcgtggagggaagcaagtgcttactcccagcttgaaccctgagcagcggttctctaactttagtgtcctgtgggcgacacctgggaggcggttaggaacgctactcctagggcccttcgtaagacctgctgagcctcagggtctgggatagagcctgggaatctgcgctttcaccagcttcccaggtgattcaaacgcagtggctcacggaccccactttgagaaacgcagactgggctgtttgccttcagaagctggactggaaattggtattttgaggagaactgaatccactttgcaaagaatgtatgttggacaaagacaaagtatctctgttgggagacgttgttcactgaggatttagcaagggagagcgtaacttgagtgtttgaagccgtctcgttcaaccgatgggggttgtgaattttgtgttcagagcgtcagaggacttgcaggtattagaaaactactcggatgctccaatgacaccaaaacagattctgcaggtcatagaggcagaaggactaaaggaaatgagaagtgggacttcccctctcgcatgcctcaatgctatgctacattccaattcaagaggaggagaggggttgttttataaactgcctggccgaatcagccttttcacgctcaagagatgaagtcttgctatgttggttaaactggtctcaaactcctggcctcaagtgatcttcccaccacagcttcacaaagcactgggatggattacagaaggatgccctgcagtggtctcgccatccagctacagtggagggagaggagccagaggacacggctgatgtggagagctgtgggtctaatgaagccagcactgtgagtggtgaaaacgatgtatctcttgatgaaacatcttcgaacgcatcctgttctacagaatctcagagtcgacctctttccaatcccagggacagctacagagcttcctcacaggcgaacaaacaaaagaaaaagactggggtgatgctgcctcgagttgtcctgactcctctgaaggtaaacggggcccacgtggaatctgcatcaggtatgtgtaaactcatggttgtgatgctttttcctcaggtcctggggacctggcctccctctgtcagcagtttctgacctaatagtgcg

SEQ ID NO: 310876 - DNA, 2771 bp, Homo sapiens
ctcattagagtttaatacacaattattttatttcctgccaatctaatggcgaagacatggaataacccatcaaacagcccagtaaccccaggaaaccagagggacggaaaccagggcgatgggcgagtcagtcatggccagtgcgccgtgtttcgaaggggacggccatggagcggtgggtggtcgctcagctccccaatcgctctccgacacccggctggggagacaggacctccctggaggccgcagcagcttgattgtcacccgggcaaccccaccttccggttccctctacaaccccttgccccgcttccggttccggcgtcgtgcgtcatcgctgggcgactgatttcgagtttccggtcaggttaggccgggggggtgcggtcctggtcggaaggaggtggagagtcgggggtcaccaggcctatccttggcgccacagtcggccaccggggctcgccgccgtcatggagagcggagggcggccctcgctgtgccagttcatcctcctgggcaccacctctgtggtcaccgccgccctgtactccgtgtaccggcagaaggcccgggtctcccaagagctcaagggagctaaaaaagttcatttgggtgaagatttaaagagtattctttcagaagctccaggaaaatgcgtgccttatgctgttatagaaggagctgtgcggtctgttaaagaaacgcttaacagccagtttgtggaaaactgcaagggggtaattcagcggctgacacttcaggagcacaagatggtgtggaatcgaaccacccacctttggaatgattgctcaaagatcattcatcagaggaccaacacagtgccctttgacctggtgccccacgaggatggcgtggatgtggctgtgcgagtgctgaagcccctggactcagtggatctgggtctagagactgtgtatgagaagttccacccctcgattcagtccttcaccgatgtcatcggccactacatcagcggtgagcggcccaaaggcatccaagagaccgaggagatgctgaaggtgggggccaccctcacaggggttggcgaactggtcctggacaacaactctgtccgcctgcagccgcccaaacaaggcatgcagtactatctaagcagccaggacttcgacagcctgctgcagaggcaggagtcgagcgtcaggctctggaaggtgctggcgctggtttttggctttgccacatgtgccaccctcttcttcattctccggaagcagtatctgcagcggcaggagcgcctgcgcctcaagcagatgcaggaggagttccaggagcatgaggcccagctgctgagccgagccaagcctgaggacagggagagtctgaagagcgcctgtgtagtgtgtctgagcagcttcaagtcctgcgtctttctggagtgtgggcacgtttgttcctgcaccgagtgctaccgcgccttgccagagcccaagaagtgccctatctgcagacaggcgatcacccgggtgatacccctgtacaacagctaatagtttggaagccgcacagcttgacctggaagcacccctgcccccttttcagggatttttatctcgaggcctttggaggagcagtggtgggggtagctgtcacctccaggtatgattgagggaggaattgggtagaaactctccagacccatgcctccaatggcaggatgctgcctttcccacctgagaggggaccctgtccatgtgcagcctcatcagagcctcaccctgggaggatgccgtggcgtctcctcccaggagccagatcagtgcgagtgtgactgaaaatgcctcatcacttaagcaccaaagccagtgatcagcagctcttctgttcctgtgtcttctgtttttttctggtgaatcgttgcttgctgtggacttggtggaggactcagaggggaggaaaggctgggccccgagtacaacggatgccttgggtgctgcctccgaagagactctgccgcagcttttcttctttttcctcatgccccgggaaacagtctttcttcagaattgtcaggctgggcaggtcaacttgtgttcctttcccctcacctgcttgcctccttaacgcctgcacgtgtgtgtagaggacaaaagaaagtgaagtcagcacatccgcttctgcccagatggtcggggccccgggcaacagattgaagagagatcatgtgaagggcagttggtcaggcaggcctcctggtttcgccactggccctgatttgaactcctgccacttgggagagctcggggtggtccctggttttccctcctggagaatgaggcgcagaggcctcgcctcctgaaggacgcagtgtggatgccactggcctagtgtcctggcctcacagcttccttgcaaggctgtcacaaggaaaagcagccggctggcaccctgagcatatgccctcttggggctccctcatccagcccgtcgcagctttgacatcttggtgtactcatgtcgcttctccttgtgttaccccctcccagtattaccatttgcccctcacctgcccttggtgagccttttagtgcaagacagatggggctgttttcccccacctctgagtagttggaggtcacatacacagctctttttttattgcccttttctgcctctgaatgttcatctctcgtcctcctttgtgcaggcgaggaaggggtgccctcaggggccgacactagtatgatgcagtgtccagtgtgaacagcagaaattaaacatgttgcaaccaa

SEQ ID NO: 310877 - DNA, 3187 bp, Homo sapiens
ctcattagagtttaatacacaattattttatttcctgccaatctaatggcgaagacatggaataacccatcaaacagcccagtaaccccaggaaaccagagggacggaaaccagggcgatgggcgagtcagtcatggccagtgcgccgtgtttcgaaggggacggccatggagcggtgggtggtcgctcagctccccaatcgctctccgacacccggctggggagacaggacctccctggaggccgcagcagcttgattgtcacccgggcaaccccaccttccggttccctctacaaccccttgccccgcttccggttccggcgtcgtgcgtcatcgctgggcgactgatttcgagtttccggtcaggttaggccgggggggtgcggtcctggtcggaaggaggtggagagtcgggggtcaccaggcctatccttggcgccacagtcggccaccggggctcgccgccgtcatggagagcggagggcggccctcgctgtgccagttcatcctcctgggcaccacctctgtggtcaccgccgccctgtactccgtgtaccggcagaaggcccgggtctcccaagagctcaagggagctaaaaaagttcatttgggtgaagatttaaagagtattctttcagaagctccaggaaaatgcgtgccttatgctgttatagaaggagctgtgcggtctgttaaagaaacgcttaacagccagtttgtggaaaactgcaagggggtaattcagcggctgacacttcaggagcacaagatggtgtggaatcgaaccacccacctttggaatgattgctcaaagatcattcatcagaggaccaacacagtgccctttgacctggtgccccacgaggatggcgtggatgtggctgtgcgagtgctgaagcccctggactcagtggatctgggtctagagactgtgtatgagaagttccacccctcgattcagtccttcaccgatgtcatcggccactacatcagcggtgagcggcccaaaggcatccaagagaccgaggagatgctgaaggtgggggccaccctcacaggggttggcgaactggtcctggacaacaactctgtccgcctgcagccgcccaaacaaggcatgcagtactatctaagcagccaggacttcgacagcctgctgcagaggcaggagtcgagcgtcaggctctggaaggtgctggcgctggtttttggctttgccacatgtgccaccctcttcttcattctccggaagcagtatctgcagcggcaggagcgcctgcgcctcaagcagatgcaggaggagttccaggagcatgaggcccagctgctgagccgagccaagcctgaggacagggagagtctgaagagcgcctgtgtagtgtgtctgagcagcttcaagtcctgcgtctttctggagtgtgggcacgtttgttcctgcaccgagtgctaccgcgccttgccagagcccaagaagtgccctatctgcagacaggcgatcacccgggtgatacccctgtacaacagctaatagtttggaagccgcacagcttgacctggaagcacccctgcccccttttcagggatttttatctcgaggcctttggaggagcagtggtgggggtagctgtcacctccaggtatgattgagggaggaattgggtagaaactctccagacccatgcctccaatggcaggatgctgcctttcccacctgagaggggaccctgtccatgtgcagcctcatcagagcctcaccctgggaggatgccgtggcgtctcctcccaggagccagatcagtgcgagtgtgactgaaaatgcctcatcacttaagcaccaaagccagtgatcagcagctcttctgttcctgtgtcttctgtttttttctggtgaatcgttgcttgctgtggacttggtggaggactcagaggggaggaaaggctgggccccgagtacaacggatgccttgggtgctgcctccgaagagactctgccgcagcttttcttctttttcctcatgccccgggaaacagtctttcttcagaattgtcaggctgggcaggtcaacttgtgttcctttcccctcacctgcttgcctccttaacgcctgcacgtgtgtgtagaggacaaaagaaagtgaagtcagcacatccgcttctgcccagatggtcggggccccgggcaacagattgaagagagatcatgtgaagggcagttggtcaggcaggcctcctggtttcgccactggccctgatttgaactcctgccacttgggagagctcggggtggtccctggttttccctcctggagaatgaggcgcagaggcctcgcctcctgaaggacgcagtgtggatgccactggcctagtgtcctggcctcacagcttccttgcaaggctgtcacaaggaaaagcagccggctggcaccctgagcatatgccctcttggggctccctcatccagcccgtcgcagctttgacatcttggtgtactcatgtcgcttctccttgtgttaccccctcccagtattaccatttgcccctcacctgcccttggtgagccttttagtgcaagacagatggggctgttttcccccacctctgagtagttggaggtcacatacacagctctttttttattgcccttttctgcctctgaatgttcatctctcgtcctcctttgtgcaggcgaggaaggggtgccctcaggggccgacactagtatgatgcagtgtccagtgtgaacagcagaaattaaacatgttgcaaccaaaaaaaaaaaaaaaaaaaaaaaaaaaaaaaaaaaaaaaaaaaaaaaaaaaaaacacaaaaacaagagagggggcgcgcgccgccaacagaaggtccccgccccgcgaggggcgccccaccacctacggcgcgaccacccgccgcgtctcgcgcagcaaaagagggcgcccccatataacgagcgcgccgctactaaacagcagcagcgcccctgccgccggccattatcacagccgcgagctcgagcgcgggggacaaaccacgcacagcgcgggggaaacctagtgcggcgagaggagcacacccacaatctgccggggaggagcgcgcaccacccaggtcgggcgccgcaaaccaccccgcagcgcgaatctcaagccctctcaagcgacgcacactatacccacctccccccga

SEQ ID NO: 310878 - DNA, 2696 bp, Homo sapiens
ctcattagagtttaatacacaattattttatttcctgccaatctaatggcgaagacatggaataacccatcaaacagcccagtaaccccaggaaaccagagggacggaaaccagggcgatgggcgagtcagtcatggccagtgcgccgtgtttcgaaggggacggccatggagcggtgggtggtcgctcagctccccaatcgctctccgacacccggctggggagacaggacctccctggaggccgcagcagcttgattgtcacccgggcaaccccaccttccggttccctctacaaccccttgccccgcttccggttccggcgtcgtgcgtcatcgctgggcgactgatttcgagtttccggtcaggttaggccgggggggtgcggtcctggtcggaaggaggtggagagtcgggggtcaccaggcctatccttggcgccacagtcggccaccggggctcgccgccgtcatggagagcggagggcggccctcgctgtgccagttcatcctcctgggcaccacctctgtggtcaccgccgccctgtactccgtgtaccggcagaaggcccgggtctcccaagagctcaagggagctaaaaaagttcatttgggtgaagatttaaagagtattctttcagaagctccaggaaaatgcgtgccttatgctgttatagaaggagctgtgcggtctgttaaagaaacgcttaacagccagtttgtggaaaactgcaagggggtaattcagcggctgacacttcaggagcacaagatggtgtggaatcgaaccacccacctttggaatgattgctcaaagatcattcatcagaggaccaacacagtgccctttgacctggtgccccacgaggatggcgtggatgtggctgtgcgagtgctgaagcccctggactcagtggatctgggtctagagactgtgtatgagaagttccacccctcgattcagtccttcaccgatgtcatcggccactacatcagcggtgagcggcccaaaggcatccaagagaccgaggagatgctgaaggtgggggccaccctcacaggggttggcgaactggtcctggacaacaactctgtccgcctgcagccgcccaaacaaggcatgcagtactatctaagcagccaggacttcgacagcctgctgcagaggcaggagtcgagcgtcaggctctggaaggtgctggcgctggtttttggctttgccacatgtgccaccctcttcttcattctccggaagcagtatctgcagcggcaggagcgcctgcgcctcaagcagatgcaggaggagttccaggagcatgaggcccagctgctgagccgagccaagcctgaggacagggagagtctgaagagcgcctgtgtagtgtgtctgagcagcttcaagtcctgcgtctttctggagtgtgggcacgtttgttcctgcaccgagtgctaccgcgccttgccagagcccaagaagtgccctatctgcagacaggcgatcacccgggtgatacccctgtacaacagctaatagtttggaagccgcacagcttgacctggaagcacccctgcccccttttcagggatttttatctcgaggcctttggaggagcagtggtgggggtagctgtcacctccaggtatgattgagggaggaattgggtagaaactctccagacccatgcctccaatggcaggatgctgcctttcccacctgagaggggaccctgtccatgtgcagcctcatcagagcctcaccctgggaggatgccgtggcgtctcctcccaggagccagatcagtgcgagtgtgactgaaaatgcctcatcacttaagcaccaaagccagtgatcagcagctcttctgttcctgtgtcttctgtttttttctggtgaatcgttgcttgctgtggacttggtggaggactcagaggggaggaaaggctgggccccgagtacaacggatgccttgggtgctgcctccgaagagactctgccgcagcttttcttctttttcctcatgccccgggaaacagtctttcttcagaattgtcaggctgggcaggtcaacttgtgttcctttcccctcacctgcttgcctccttaacgcctgcacgtgtgtgtagaggacaaaagaaagtgaagtcagcacatccgcttctgcccagatggtcggggccccgggcaacagattgaagagagatcatgtgaagggcagttggtcaggcaggcctcctggtttcgccactggccctgatttgaactcctgccacttgggagagctcggggtggtccctggttttccctcctggagaatgaggcgcagaggcctcgcctcctgaaggacgcagtgtggatgccactggcctagtgtcctggcctcacagcttccttgcaaggctgtcacaaggaaaagcagccggctggcaccctgagcatatgccctcttggggctccctcatccagcccgtcgcagctttgacatcttggtgtactcatgtcgcttctccttgtgttttcccccacctctgagtagttggaggtcacatacacagctctttttttattgcccttttctgcctctgaatgttcatctctcgtcctcctttgtgcaggcgaggaaggggtgccctcaggggccgacactagtatgatgcagtgtccagtgtgaacagcagaaattaaacatgttgcaaccaa

SEQ ID NO: 310879 - DNA, 2222 bp, Homo sapiens
ctcattagagtttaatacacaattattttatttcctgccaatctaatggcgaagacatggaataacccatcaaacagcccagtaaccccaggaaaccagagggacggaaaccagggcgatgggcgagtcagtcatggccagtgcgccgtgtttcgaaggggacggccatggagcggtgggtggtcgctcagctccccaatcgctctccgacacccggctggggagacaggacctccctggaggccgcagcagcttgattgtcacccgggcaaccccaccttccggttccctctacaaccccttgccccgcttccggttccggcgtcgtgcgtcatcgctgggcgactgatttcgagtttccggtcaggttaggccgggggggtgcggtcctggtcggaaggaggtggagagtcgggggtcaccaggcctatccttggcgccacagtcggccaccggggctcgccgccgtcatggagagcggagggcggccctcgctgtgccagttcatcctcctgggcaccacctctgtggtcaccgccgccctgtactccgtgtaccggcagaaggcccgggtctcccaagagctcaagggagctaaaaaagttcatttgggtgaagatttaaagagtattctttcagaagctccaggaaaatgcgtgccttatgctgttatagaaggagctgtgcggtctgttaaagaaacgcttaacagccagtttgtggaaaactgcaagggggtaattcagcggctgacacttcaggagcacaagatggtgtggaatcgaaccacccacctttggaatgattgctcaaagatcattcatcagaggaccaacacagtgccctttgacctggtgccccacgaggatggcgtggatgtggctgtgcgagtgctgaagcccctggactcagtggatctgggtctagagactgtgtatgagaagttccacccctcgattcagtccttcaccgatgtcatcggccactacatcagcggtgagcggcccaaaggcatccaagagaccgaggagatgctgaaggtgggggccaccctcacaggggttggcgaactggtcctggacaacaactctgtccgcctgcagccgcccaaacaaggcatgcagtactatctaagcagccaggacttcgacagcctgctgcagaggcaggagtcgagcgtcaggctctggaaggtgctggcgctggtttttggctttgccacatgtgccaccctcttcttcattctccggaagcagtatctgcagcggcaggagcgcctgcgcctcaagcagatgcaggaggagttccaggagcatgaggcccagctgctgagccgagccaagcctgaggacagggagagtctgaagagcgcctgtgtagtgtgtctgagcagcttcaagtcctgcgtctttctggagtgtgggcacgtttgttcctgcaccgagtgctaccgcgccttgccagagcccaagaagtgccctatctgcagacaggcgatcacccgggtgatacccctgtacaacagctaatagtttggaagccgcacagcttgacctggaagcacccctgcccccttttcagggatttttatctcgaggcctttggaggagcagtggtgggggtagctgtcacctccaggtatgattgagggaggaattgggtagaaactctccagacccatgcctccaatggcaggatgctgcctttcccacctgagaggggaccctgtccatgtgcagcctcatcagagcctcaccctgggaggatgccgtggcgtctcctcccaggagccagatcagtgcgagtgtgactgaaaatgcctcatcacttaagcaccaaagccagtgatcagcagctcttctgttcctgtgtcttctgtttttttctggtgaatcgttgcttgctgtggacttggtggaggactcagaggggaggaaaggctgggccccgagtacaacggatgccttgggtgctgcctccgaagagactctgccgcagcttttcttctttttcctcatgccccgggaaacagtctttcttcagaattgtcaggctgggcaggtcaacttgtgttcctttcccctcacctgcttgcctccttaacgcctgcacgtgtgtgtagaggacaaaagaaagtgaagtcagcacatccgcttctgggccgacactagtatgatgcagtgtccagtgtgaacagcagaaattaaacatgttgcaaccaa

SEQ ID NO: 310880 - DNA, 2193 bp, Homo sapiens
ctcattagagtttaatacacaattattttatttcctgccaatctaatggcgaagacatggaataacccatcaaacagcccagtaaccccaggaaaccagagggacggaaaccagggcgatgggcgagtcagtcatggccagtgcgccgtgtttcgaaggggacggccatggagcggtgggtggtcgctcagctccccaatcgctctccgacacccggctggggagacaggacctccctggaggccgcagcagcttgattgtcacccgggcaaccccaccttccggttccctctacaaccccttgccccgcttccggttccggcgtcgtgcgtcatcgctgggcgactgatttcgagtttccggtcaggttaggccgggggggtgcggtcctggtcggaaggaggtggagagtcgggggtcaccaggcctatccttggcgccacagtcggccaccggggctcgccgccgtcatggagagcggagggcggccctcgctgtgccagttcatcctcctgggcaccacctctgtggtcaccgccgccctgtactccgtgtaccggcagaaggcccgggtctcccaagagctcaagggagctaaaaaagttcatttgggtgaagatttaaagagtattctttcagaagctccaggaaaatgcgtgccttatgctgttatagaaggagctgtgcggtctgttaaagaaacgcttaacagccagtttgtggaaaactgcaagggggtaattcagcggctgacacttcaggagcacaagatggtgtggaatcgaaccacccacctttggaatgattgctcaaagatcattcatcagaggaccaacacagtgccctttgacctggtgccccacgaggatggcgtggatgtggctgtgcgagtgctgaagcccctggactcagtggatctgggtctagagactgtgtatgagaagttccacccctcgattcagtccttcaccgatgtcatcggccactacatcagcggtgagcggcccaaaggcatccaagagaccgaggagatgctgaaggtgggggccaccctcacaggggttggcgaactggtcctggacaacaactctgtccgcctgcagccgcccaaacaaggcatgcagtactatctaagcagccaggacttcgacagcctgctgcagaggcaggagtcgagcgtcaggctctggaaggtgctggcgctggtttttggctttgccacatgtgccaccctcttcttcattctccggaagcagtatctgcagcggcaggagcgcctgcgcctcaagcagatgcaggaggagttccaggagcatgaggcccagctgctgagccgagccaagcctgaggacagggagagtctgaagagcgcctgtgtagtgtgtctgagcagcttcaagtcctgcgtctttctggagtgtgggcacgtttgttcctgcaccgagtgctaccgcgccttgccagagcccaagaagtgccctatctgcagacaggcgatcacccgggtgatacccctgtacaacagctaatagtttggaagccgcacagcttgacctggaagcacccctgcccccttttcagggatttttatctcgaggcctttggaggagcagtggtgggggtagctgtcacctccaggtatgattgagggaggaattgggtagaaactctccagacccatgcctccaatggcaggatgctgcctttcccacctgagaggggaccctgtccatgtgcagcctcatcagagcctcaccctgggaggatgccgtggcgtctcctcccaggagccagatcagtgcgagtgtgactgaaaatgcctcatcacttaagcaccaaagccagtgatcagcagctcttctgttcctgtgtcttctgtttttttctggtgaatcgttgcttgctgtggacttggtggaggactcagaggggaggaaaggctgggccccgagtacaacggatgccttgggtgctgcctccgaagagactctgccgcagcttttcttctttttcctcatgccccgggaaacagtctttcttcagaattgtcaggctgggcaggtcaacttgtgttcctttcccctcacctgcttgcctcctttgtgcaggcgaggaaggggtgccctcaggggccgacactagtatgatgcagtgtccagtgtgaacagcagaaattaaacatgttgcaaccaa

SEQ ID NO: 310881 - DNA, 598 bp, Homo sapiens
attaccattcgagctcggtccccagatcatgtgaagggcagttggtcaggcaggcctcctggtttcgccactggccctgatttgaactcctgccacttgggagagctcggggtggtccctggttttccctcctggagaatgaggcgcagaggcctcgcctcctgaaggacgcagtgtggatgccactggcctagtgtcctggcctcacagcttccttgcaaggctgtcacaaggaaaagcagccggctggcaccctgagcatatgccctcttggggctccctcatccagcccgtcgcagctttgacatcttggtgtactcatgtcgcttctccttgtgttaccccctcccagtattaccatttgcccctcacctgcccttggtgagccttttagtgcaagacagatggggctgttttcccccacctctgagtagttggaggtcacatacacagctctttttttattgcccttttctgcctctgaatgttcatctctcgtcctcctttgtgcaggcgaggaaggggtgccctcaggggccgacactagtatgatgcagtgtccagtgtgaacagcagaaattaaacatgttgcaaccaa

SEQ ID NO: 310882 - DNA, 1049 bp, Homo sapiens
ctcattagagtttaatacacaattattttatttcctgccaatctaatggcgaagacatggaataacccatcaaacagcccagtaaccccaggaaaccagagggacggaaaccagggcgatgggcgagtcagtcatggccagtgcgccgtgtttcgaaggggacggccatggagcggtgggtggtcgctcagctccccaatcgctctccgacacccggctggggagacaggacctccctggaggccgcagcagcttgattgtcacccgggcaaccccaccttccggttccctctacaaccccttgccccgcttccggttccggcgtcgtgcgtcatcgctgggcgactgatttcgagtttccggtcaggttaggccgggggggtgcggtcctggtcggaaggaggtggagagtcgggggtcaccaggcctatccttggcgccacagtcggccaccggggctcgccgccgtcatggagagcggagggcggccctcgctgtgccagttcatcctcctgggcaccacctctgtggtcaccgccgccctgtactccgtgtaccggcagaaggcccgggtctcccaagagctcaagggagctaaaaaagttcatttgggtgaagatttaaagagtattctttcagaagctccaggaaaatgcgtgccttatgctgttatagaaggagctgtgcggtctgttaaagaaacgcttaacagccagtttgtggaaaactgcaagggggtaattcagcggctgacacttcaggagcacaagatggtgtggaatcgaaccacccacctttggaatgattgctcaaagatcattcatcagaggaccaacacagtgccctttgacctggtgccccacgaggatggcgtggatgtggctgtgcgagtgctgaagcccctggactcagtggatctgggtctagagactgtgtatgagaagttccacccctcgattcagtccttcaccgatgtcatcggccagggccgacactagtatgatgcagtgtccagtgtgaacagcagaaattaaacatgttgcaaccaa

SEQ ID NO: 310883 - DNA, 254 bp, Homo sapiens
cacgttgatatacatatatttatatattagaataggcatacatacatatatgaaacagacataccaacatatatattgtgtatgtctgattaagcatcaaccccctacacatgaaactaataatactgcttttctgtggagacaagaacacaagagtggaaaaaggtctgttcatcgtatactttttcagttcgaattctcaaccatgtgaatgtattacttattgaaaataatacattggcaaagtaaaataa

SEQ ID NO: 310884 - DNA, 546 bp, Homo sapiens
cataggaacataaaatttggatgaaatctggtactgcatggactggagggcagaggagttagattccagtggttttctaatttggtttctgacttctgccagcccccaacccattcctttctaagattcgatactctggctgggctctggctgacttccagccttctcagatggagccaggattacatctgtgtctttgcattttgtatccaggtttcggctgagtccagctcctccatgaactccaacaccccgctggtgaggataacaacacgcctctcttcaacggcagacacccccatgctggcaggggtctccgagtatgaacttccagaggacccaaaatgggagtttccaagagataagtgagtacttctcttggccatgtcccaggatggagactcagctataaatggggatattggattaacattttctttttatgacccttagccacaaaggtcttggtgtgatgatgtcagcaggagtaagattgtatttctaaataaccaactcctggaaaagaaaaaaatggatttaaaaaaa

SEQ ID NO: 310885 - DNA, 4853 bp, Homo sapiens
atccctacggccgcatcgcggccgagccctcgcctcccgggccggtgtctccggctgctcgaaggcgtccggagccgcgcggaactcggggcggcccgggcgcgcggcgctgattggcagagagggcgccgccgtccaggaaacggctcgggtttcagtgggggcgtgacccaccgcgagaaggcgggggcggcggcggcggcgcgggcggcggctggaggagagcgcggtggagagccgagcgggcgggcggcgggtgcggagcgggcgagggagcgcgcgcggccgccacaaagctcgggcgccgcggggctgcatgcggcgtacctggcccggcgcggcgactgctctccgggctggcgggggccggccgcgagccccgggggccccgaggccgcagcttgcctgcgcgctctgagccttcgcaactcgcgagcaaagtttggtggaggcaacgccaagcctgagtcctttcttcctctcgttccccaaatccgagggcagcccgcgggcgtcatgcccgcgctcctccgcagcctggggtacgcgtgaagcccgggaggcttggcgccggcgaagacccaaggaccactcttctgcgtttggagttgctccccacaaccccgggctcgtcgctttctccatcccgacccacgcggggcgcggggacaacacaggtcgcggaggagcgttgccattcaagtgactgcagcagcagcggcagcgcctcggttcctgagcccaccgcaggctgaaggcattgcgcgtagtccatgcccgtagaggaagtgtgcagatgggattaacgtccacatggagatatggaagaggaccggggattggtaccgtaaccatggtcagctggggtcgtttcatctgcctggtcgtggtcaccatggcaaccttgtccctggcccggccctccttcagtttagttgaggataccacattagagccagaagagccaccaaccaaataccaaatctctcaaccagaagtgtacgtggctgcgccaggggagtcgctagaggtgcgctgcctgttgaaagatgccgccgtgatcagttggactaaggatggggtgcacttggggcccaacaataggacagtgcttattggggagtacttgcagataaagggcgccacgcctagagactccggcctctatgcttgtactgccagtaggactgtagacagtgaaacttggtacttcatggtgaatgtcacagatgccatctcatccggagatgatgaggatgacaccgatggtgcggaagattttgtcagtgagaacagtaacaacaagagagcaccatactggaccaacacagaaaagatggaaaagcggctccatgctgtgcctgcggccaacactgtcaagtttcgctgcccagccggggggaacccaatgccaaccatgcggtggctgaaaaacgggaaggagtttaagcaggagcatcgcattggaggctacaaggtacgaaaccagcactggagcctcattatggaaagtgtggtcccatctgacaagggaaattatacctgtgtggtggagaatgaatacgggtccatcaatcacacgtaccacctggatgttgtggagcgatcgcctcaccggcccatcctccaagccggactgccggcaaatgcctccacagtggtcggaggagacgtagagtttgtctgcaaggtttacagtgatgcccagccccacatccagtggatcaagcacgtggaaaagaacggcagtaaatacgggcccgacgggctgccctacctcaaggttctcaaggccgccggtgttaacaccacggacaaagagattgaggttctctatattcggaatgtaacttttgaggacgctggggaatatacgtgcttggcgggtaattctattgggatatcctttcactctgcatggttgacagttctgccagcgcctggaagagaaaaggagattacagcttccccagactacctggagatagccatttactgcataggggtcttcttaatcgcctgtatggtggtaacagtcatcctgtgccgaatgaagaacacgaccaagaagccagacttcagcagccagccggctgtgcacaagctgaccaaacgtatccccctgcggagacaggtaacagtttcggctgagtccagctcctccatgaactccaacaccccgctggtgaggataacaacacgcctctcttcaacggcagacacccccatgctggcaggggtctccgagtatgaacttccagaggacccaaaatgggagtttccaagagataagctgacactgggcaagcccctgggagaaggttgctttgggcaagtggtcatggcggaagcagtgggaattgacaaagacaagcccaaggaggcggtcaccgtggccgtgaagatgttgaaagatgatgccacagagaaagacctttctgatctggtgtcagagatggagatgatgaagatgattgggaaacacaagaatatcataaatcttcttggagcctgcacacaggatgggcctctctatgtcatagttgagtatgcctctaaaggcaacctccgagaatacctccgagcccggaggccacccgggatggagtactcctatgacattaaccgtgttcctgaggagcagatgaccttcaaggacttggtgtcatgcacctaccagctggccagaggcatggagtacttggcttcccaaaaatgtattcatcgagatttagcagccagaaatgttttggtaacagaaaacaatgtgatgaaaatagcagactttggactcgccagagatatcaacaatatagactattacaaaaagaccaccaatgggcggcttccagtcaagtggatggctccagaagccctgtttgatagagtatacactcatcagagtgatgtctggtccttcggggtgttaatgtgggagatcttcactttagggggctcgccctacccagggattcccgtggaggaactttttaagctgctgaaggaaggacacagaatggataagccagccaactgcaccaacgaactgtacatgatgatgagggactgttggcatgcagtgccctcccagagaccaacgttcaagcagttggtagaagacttggatcgaattctcactctcacaaccaatgaggaatacttggacctcagccaacctctcgaacagtattcacctagttaccctgacacaagaagttcttgttcttcaggagatgattctgttttttctccagaccccatgccttacgaaccatgccttcctcagtatccacacataaacggcagtgttaaaacatgaatgactgtgtctgcctgtccccaaacaggacagcactgggaacctagctacactgagcagggagaccatgcctcccagagcttgttgtctccacttgtatatatggatcagaggagtaaataattggaaaagtaatcagcatatgtgtaaagatttatacagttgaaaacttgtaatcttccccaggaggagaagaaggtttctggagcagtggactgccacaagccaccatgtaacccctctcacctgccgtgcgtactggctgtggaccagtaggactcaaggtggacgtgcgttctgccttccttgttaattttgtaataattggagaagatttatgtcagcacacacttacagagcacaaatgcagtatataggtgctggatgtatgtaaatatattcaaattatgtataaatatatattatatatttacaaggagttattttttgtattgattttaaatggatgtcccaatgcacctagaaaattggtctctctttttttaatagctatttgctaaatgctgttcttacacataatttcttaattttcaccgagcagaggtggaaaaatacttttgctttcagggaaaatggtataacgttaatttattaataaattggtaatatacaaaacaattaatcatttatagttttttttgtaatttaagtggcatttctatgcaggcagcacagcagactagttaatctattgcttggacttaactagttatcagatcctttgaaaagagaatatttacaatatatgactaatttggggaaaatgaagttttgatttatttgtgtttaaatgctgctgtcagacgattgttcttagacctcctaaatgccccatattaaaagaactcattcataggaaggtgtttcattttggtgtgcaaccctgtcattacgtcaacgcaacgtctaactggacttcccaagataaatggtaccagcgtcctcttaaaagatgccttaatccattccttgaggacagaccttagttgaaatgatagcagaatgtgcttctctctggcagctggccttctgcttctgagttgcacattaatcagattagcctgtattctcttcagtgaattttgataatggcttccagactctttggcgttggagacgcctgttaggatcttcaagtcccatcatagaaaattgaaacacagagttgttctgctgatagttttggggatacgtccatctttttaagggattgctttcatctaattctggcaggacctcaccaaaagatccagcctcatacctacatcagacaaaatatcgccgttgttccttctgtactaaagtattgtgttttgctttggaaacacccactcactttgcaatagccgtgcaagatgaatgcagattacactgatcttatgtgttacaaaattggagaaagtatttaataaaacctgttaatttttatactgacaataaaaatgtttctacagatattaatgttaacaagacaaaataaatgtcacgcaacttatttttttaaaaaaaaaaa

SEQ ID NO: 310886 - DNA, 4856 bp, Homo sapiens
atccctacggccgcatcgcggccgagccctcgcctcccgggccggtgtctccggctgctcgaaggcgtccggagccgcgcggaactcggggcggcccgggcgcgcggcgctgattggcagagagggcgccgccgtccaggaaacggctcgggtttcagtgggggcgtgacccaccgcgagaaggcgggggcggcggcggcggcgcgggcggcggctggaggagagcgcggtggagagccgagcgggcgggcggcgggtgcggagcgggcgagggagcgcgcgcggccgccacaaagctcgggcgccgcggggctgcatgcggcgtacctggcccggcgcggcgactgctctccgggctggcgggggccggccgcgagccccgggggccccgaggccgcagcttgcctgcgcgctctgagccttcgcaactcgcgagcaaagtttggtggaggcaacgccaagcctgagtcctttcttcctctcgttccccaaatccgagggcagcccgcgggcgtcatgcccgcgctcctccgcagcctggggtacgcgtgaagcccgggaggcttggcgccggcgaagacccaaggaccactcttctgcgtttggagttgctccccacaaccccgggctcgtcgctttctccatcccgacccacgcggggcgcggggacaacacaggtcgcggaggagcgttgccattcaagtgactgcagcagcagcggcagcgcctcggttcctgagcccaccgcaggctgaaggcattgcgcgtagtccatgcccgtagaggaagtgtgcagatgggattaacgtccacatggagatatggaagaggaccggggattggtaccgtaaccatggtcagctggggtcgtttcatctgcctggtcgtggtcaccatggcaaccttgtccctggcccggccctccttcagtttagttgaggataccacattagagccagaagagccaccaaccaaataccaaatctctcaaccagaagtgtacgtggctgcgccaggggagtcgctagaggtgcgctgcctgttgaaagatgccgccgtgatcagttggactaaggatggggtgcacttggggcccaacaataggacagtgcttattggggagtacttgcagataaagggcgccacgcctagagactccggcctctatgcttgtactgccagtaggactgtagacagtgaaacttggtacttcatggtgaatgtcacagatgccatctcatccggagatgatgaggatgacaccgatggtgcggaagattttgtcagtgagaacagtaacaacaagagagcaccatactggaccaacacagaaaagatggaaaagcggctccatgctgtgcctgcggccaacactgtcaagtttcgctgcccagccggggggaacccaatgccaaccatgcggtggctgaaaaacgggaaggagtttaagcaggagcatcgcattggaggctacaaggtacgaaaccagcactggagcctcattatggaaagtgtggtcccatctgacaagggaaattatacctgtgtggtggagaatgaatacgggtccatcaatcacacgtaccacctggatgttgtggagcgatcgcctcaccggcccatcctccaagccggactgccggcaaatgcctccacagtggtcggaggagacgtagagtttgtctgcaaggtttacagtgatgcccagccccacatccagtggatcaagcacgtggaaaagaacggcagtaaatacgggcccgacgggctgccctacctcaaggttctcaagcactcggggataaatagttccaatgcagaagtgctggctctgttcaatgtgaccgaggcggatgctggggaatatatatgtaaggtctccaattatatagggcaggccaaccagtctgcctggctcactgtcctgccaaaacagcaagcgcctggaagagaaaaggagattacagcttccccagactacctggagatagccatttactgcataggggtcttcttaatcgcctgtatggtggtaacagtcatcctgtgccgaatgaagaacacgaccaagaagccagacttcagcagccagccggctgtgcacaagctgaccaaacgtatccccctgcggagacaggtaacagtttcggctgagtccagctcctccatgaactccaacaccccgctggtgaggataacaacacgcctctcttcaacggcagacacccccatgctggcaggggtctccgagtatgaacttccagaggacccaaaatgggagtttccaagagataagctgacactgggcaagcccctgggagaaggttgctttgggcaagtggtcatggcggaagcagtgggaattgacaaagacaagcccaaggaggcggtcaccgtggccgtgaagatgttgaaagatgatgccacagagaaagacctttctgatctggtgtcagagatggagatgatgaagatgattgggaaacacaagaatatcataaatcttcttggagcctgcacacaggatgggcctctctatgtcatagttgagtatgcctctaaaggcaacctccgagaatacctccgagcccggaggccacccgggatggagtactcctatgacattaaccgtgttcctgaggagcagatgaccttcaaggacttggtgtcatgcacctaccagctggccagaggcatggagtacttggcttcccaaaaatgtattcatcgagatttagcagccagaaatgttttggtaacagaaaacaatgtgatgaaaatagcagactttggactcgccagagatatcaacaatatagactattacaaaaagaccaccaatgggcggcttccagtcaagtggatggctccagaagccctgtttgatagagtatacactcatcagagtgatgtctggtccttcggggtgttaatgtgggagatcttcactttagggggctcgccctacccagggattcccgtggaggaactttttaagctgctgaaggaaggacacagaatggataagccagccaactgcaccaacgaactgtacatgatgatgagggactgttggcatgcagtgccctcccagagaccaacgttcaagcagttggtagaagacttggatcgaattctcactctcacaaccaatgaggaatacttggacctcagccaacctctcgaacagtattcacctagttaccctgacacaagaagttcttgttcttcaggagatgattctgttttttctccagaccccatgccttacgaaccatgccttcctcagtatccacacataaacggcagtgttaaaacatgaatgactgtgtctgcctgtccccaaacaggacagcactgggaacctagctacactgagcagggagaccatgcctcccagagcttgttgtctccacttgtatatatggatcagaggagtaaataattggaaaagtaatcagcatatgtgtaaagatttatacagttgaaaacttgtaatcttccccaggaggagaagaaggtttctggagcagtggactgccacaagccaccatgtaacccctctcacctgccgtgcgtactggctgtggaccagtaggactcaaggtggacgtgcgttctgccttccttgttaattttgtaataattggagaagatttatgtcagcacacacttacagagcacaaatgcagtatataggtgctggatgtatgtaaatatattcaaattatgtataaatatatattatatatttacaaggagttattttttgtattgattttaaatggatgtcccaatgcacctagaaaattggtctctctttttttaatagctatttgctaaatgctgttcttacacataatttcttaattttcaccgagcagaggtggaaaaatacttttgctttcagggaaaatggtataacgttaatttattaataaattggtaatatacaaaacaattaatcatttatagttttttttgtaatttaagtggcatttctatgcaggcagcacagcagactagttaatctattgcttggacttaactagttatcagatcctttgaaaagagaatatttacaatatatgactaatttggggaaaatgaagttttgatttatttgtgtttaaatgctgctgtcagacgattgttcttagacctcctaaatgccccatattaaaagaactcattcataggaaggtgtttcattttggtgtgcaaccctgtcattacgtcaacgcaacgtctaactggacttcccaagataaatggtaccagcgtcctcttaaaagatgccttaatccattccttgaggacagaccttagttgaaatgatagcagaatgtgcttctctctggcagctggccttctgcttctgagttgcacattaatcagattagcctgtattctcttcagtgaattttgataatggcttccagactctttggcgttggagacgcctgttaggatcttcaagtcccatcatagaaaattgaaacacagagttgttctgctgatagttttggggatacgtccatctttttaagggattgctttcatctaattctggcaggacctcaccaaaagatccagcctcatacctacatcagacaaaatatcgccgttgttccttctgtactaaagtattgtgttttgctttggaaacacccactcactttgcaatagccgtgcaagatgaatgcagattacactgatcttatgtgttacaaaattggagaaagtatttaataaaacctgttaatttttatactgacaataaaaatgtttctacagatattaatgttaacaagacaaaataaatgtcacgcaacttatttttttaaaaaaaaaaa

SEQ ID NO: 310887 - DNA, 4511 bp, Homo sapiens
atccctacggccgcatcgcggccgagccctcgcctcccgggccggtgtctccggctgctcgaaggcgtccggagccgcgcggaactcggggcggcccgggcgcgcggcgctgattggcagagagggcgccgccgtccaggaaacggctcgggtttcagtgggggcgtgacccaccgcgagaaggcgggggcggcggcggcggcgcgggcggcggctggaggagagcgcggtggagagccgagcgggcgggcggcgggtgcggagcgggcgagggagcgcgcgcggccgccacaaagctcgggcgccgcggggctgcatgcggcgtacctggcccggcgcggcgactgctctccgggctggcgggggccggccgcgagccccgggggccccgaggccgcagcttgcctgcgcgctctgagccttcgcaactcgcgagcaaagtttggtggaggcaacgccaagcctgagtcctttcttcctctcgttccccaaatccgagggcagcccgcgggcgtcatgcccgcgctcctccgcagcctggggtacgcgtgaagcccgggaggcttggcgccggcgaagacccaaggaccactcttctgcgtttggagttgctccccacaaccccgggctcgtcgctttctccatcccgacccacgcggggcgcggggacaacacaggtcgcggaggagcgttgccattcaagtgactgcagcagcagcggcagcgcctcggttcctgagcccaccgcaggctgaaggcattgcgcgtagtccatgcccgtagaggaagtgtgcagatgggattaacgtccacatggagatatggaagaggaccggggattggtaccgtaaccatggtcagctggggtcgtttcatctgcctggtcgtggtcaccatggcaaccttgtccctggcccggccctccttcagtttagttgaggataccacattagagccagaaggagcaccatactggaccaacacagaaaagatggaaaagcggctccatgctgtgcctgcggccaacactgtcaagtttcgctgcccagccggggggaacccaatgccaaccatgcggtggctgaaaaacgggaaggagtttaagcaggagcatcgcattggaggctacaaggtacgaaaccagcactggagcctcattatggaaagtgtggtcccatctgacaagggaaattatacctgtgtggtggagaatgaatacgggtccatcaatcacacgtaccacctggatgttgtggagcgatcgcctcaccggcccatcctccaagccggactgccggcaaatgcctccacagtggtcggaggagacgtagagtttgtctgcaaggtttacagtgatgcccagccccacatccagtggatcaagcacgtggaaaagaacggcagtaaatacgggcccgacgggctgccctacctcaaggttctcaagcactcggggataaatagttccaatgcagaagtgctggctctgttcaatgtgaccgaggcggatgctggggaatatatatgtaaggtctccaattatatagggcaggccaaccagtctgcctggctcactgtcctgccaaaacagcaagcgcctggaagagaaaaggagattacagcttccccagactacctggagatagccatttactgcataggggtcttcttaatcgcctgtatggtggtaacagtcatcctgtgccgaatgaagaacacgaccaagaagccagacttcagcagccagccggctgtgcacaagctgaccaaacgtatccccctgcggagacaggtaacagtttcggctgagtccagctcctccatgaactccaacaccccgctggtgaggataacaacacgcctctcttcaacggcagacacccccatgctggcaggggtctccgagtatgaacttccagaggacccaaaatgggagtttccaagagataagctgacactgggcaagcccctgggagaaggttgctttgggcaagtggtcatggcggaagcagtgggaattgacaaagacaagcccaaggaggcggtcaccgtggccgtgaagatgttgaaagatgatgccacagagaaagacctttctgatctggtgtcagagatggagatgatgaagatgattgggaaacacaagaatatcataaatcttcttggagcctgcacacaggatgggcctctctatgtcatagttgagtatgcctctaaaggcaacctccgagaatacctccgagcccggaggccacccgggatggagtactcctatgacattaaccgtgttcctgaggagcagatgaccttcaaggacttggtgtcatgcacctaccagctggccagaggcatggagtacttggcttcccaaaaatgtattcatcgagatttagcagccagaaatgttttggtaacagaaaacaatgtgatgaaaatagcagactttggactcgccagagatatcaacaatatagactattacaaaaagaccaccaatgggcggcttccagtcaagtggatggctccagaagccctgtttgatagagtatacactcatcagagtgatgtctggtccttcggggtgttaatgtgggagatcttcactttagggggctcgccctacccagggattcccgtggaggaactttttaagctgctgaaggaaggacacagaatggataagccagccaactgcaccaacgaactgtacatgatgatgagggactgttggcatgcagtgccctcccagagaccaacgttcaagcagttggtagaagacttggatcgaattctcactctcacaaccaatgaggaatacttggacctcagccaacctctcgaacagtattcacctagttaccctgacacaagaagttcttgttcttcaggagatgattctgttttttctccagaccccatgccttacgaaccatgccttcctcagtatccacacataaacggcagtgttaaaacatgaatgactgtgtctgcctgtccccaaacaggacagcactgggaacctagctacactgagcagggagaccatgcctcccagagcttgttgtctccacttgtatatatggatcagaggagtaaataattggaaaagtaatcagcatatgtgtaaagatttatacagttgaaaacttgtaatcttccccaggaggagaagaaggtttctggagcagtggactgccacaagccaccatgtaacccctctcacctgccgtgcgtactggctgtggaccagtaggactcaaggtggacgtgcgttctgccttccttgttaattttgtaataattggagaagatttatgtcagcacacacttacagagcacaaatgcagtatataggtgctggatgtatgtaaatatattcaaattatgtataaatatatattatatatttacaaggagttattttttgtattgattttaaatggatgtcccaatgcacctagaaaattggtctctctttttttaatagctatttgctaaatgctgttcttacacataatttcttaattttcaccgagcagaggtggaaaaatacttttgctttcagggaaaatggtataacgttaatttattaataaattggtaatatacaaaacaattaatcatttatagttttttttgtaatttaagtggcatttctatgcaggcagcacagcagactagttaatctattgcttggacttaactagttatcagatcctttgaaaagagaatatttacaatatatgactaatttggggaaaatgaagttttgatttatttgtgtttaaatgctgctgtcagacgattgttcttagacctcctaaatgccccatattaaaagaactcattcataggaaggtgtttcattttggtgtgcaaccctgtcattacgtcaacgcaacgtctaactggacttcccaagataaatggtaccagcgtcctcttaaaagatgccttaatccattccttgaggacagaccttagttgaaatgatagcagaatgtgcttctctctggcagctggccttctgcttctgagttgcacattaatcagattagcctgtattctcttcagtgaattttgataatggcttccagactctttggcgttggagacgcctgttaggatcttcaagtcccatcatagaaaattgaaacacagagttgttctgctgatagttttggggatacgtccatctttttaagggattgctttcatctaattctggcaggacctcaccaaaagatccagcctcatacctacatcagacaaaatatcgccgttgttccttctgtactaaagtattgtgttttgctttggaaacacccactcactttgcaatagccgtgcaagatgaatgcagattacactgatcttatgtgttacaaaattggagaaagtatttaataaaacctgttaatttttatactgacaataaaaatgtttctacagatattaatgttaacaagacaaaataaatgtcacgcaacttatttttttaaaaaaaaaaa

SEQ ID NO: 310888 - DNA, 4505 bp, Homo sapiens
atccctacggccgcatcgcggccgagccctcgcctcccgggccggtgtctccggctgctcgaaggcgtccggagccgcgcggaactcggggcggcccgggcgcgcggcgctgattggcagagagggcgccgccgtccaggaaacggctcgggtttcagtgggggcgtgacccaccgcgagaaggcgggggcggcggcggcggcgcgggcggcggctggaggagagcgcggtggagagccgagcgggcgggcggcgggtgcggagcgggcgagggagcgcgcgcggccgccacaaagctcgggcgccgcggggctgcatgcggcgtacctggcccggcgcggcgactgctctccgggctggcgggggccggccgcgagccccgggggccccgaggccgcagcttgcctgcgcgctctgagccttcgcaactcgcgagcaaagtttggtggaggcaacgccaagcctgagtcctttcttcctctcgttccccaaatccgagggcagcccgcgggcgtcatgcccgcgctcctccgcagcctggggtacgcgtgaagcccgggaggcttggcgccggcgaagacccaaggaccactcttctgcgtttggagttgctccccacaaccccgggctcgtcgctttctccatcccgacccacgcggggcgcggggacaacacaggtcgcggaggagcgttgccattcaagtgactgcagcagcagcggcagcgcctcggttcctgagcccaccgcaggctgaaggcattgcgcgtagtccatgcccgtagaggaagtgtgcagatgggattaacgtccacatggagatatggaagaggaccggggattggtaccgtaaccatggtcagctggggtcgtttcatctgcctggtcgtggtcaccatggcaaccttgtccctggcccggccctccttcagtttagttgaggataccacattagagccagaagagccaccaaccaaataccaaatctctcaaccagaagtgtacgtggctgcgccaggggagtcgctagaggtgcgctgcctgttgaaagatgccgccgtgatcagttggactaaggatggggtgcacttggggcccaacaataggacagtgcttattggggagtacttgcagataaagggcgccacgcctagagactccggcctctatgcttgtactgccagtaggactgtagacagtgaaacttggtacttcatggtgaatgtcacagatgccatctcatccggagatgatgaggatgacaccgatggtgcggaagattttgtcagtgagaacagtaacaacaagagagcaccatactggaccaacacagaaaagatggaaaagcggctccatgctgtgcctgcggccaacactgtcaagtttcgctgcccagccggggggaacccaatgccaaccatgcggtggctgaaaaacgggaaggagtttaagcaggagcatcgcattggaggctacaaggtacgaaaccagcactggagcctcattatggaaagtgtggtcccatctgacaagggaaattatacctgtgtggtggagaatgaatacgggtccatcaatcacacgtaccacctggatgttgtggagcgatcgcctcaccggcccatcctccaagccggactgccggcaaatgcctccacagtggtcggaggagacgtagagtttgtctgcaaggtttacagtgatgcccagccccacatccagtggatcaagcacgtggaaaagaacggcagtaaatacgggcccgacgggctgccctacctcaaggttctcaaggtttcggctgagtccagctcctccatgaactccaacaccccgctggtgaggataacaacacgcctctcttcaacggcagacacccccatgctggcaggggtctccgagtatgaacttccagaggacccaaaatgggagtttccaagagataagctgacactgggcaagcccctgggagaaggttgctttgggcaagtggtcatggcggaagcagtgggaattgacaaagacaagcccaaggaggcggtcaccgtggccgtgaagatgttgaaagatgatgccacagagaaagacctttctgatctggtgtcagagatggagatgatgaagatgattgggaaacacaagaatatcataaatcttcttggagcctgcacacaggatgggcctctctatgtcatagttgagtatgcctctaaaggcaacctccgagaatacctccgagcccggaggccacccgggatggagtactcctatgacattaaccgtgttcctgaggagcagatgaccttcaaggacttggtgtcatgcacctaccagctggccagaggcatggagtacttggcttcccaaaaatgtattcatcgagatttagcagccagaaatgttttggtaacagaaaacaatgtgatgaaaatagcagactttggactcgccagagatatcaacaatatagactattacaaaaagaccaccaatgggcggcttccagtcaagtggatggctccagaagccctgtttgatagagtatacactcatcagagtgatgtctggtccttcggggtgttaatgtgggagatcttcactttagggggctcgccctacccagggattcccgtggaggaactttttaagctgctgaaggaaggacacagaatggataagccagccaactgcaccaacgaactgtacatgatgatgagggactgttggcatgcagtgccctcccagagaccaacgttcaagcagttggtagaagacttggatcgaattctcactctcacaaccaatgaggaatacttggacctcagccaacctctcgaacagtattcacctagttaccctgacacaagaagttcttgttcttcaggagatgattctgttttttctccagaccccatgccttacgaaccatgccttcctcagtatccacacataaacggcagtgttaaaacatgaatgactgtgtctgcctgtccccaaacaggacagcactgggaacctagctacactgagcagggagaccatgcctcccagagcttgttgtctccacttgtatatatggatcagaggagtaaataattggaaaagtaatcagcatatgtgtaaagatttatacagttgaaaacttgtaatcttccccaggaggagaagaaggtttctggagcagtggactgccacaagccaccatgtaacccctctcacctgccgtgcgtactggctgtggaccagtaggactcaaggtggacgtgcgttctgccttccttgttaattttgtaataattggagaagatttatgtcagcacacacttacagagcacaaatgcagtatataggtgctggatgtatgtaaatatattcaaattatgtataaatatatattatatatttacaaggagttattttttgtattgattttaaatggatgtcccaatgcacctagaaaattggtctctctttttttaatagctatttgctaaatgctgttcttacacataatttcttaattttcaccgagcagaggtggaaaaatacttttgctttcagggaaaatggtataacgttaatttattaataaattggtaatatacaaaacaattaatcatttatagttttttttgtaatttaagtggcatttctatgcaggcagcacagcagactagttaatctattgcttggacttaactagttatcagatcctttgaaaagagaatatttacaatatatgactaatttggggaaaatgaagttttgatttatttgtgtttaaatgctgctgtcagacgattgttcttagacctcctaaatgccccatattaaaagaactcattcataggaaggtgtttcattttggtgtgcaaccctgtcattacgtcaacgcaacgtctaactggacttcccaagataaatggtaccagcgtcctcttaaaagatgccttaatccattccttgaggacagaccttagttgaaatgatagcagaatgtgcttctctctggcagctggccttctgcttctgagttgcacattaatcagattagcctgtattctcttcagtgaattttgataatggcttccagactctttggcgttggagacgcctgttaggatcttcaagtcccatcatagaaaattgaaacacagagttgttctgctgatagttttggggatacgtccatctttttaagggattgctttcatctaattctggcaggacctcaccaaaagatccagcctcatacctacatcagacaaaatatcgccgttgttccttctgtactaaagtattgtgttttgctttggaaacacccactcactttgcaatagccgtgcaagatgaatgcagattacactgatcttatgtgttacaaaattggagaaagtatttaataaaacctgttaatttttatactgacaataaaaatgtttctacagatattaatgttaacaagacaaaataaatgtcacgcaacttatttttttaaaaaaaaaaa

SEQ ID NO: 310889 - DNA, 4586 bp, Homo sapiens
atccctacggccgcatcgcggccgagccctcgcctcccgggccggtgtctccggctgctcgaaggcgtccggagccgcgcggaactcggggcggcccgggcgcgcggcgctgattggcagagagggcgccgccgtccaggaaacggctcgggtttcagtgggggcgtgacccaccgcgagaaggcgggggcggcggcggcggcgcgggcggcggctggaggagagcgcggtggagagccgagcgggcgggcggcgggtgcggagcgggcgagggagcgcgcgcggccgccacaaagctcgggcgccgcggggctgcatgcggcgtacctggcccggcgcggcgactgctctccgggctggcgggggccggccgcgagccccgggggccccgaggccgcagcttgcctgcgcgctctgagccttcgcaactcgcgagcaaagtttggtggaggcaacgccaagcctgagtcctttcttcctctcgttccccaaatccgagggcagcccgcgggcgtcatgcccgcgctcctccgcagcctggggtacgcgtgaagcccgggaggcttggcgccggcgaagacccaaggaccactcttctgcgtttggagttgctccccacaaccccgggctcgtcgctttctccatcccgacccacgcggggcgcggggacaacacaggtcgcggaggagcgttgccattcaagtgactgcagcagcagcggcagcgcctcggttcctgagcccaccgcaggctgaaggcattgcgcgtagtccatgcccgtagaggaagtgtgcagatgggattaacgtccacatggagatatggaagaggaccggggattggtaccgtaaccatggtcagctggggtcgtttcatctgcctggtcgtggtcaccatggcaaccttgtccctggcccggccctccttcagtttagttgaggataccacattagagccagaagatgccatctcatccggagatgatgaggatgacaccgatggtgcggaagattttgtcagtgagaacagtaacaacaagagagcaccatactggaccaacacagaaaagatggaaaagcggctccatgctgtgcctgcggccaacactgtcaagtttcgctgcccagccggggggaacccaatgccaaccatgcggtggctgaaaaacgggaaggagtttaagcaggagcatcgcattggaggctacaaggtacgaaaccagcactggagcctcattatggaaagtgtggtcccatctgacaagggaaattatacctgtgtggtggagaatgaatacgggtccatcaatcacacgtaccacctggatgttgtggagcgatcgcctcaccggcccatcctccaagccggactgccggcaaatgcctccacagtggtcggaggagacgtagagtttgtctgcaaggtttacagtgatgcccagccccacatccagtggatcaagcacgtggaaaagaacggcagtaaatacgggcccgacgggctgccctacctcaaggttctcaaggccgccggtgttaacaccacggacaaagagattgaggttctctatattcggaatgtaacttttgaggacgctggggaatatacgtgcttggcgggtaattctattgggatatcctttcactctgcatggttgacagttctgccagcgcctggaagagaaaaggagattacagcttccccagactacctggagatagccatttactgcataggggtcttcttaatcgcctgtatggtggtaacagtcatcctgtgccgaatgaagaacacgaccaagaagccagacttcagcagccagccggctgtgcacaagctgaccaaacgtatccccctgcggagacaggtaacagtttcggctgagtccagctcctccatgaactccaacaccccgctggtgaggataacaacacgcctctcttcaacggcagacacccccatgctggcaggggtctccgagtatgaacttccagaggacccaaaatgggagtttccaagagataagctgacactgggcaagcccctgggagaaggttgctttgggcaagtggtcatggcggaagcagtgggaattgacaaagacaagcccaaggaggcggtcaccgtggccgtgaagatgttgaaagatgatgccacagagaaagacctttctgatctggtgtcagagatggagatgatgaagatgattgggaaacacaagaatatcataaatcttcttggagcctgcacacaggatgggcctctctatgtcatagttgagtatgcctctaaaggcaacctccgagaatacctccgagcccggaggccacccgggatggagtactcctatgacattaaccgtgttcctgaggagcagatgaccttcaaggacttggtgtcatgcacctaccagctggccagaggcatggagtacttggcttcccaaaaatgtattcatcgagatttagcagccagaaatgttttggtaacagaaaacaatgtgatgaaaatagcagactttggactcgccagagatatcaacaatatagactattacaaaaagaccaccaatgggcggcttccagtcaagtggatggctccagaagccctgtttgatagagtatacactcatcagagtgatgtctggtccttcggggtgttaatgtgggagatcttcactttagggggctcgccctacccagggattcccgtggaggaactttttaagctgctgaaggaaggacacagaatggataagccagccaactgcaccaacgaactgtacatgatgatgagggactgttggcatgcagtgccctcccagagaccaacgttcaagcagttggtagaagacttggatcgaattctcactctcacaaccaatgaggaatacttggacctcagccaacctctcgaacagtattcacctagttaccctgacacaagaagttcttgttcttcaggagatgattctgttttttctccagaccccatgccttacgaaccatgccttcctcagtatccacacataaacggcagtgttaaaacatgaatgactgtgtctgcctgtccccaaacaggacagcactgggaacctagctacactgagcagggagaccatgcctcccagagcttgttgtctccacttgtatatatggatcagaggagtaaataattggaaaagtaatcagcatatgtgtaaagatttatacagttgaaaacttgtaatcttccccaggaggagaagaaggtttctggagcagtggactgccacaagccaccatgtaacccctctcacctgccgtgcgtactggctgtggaccagtaggactcaaggtggacgtgcgttctgccttccttgttaattttgtaataattggagaagatttatgtcagcacacacttacagagcacaaatgcagtatataggtgctggatgtatgtaaatatattcaaattatgtataaatatatattatatatttacaaggagttattttttgtattgattttaaatggatgtcccaatgcacctagaaaattggtctctctttttttaatagctatttgctaaatgctgttcttacacataatttcttaattttcaccgagcagaggtggaaaaatacttttgctttcagggaaaatggtataacgttaatttattaataaattggtaatatacaaaacaattaatcatttatagttttttttgtaatttaagtggcatttctatgcaggcagcacagcagactagttaatctattgcttggacttaactagttatcagatcctttgaaaagagaatatttacaatatatgactaatttggggaaaatgaagttttgatttatttgtgtttaaatgctgctgtcagacgattgttcttagacctcctaaatgccccatattaaaagaactcattcataggaaggtgtttcattttggtgtgcaaccctgtcattacgtcaacgcaacgtctaactggacttcccaagataaatggtaccagcgtcctcttaaaagatgccttaatccattccttgaggacagaccttagttgaaatgatagcagaatgtgcttctctctggcagctggccttctgcttctgagttgcacattaatcagattagcctgtattctcttcagtgaattttgataatggcttccagactctttggcgttggagacgcctgttaggatcttcaagtcccatcatagaaaattgaaacacagagttgttctgctgatagttttggggatacgtccatctttttaagggattgctttcatctaattctggcaggacctcaccaaaagatccagcctcatacctacatcagacaaaatatcgccgttgttccttctgtactaaagtattgtgttttgctttggaaacacccactcactttgcaatagccgtgcaagatgaatgcagattacactgatcttatgtgttacaaaattggagaaagtatttaataaaacctgttaatttttatactgacaataaaaatgtttctacagatattaatgttaacaagacaaaataaatgtcacgcaacttatttttttaaaaaaaaaaa

SEQ ID NO: 310890 - DNA, 4945 bp, Homo sapiens
atccctacggccgcatcgcggccgagccctcgcctcccgggccggtgtctccggctgctcgaaggcgtccggagccgcgcggaactcggggcggcccgggcgcgcggcgctgattggcagagagggcgccgccgtccaggaaacggctcgggtttcagtgggggcgtgacccaccgcgagaaggcgggggcggcggcggcggcgcgggcggcggctggaggagagcgcggtggagagccgagcgggcgggcggcgggtgcggagcgggcgagggagcgcgcgcggccgccacaaagctcgggcgccgcggggctgcatgcggcgtacctggcccggcgcggcgactgctctccgggctggcgggggccggccgcgagccccgggggccccgaggccgcagcttgcctgcgcgctctgagccttcgcaactcgcgagcaaagtttggtggaggcaacgccaagcctgagtcctttcttcctctcgttccccaaatccgagggcagcccgcgggcgtcatgcccgcgctcctccgcagcctggggtacgcgtgaagcccgggaggcttggcgccggcgaagacccaaggaccactcttctgcgtttggagttgctccccacaaccccgggctcgtcgctttctccatcccgacccacgcggggcgcggggacaacacaggtcgcggaggagcgttgccattcaagtgactgcagcagcagcggcagcgcctcggttcctgagcccaccgcaggctgaaggcattgcgcgtagtccatgcccgtagaggaagtgtgcagatgggattaacgtccacatggagatatggaagaggaccggggattggtaccgtaaccatggtcagctggggtcgtttcatctgcctggtcgtggtcaccatggcaaccttgtccctggcccggccctccttcagtttagttgaggataccacattagagccagaagagccaccaaccaaataccaaatctctcaaccagaagtgtacgtggctgcgccaggggagtcgctagaggtgcgctgcctgttgaaagatgccgccgtgatcagttggactaaggatggggtgcacttggggcccaacaataggacagtgcttattggggagtacttgcagataaagggcgccacgcctagagactccggcctctatgcttgtactgccagtaggactgtagacagtgaaacttggtacttcatggtgaatgtcacagatgccatctcatccggagatgatgaggatgacaccgatggtgcggaagattttgtcagtgagaacagtaacaacaagagagcaccatactggaccaacacagaaaagatggaaaagcggctccatgctgtgcctgcggccaacactgtcaagtttcgctgcccagccggggggaacccaatgccaaccatgcggtggctgaaaaacgggaaggagtttaagcaggagcatcgcattggaggctacaaggtacgaaaccagcactggagcctcattatggaaagtgtggtcccatctgacaagggaaattatacctgtgtggtggagaatgaatacgggtccatcaatcacacgtaccacctggatgttgtggagcgatcgcctcaccggcccatcctccaagccggactgccggcaaatgcctccacagtggtcggaggagacgtagagtttgtctgcaaggtttacagtgatgcccagccccacatccagtggatcaagcacgtggaaaagaacggcagtaaatacgggcccgacgggctgccctacctcaaggttctcaaggccgccggtgttaacaccacggacaaagagattgaggttctctatattcggaatgtaacttttgaggacgctggggaatatacgtgcttggcgggtaattctattgggatatcctttcactctgcatggttgacagttctgccagcgcctggaagagaaaaggagattacagcttccccagactacctggagatagccatttactgcataggggtcttcttaatcgcctgtatggtggtaacagtcatcctgtgccgaatgaagaacacgaccaagaagccagacttcagcagccagccggctgtgcacaagctgaccaaacgtatccccctgcggagacaggtaacagtttcggctgagtccagctcctccatgaactccaacaccccgctggtgaggataacaacacgcctctcttcaacggcagacacccccatgctggcaggggtctccgagtatgaacttccagaggacccaaaatgggagtttccaagagataagctgacactgggcaagcccctgggagaaggttgctttgggcaagtggtcatggcggaagcagtgggaattgacaaagacaagcccaaggaggcggtcaccgtggccgtgaagatgttgaaagatgatgccacagagaaagacctttctgatctggtgtcagagatggagatgatgaagatgattgggaaacacaagaatatcataaatcttcttggagcctgcacacaggatgggcctctctatgtcatagttgagtatgcctctaaaggcaacctccgagaatacctccgagcccggaggccacccgggatggagtactcctatgacattaaccgtgttcctgaggagcagatgaccttcaaggacttggtgtcatgcacctaccagctggccagaggcatggagtacttggcttcccaaaaatgtattcatcgagatttagcagccagaaatgttttggtaacagaaaacaatgtgatgaaaatagcagactttggactcgccagagatatcaacaatatagactattacaaaaagaccaccaatgggcggcttccagtcaagtggatggctccagaagccctgtttgatagagtatacactcatcagagtgatgtctggtccttcggggtgttaatgtgggagatcttcactttagggggctcgccctacccagggattcccgtggaggaactttttaagctgctgaaggaaggacacagaatggataagccagccaactgcaccaacgaactgtacatgatgatgagggactgttggcatgcagtgccctcccagagaccaacgttcaagcagttggtagaagacttggatcgaattctcactctcacaaccaatgaggaatacttggacctcagtcagcctctcgaaccgtattcaccttgttatcctgacccaagatgaaataaaacgtctctcttcccttctttcaggaatacttggacctcagccaacctctcgaacagtattcacctagttaccctgacacaagaagttcttgttcttcaggagatgattctgttttttctccagaccccatgccttacgaaccatgccttcctcagtatccacacataaacggcagtgttaaaacatgaatgactgtgtctgcctgtccccaaacaggacagcactgggaacctagctacactgagcagggagaccatgcctcccagagcttgttgtctccacttgtatatatggatcagaggagtaaataattggaaaagtaatcagcatatgtgtaaagatttatacagttgaaaacttgtaatcttccccaggaggagaagaaggtttctggagcagtggactgccacaagccaccatgtaacccctctcacctgccgtgcgtactggctgtggaccagtaggactcaaggtggacgtgcgttctgccttccttgttaattttgtaataattggagaagatttatgtcagcacacacttacagagcacaaatgcagtatataggtgctggatgtatgtaaatatattcaaattatgtataaatatatattatatatttacaaggagttattttttgtattgattttaaatggatgtcccaatgcacctagaaaattggtctctctttttttaatagctatttgctaaatgctgttcttacacataatttcttaattttcaccgagcagaggtggaaaaatacttttgctttcagggaaaatggtataacgttaatttattaataaattggtaatatacaaaacaattaatcatttatagttttttttgtaatttaagtggcatttctatgcaggcagcacagcagactagttaatctattgcttggacttaactagttatcagatcctttgaaaagagaatatttacaatatatgactaatttggggaaaatgaagttttgatttatttgtgtttaaatgctgctgtcagacgattgttcttagacctcctaaatgccccatattaaaagaactcattcataggaaggtgtttcattttggtgtgcaaccctgtcattacgtcaacgcaacgtctaactggacttcccaagataaatggtaccagcgtcctcttaaaagatgccttaatccattccttgaggacagaccttagttgaaatgatagcagaatgtgcttctctctggcagctggccttctgcttctgagttgcacattaatcagattagcctgtattctcttcagtgaattttgataatggcttccagactctttggcgttggagacgcctgttaggatcttcaagtcccatcatagaaaattgaaacacagagttgttctgctgatagttttggggatacgtccatctttttaagggattgctttcatctaattctggcaggacctcaccaaaagatccagcctcatacctacatcagacaaaatatcgccgttgttccttctgtactaaagtattgtgttttgctttggaaacacccactcactttgcaatagccgtgcaagatgaatgcagattacactgatcttatgtgttacaaaattggagaaagtatttaataaaacctgttaatttttatactgacaataaaaatgtttctacagatattaatgttaacaagacaaaataaatgtcacgcaacttatttttttaaaaaaaaaaa

SEQ ID NO: 310891 - DNA, 3290 bp, Homo sapiens
atccctacggccgcatcgcggccgagccctcgcctcccgggccggtgtctccggctgctcgaaggcgtccggagccgcgcggaactcggggcggcccgggcgcgcggcgctgattggcagagagggcgccgccgtccaggaaacggctcgggtttcagtgggggcgtgacccaccgcgagaaggcgggggcggcggcggcggcgcgggcggcggctggaggagagcgcggtggagagccgagcgggcgggcggcgggtgcggagcgggcgagggagcgcgcgcggccgccacaaagctcgggcgccgcggggctgcatgcggcgtacctggcccggcgcggcgactgctctccgggctggcgggggccggccgcgagccccgggggccccgaggccgcagcttgcctgcgcgctctgagccttcgcaactcgcgagcaaagtttggtggaggcaacgccaagcctgagtcctttcttcctctcgttccccaaatccgagggcagcccgcgggcgtcatgcccgcgctcctccgcagcctggggtacgcgtgaagcccgggaggcttggcgccggcgaagacccaaggaccactcttctgcgtttggagttgctccccacaaccccgggctcgtcgctttctccatcccgacccacgcggggcgcggggacaacacaggtcgcggaggagcgttgccattcaagtgactgcagcagcagcggcagcgcctcggttcctgagcccaccgcaggctgaaggcattgcgcgtagtccatgcccgtagaggaagtgtgcagatgggattaacgtccacatggagatatggaagaggaccggggattggtaccgtaaccatggtcagctggggtcgtttcatctgcctggtcgtggtcaccatggcaaccttgtccctggcccggccctccttcagtttagttgaggataccacattagagccagaagatgccatctcatccggagatgatgaggatgacaccgatggtgcggaagattttgtcagtgagaacagtaacaacaagagagcaccatactggaccaacacagaaaagatggaaaagcggctccatgctgtgcctgcggccaacactgtcaagtttcgctgcccagccggggggaacccaatgccaaccatgcggtggctgaaaaacgggaaggagtttaagcaggagcatcgcattggaggctacaaggtacgaaaccagcactggagcctcattatggaaagtgtggtcccatctgacaagggaaattatacctgtgtggtggagaatgaatacgggtccatcaatcacacgtaccacctggatgttgtggagcgatcgcctcaccggcccatcctccaagccggactgccggcaaatgcctccacagtggtcggaggagacgtagagtttgtctgcaaggtttacagtgatgcccagccccacatccagtggatcaagcacgtggaaaagaacggcagtaaatacgggcccgacgggctgccctacctcaaggttctcaagcactcggggataaatagttccaatgcagaagtgctggctctgttcaatgtgaccgaggcggatgctggggaatatatatgtaaggtctccaattatatagggcaggccaaccagtctgcctggctcactgtcctgccaaaacagcaagcgcctggaagagaaaaggagattacagcttccccagactacctggagatagccatttactgcataggggtcttcttaatcgcctgtatggtggtaacagtcatcctgtgccgaatgaagaacacgaccaagaagccagacttcagcagccagccggctgtgcacaagctgaccaaacgtatccccctgcggagacaggtaacagtttcggctgagtccagctcctccatgaactccaacaccccgctggtgaggataacaacacgcctctcttcaacggcagacacccccatgctggcaggggtctccgagtatgaacttccagaggacccaaaatgggagtttccaagagataagctgacactgggcaagcccctgggagaaggttgctttgggcaagtggtcatggcggaagcagtgggaattgacaaagacaagcccaaggaggcggtcaccgtggccgtgaagatgttgaaagatgatgccacagagaaagacctttctgatctggtgtcagagatggagatgatgaagatgattgggaaacacaagaatatcataaatcttcttggagcctgcacacaggatgggcctctctatgtcatagttgagtatgcctctaaaggcaacctccgagaatacctccgagcccggaggccacccgggatggagtactcctatgacattaaccgtgttcctgaggagcagatgaccttcaaggacttggtgtcatgcacctaccagctggccagaggcatggagtacttggcttcccaaaaatgtattcatcgagatttagcagccagaaatgttttggtaacagaaaacaatgtgatgaaaatagcagactttggactcgccagagatatcaacaatatagactattacaaaaagaccaccaatgggcggcttccagtcaagtggatggctccagaagccctgtttgatagagtatacactcatcagagtgatgtctggtccttcggggtgttaatgtgggagatcttcactttagggggctcgccctacccagggattcccgtggaggaactttttaagctgctgaaggaaggacacagaatggataagccagccaactgcaccaacgaactgtacatgatgatgagggactgttggcatgcagtgccctcccagagaccaacgttcaagcagttggtagaagacttggatcgaattccccccaacccttcccttatgagcatttttagaaaatagtcttagccaatgttctaaaatgctcataaggaagggttggggaattaccctttagacacaagctctaagaactctggatacaacgggaacttggatggatacagtctgggcctgctgggccagatgttccgagggcggcccggcaagcagcctgtcttgcacattgcaactgactggcttaatctacggcaagagtccttcagctccgtcacagagtactctccaatgtgttatagttatccttaaagctcttcaattcaaggaagtgcttggcacgtttactcttctgactggaggggaggtatgtcacctggatggttgttggggagacctcaggggactgagttaggtctttggctgctgactggtgatgtcgctgagg

SEQ ID NO: 310892 - DNA, 3480 bp, Homo sapiens
atccctacggccgcatcgcggccgagccctcgcctcccgggccggtgtctccggctgctcgaaggcgtccggagccgcgcggaactcggggcggcccgggcgcgcggcgctgattggcagagagggcgccgccgtccaggaaacggctcgggtttcagtgggggcgtgacccaccgcgagaaggcgggggcggcggcggcggcgcgggcggcggctggaggagagcgcggtggagagccgagcgggcgggcggcgggtgcggagcgggcgagggagcgcgcgcggccgccacaaagctcgggcgccgcggggctgcatgcggcgtacctggcccggcgcggcgactgctctccgggctggcgggggccggccgcgagccccgggggccccgaggccgcagcttgcctgcgcgctctgagccttcgcaactcgcgagcaaagtttggtggaggcaacgccaagcctgagtcctttcttcctctcgttccccaaatccgagggcagcccgcgggcgtcatgcccgcgctcctccgcagcctggggtacgcgtgaagcccgggaggcttggcgccggcgaagacccaaggaccactcttctgcgtttggagttgctccccacaaccccgggctcgtcgctttctccatcccgacccacgcggggcgcggggacaacacaggtcgcggaggagcgttgccattcaagtgactgcagcagcagcggcagcgcctcggttcctgagcccaccgcaggctgaaggcattgcgcgtagtccatgcccgtagaggaagtgtgcagatgggattaacgtccacatggagatatggaagaggaccggggattggtaccgtaaccatggtcagctggggtcgtttcatctgcctggtcgtggtcaccatggcaaccttgtccctggcccggccctccttcagtttagttgaggataccacattagagccagaagagccaccaaccaaataccaaatctctcaaccagaagtgtacgtggctgcgccaggggagtcgctagaggtgcgctgcctgttgaaagatgccgccgtgatcagttggactaaggatggggtgcacttggggcccaacaataggacagtgcttattggggagtacttgcagataaagggcgccacgcctagagactccggcctctatgcttgtactgccagtaggactgtagacagtgaaacttggtacttcatggtgaatgtcacagatgccatctcatccggagatgatgaggatgacaccgatggtgcggaagattttgtcagtgagaacagtaacaacaagagagcaccatactggaccaacacagaaaagatggaaaagcggctccatgctgtgcctgcggccaacactgtcaagtttcgctgcccagccggggggaacccaatgccaaccatgcggtggctgaaaaacgggaaggagtttaagcaggagcatcgcattggaggctacaaggtacgaaaccagcactggagcctcattatggaaagtgtggtcccatctgacaagggaaattatacctgtgtggtggagaatgaatacgggtccatcaatcacacgtaccacctggatgttgtggagcgatcgcctcaccggcccatcctccaagccggactgccggcaaatgcctccacagtggtcggaggagacgtagagtttgtctgcaaggtttacagtgatgcccagccccacatccagtggatcaagcacgtggaaaagaacggcagtaaatacgggcccgacgggctgccctacctcaaggttctcaagcactcggggataaatagttccaatgcagaagtgctggctctgttcaatgtgaccgaggcggatgctggggaatatatatgtaaggtctccaattatatagggcaggccaaccagtctgcctggctcactgtcctgccaaaacagcaagcgcctggaagagaaaaggagattacagcttccccagactacctggagatagccatttactgcataggggtcttcttaatcgcctgtatggtggtaacagtcatcctgtgccgaatgaagaacacgaccaagaagccagacttcagcagccagccggctgtgcacaagctgaccaaacgtatccccctgcggagacaggtaacagtttcggctgagtccagctcctccatgaactccaacaccccgctggtgaggataacaacacgcctctcttcaacggcagacacccccatgctggcaggggtctccgagtatgaacttccagaggacccaaaatgggagtttccaagagataagctgacactgggcaagcccctgggagaaggttgctttgggcaagtggtcatggcggaagcagtgggaattgacaaagacaagcccaaggaggcggtcaccgtggccgtgaagatgttgaaagatgatgccacagagaaagacctttctgatctggtgtcagagatggagatgatgaagatgattgggaaacacaagaatatcataaatcttcttggagcctgcacacaggatgggcctctctatgtcatagttgagtatgcctctaaaggcaacctccgagaatacctccgagcccggaggccacccgggatggagtactcctatgacattaaccgtgttcctgaggagcagatgaccttcaaggacttggtgtcatgcacctaccagctggccagaggcatggagtacttggcttcccaaaaatgtattcatcgagatttagcagccagaaatgttttggtaacagaaaacaatgtgatgaaaatagcagactttggactcgccagagatatcaacaatatagactattacaaaaagaccaccaatgggcggcttccagtcaagtggatggctccagaagccctgtttgatagagtatacactcatcagagtgatgtctggtccttcggggtgttaatgtgggagatcttcactttagggggctcgccctacccagggattcccgtggaggaactttttaagctgctgaaggaaggacacagaatggataagccagccaactgcaccaacgaactgtacatgatgatgagggactgttggcatgcagtgccctcccagagaccaacgttcaagcagttggtagaagacttggatcgaattctcactctcacaaccaatgagatctgaaagtttatggcttcattgagaaactgggaaaagttggtcaggcgcagtggctcatgcctgtaatcccagcactttgggaggccgaggcaggcggatcatgaggtcaggagttccagaccagcctggccaacatggtgaaaccctgtctctactaaagatacaaaaaattagccgggcgtgttggtgtgcgcctgtaatcccagctactccgggaggctgaggcaggagagtcacttgaaccggggaggcggaggttacagtgagccgagatcatgccattgcattccagccttggcgacagagcgagactccatctc

SEQ ID NO: 310893 - DNA, 3501 bp, Homo sapiens
atccctacggccgcatcgcggccgagccctcgcctcccgggccggtgtctccggctgctcgaaggcgtccggagccgcgcggaactcggggcggcccgggcgcgcggcgctgattggcagagagggcgccgccgtccaggaaacggctcgggtttcagtgggggcgtgacccaccgcgagaaggcgggggcggcggcggcggcgcgggcggcggctggaggagagcgcggtggagagccgagcgggcgggcggcgggtgcggagcgggcgagggagcgcgcgcggccgccacaaagctcgggcgccgcggggctgcatgcggcgtacctggcccggcgcggcgactgctctccgggctggcgggggccggccgcgagccccgggggccccgaggccgcagcttgcctgcgcgctctgagccttcgcaactcgcgagcaaagtttggtggaggcaacgccaagcctgagtcctttcttcctctcgttccccaaatccgagggcagcccgcgggcgtcatgcccgcgctcctccgcagcctggggtacgcgtgaagcccgggaggcttggcgccggcgaagacccaaggaccactcttctgcgtttggagttgctccccacaaccccgggctcgtcgctttctccatcccgacccacgcggggcgcggggacaacacaggtcgcggaggagcgttgccattcaagtgactgcagcagcagcggcagcgcctcggttcctgagcccaccgcaggctgaaggcattgcgcgtagtccatgcccgtagaggaagtgtgcagatgggattaacgtccacatggagatatggaagaggaccggggattggtaccgtaaccatggtcagctggggtcgtttcatctgcctggtcgtggtcaccatggcaaccttgtccctggcccggccctccttcagtttagttgaggataccacattagagccagaagagccaccaaccaaataccaaatctctcaaccagaagtgtacgtggctgcgccaggggagtcgctagaggtgcgctgcctgttgaaagatgccgccgtgatcagttggactaaggatggggtgcacttggggcccaacaataggacagtgcttattggggagtacttgcagataaagggcgccacgcctagagactccggcctctatgcttgtactgccagtaggactgtagacagtgaaacttggtacttcatggtgaatgtcacagatgccatctcatccggagatgatgaggatgacaccgatggtgcggaagattttgtcagtgagaacagtaacaacaagagagcaccatactggaccaacacagaaaagatggaaaagcggctccatgctgtgcctgcggccaacactgtcaagtttcgctgcccagccggggggaacccaatgccaaccatgcggtggctgaaaaacgggaaggagtttaagcaggagcatcgcattggaggctacaaggtacgaaaccagcactggagcctcattatggaaagtgtggtcccatctgacaagggaaattatacctgtgtggtggagaatgaatacgggtccatcaatcacacgtaccacctggatgttgtggagcgatcgcctcaccggcccatcctccaagccggactgccggcaaatgcctccacagtggtcggaggagacgtagagtttgtctgcaaggtttacagtgatgcccagccccacatccagtggatcaagcacgtggaaaagaacggcagtaaatacgggcccgacgggctgccctacctcaaggttctcaagcactcggggataaatagttccaatgcagaagtgctggctctgttcaatgtgaccgaggcggatgctggggaatatatatgtaaggtctccaattatatagggcaggccaaccagtctgcctggctcactgtcctgccaaaacagcaagcgcctggaagagaaaaggagattacagcttccccagactacctggagatagccatttactgcataggggtcttcttaatcgcctgtatggtggtaacagtcatcctgtgccgaatgaagaacacgaccaagaagccagacttcagcagccagccggctgtgcacaagctgaccaaacgtatccccctgcggagacaggtaacagtttcggctgagtccagctcctccatgaactccaacaccccgctggtgaggataacaacacgcctctcttcaacggcagacacccccatgctggcaggggtctccgagtatgaacttccagaggacccaaaatgggagtttccaagagataagctgacactgggcaagcccctgggagaaggttgctttgggcaagtggtcatggcggaagcagtgggaattgacaaagacaagcccaaggaggcggtcaccgtggccgtgaagatgttgaaagatgatgccacagagaaagacctttctgatctggtgtcagagatggagatgatgaagatgattgggaaacacaagaatatcataaatcttcttggagcctgcacacaggatgggcctctctatgtcatagttgagtatgcctctaaaggcaacctccgagaatacctccgagcccggaggccacccgggatggagtactcctatgacattaaccgtgttcctgaggagcagatgaccttcaaggacttggtgtcatgcacctaccagctggccagaggcatggagtacttggcttcccaaaaatgtattcatcgagatttagcagccagaaatgttttggtaacagaaaacaatgtgatgaaaatagcagactttggactcgccagagatatcaacaatatagactattacaaaaagaccaccaatgggcggcttccagtcaagtggatggctccagaagccctgtttgatagagtatacactcatcagagtgatgtctggtccttcggggtgttaatgtgggagatcttcactttagggggctcgccctacccagggattcccgtggaggaactttttaagctgctgaaggaaggacacagaatggataagccagccaactgcaccaacgaactgtacatgatgatgagggactgttggcatgcagtgccctcccagagaccaacgttcaagcagttggtagaagacttggatcgaattctcactctcacaaccaatgaggctgccagcctgggcatcacaagagaaagagaactcccagacctccctttttgcaatatcccatgtaactctgagctccattagcaaaaccagaagttccgccaaaagagatgagaagcctgggtcctccccacacctggccctggtacgcagccaggggctgcctcagtcagtggtgccatgacacctggggcaagacagcacagtgttcctccccggcatcaggctccaaggtggggaacatctcaaagcactctagttttccttgggagtcactcagataaacagccttttaaaaaacccaaaaaacaaaatgcacatcttgttgacaaagtccagcctgc

SEQ ID NO: 310894 - DNA, 3477 bp, Homo sapiens
atccctacggccgcatcgcggccgagccctcgcctcccgggccggtgtctccggctgctcgaaggcgtccggagccgcgcggaactcggggcggcccgggcgcgcggcgctgattggcagagagggcgccgccgtccaggaaacggctcgggtttcagtgggggcgtgacccaccgcgagaaggcgggggcggcggcggcggcgcgggcggcggctggaggagagcgcggtggagagccgagcgggcgggcggcgggtgcggagcgggcgagggagcgcgcgcggccgccacaaagctcgggcgccgcggggctgcatgcggcgtacctggcccggcgcggcgactgctctccgggctggcgggggccggccgcgagccccgggggccccgaggccgcagcttgcctgcgcgctctgagccttcgcaactcgcgagcaaagtttggtggaggcaacgccaagcctgagtcctttcttcctctcgttccccaaatccgagggcagcccgcgggcgtcatgcccgcgctcctccgcagcctggggtacgcgtgaagcccgggaggcttggcgccggcgaagacccaaggaccactcttctgcgtttggagttgctccccacaaccccgggctcgtcgctttctccatcccgacccacgcggggcgcggggacaacacaggtcgcggaggagcgttgccattcaagtgactgcagcagcagcggcagcgcctcggttcctgagcccaccgcaggctgaaggcattgcgcgtagtccatgcccgtagaggaagtgtgcagatgggattaacgtccacatggagatatggaagaggaccggggattggtaccgtaaccatggtcagctggggtcgtttcatctgcctggtcgtggtcaccatggcaaccttgtccctggcccggccctccttcagtttagttgaggataccacattagagccagaagagccaccaaccaaataccaaatctctcaaccagaagtgtacgtggctgcgccaggggagtcgctagaggtgcgctgcctgttgaaagatgccgccgtgatcagttggactaaggatggggtgcacttggggcccaacaataggacagtgcttattggggagtacttgcagataaagggcgccacgcctagagactccggcctctatgcttgtactgccagtaggactgtagacagtgaaacttggtacttcatggtgaatgtcacagatgccatctcatccggagatgatgaggatgacaccgatggtgcggaagattttgtcagtgagaacagtaacaacaagagagcaccatactggaccaacacagaaaagatggaaaagcggctccatgctgtgcctgcggccaacactgtcaagtttcgctgcccagccggggggaacccaatgccaaccatgcggtggctgaaaaacgggaaggagtttaagcaggagcatcgcattggaggctacaaggtacgaaaccagcactggagcctcattatggaaagtgtggtcccatctgacaagggaaattatacctgtgtggtggagaatgaatacgggtccatcaatcacacgtaccacctggatgttgtggagcgatcgcctcaccggcccatcctccaagccggactgccggcaaatgcctccacagtggtcggaggagacgtagagtttgtctgcaaggtttacagtgatgcccagccccacatccagtggatcaagcacgtggaaaagaacggcagtaaatacgggcccgacgggctgccctacctcaaggttctcaaggccgccggtgttaacaccacggacaaagagattgaggttctctatattcggaatgtaacttttgaggacgctggggaatatacgtgcttggcgggtaattctattgggatatcctttcactctgcatggttgacagttctgccagcgcctggaagagaaaaggagattacagcttccccagactacctggagatagccatttactgcataggggtcttcttaatcgcctgtatggtggtaacagtcatcctgtgccgaatgaagaacacgaccaagaagccagacttcagcagccagccggctgtgcacaagctgaccaaacgtatccccctgcggagacaggtaacagtttcggctgagtccagctcctccatgaactccaacaccccgctggtgaggataacaacacgcctctcttcaacggcagacacccccatgctggcaggggtctccgagtatgaacttccagaggacccaaaatgggagtttccaagagataagctgacactgggcaagcccctgggagaaggttgctttgggcaagtggtcatggcggaagcagtgggaattgacaaagacaagcccaaggaggcggtcaccgtggccgtgaagatgttgaaagatgatgccacagagaaagacctttctgatctggtgtcagagatggagatgatgaagatgattgggaaacacaagaatatcataaatcttcttggagcctgcacacaggatgggcctctctatgtcatagttgagtatgcctctaaaggcaacctccgagaatacctccgagcccggaggccacccgggatggagtactcctatgacattaaccgtgttcctgaggagcagatgaccttcaaggacttggtgtcatgcacctaccagctggccagaggcatggagtacttggcttcccaaaaatgtattcatcgagatttagcagccagaaatgttttggtaacagaaaacaatgtgatgaaaatagcagactttggactcgccagagatatcaacaatatagactattacaaaaagaccaccaatgggcggcttccagtcaagtggatggctccagaagccctgtttgatagagtatacactcatcagagtgatgtctggtccttcggggtgttaatgtgggagatcttcactttagggggctcgccctacccagggattcccgtggaggaactttttaagctgctgaaggaaggacacagaatggataagccagccaactgcaccaacgaactgtacatgatgatgagggactgttggcatgcagtgccctcccagagaccaacgttcaagcagttggtagaagacttggatcgaattctcactctcacaaccaatgagatctgaaagtttatggcttcattgagaaactgggaaaagttggtcaggcgcagtggctcatgcctgtaatcccagcactttgggaggccgaggcaggcggatcatgaggtcaggagttccagaccagcctggccaacatggtgaaaccctgtctctactaaagatacaaaaaattagccgggcgtgttggtgtgcgcctgtaatcccagctactccgggaggctgaggcaggagagtcacttgaaccggggaggcggaggttacagtgagccgagatcatgccattgcattccagccttggcgacagagcgagactccatctc

SEQ ID NO: 310895 - DNA, 3375 bp, Homo sapiens
  misc_feature (3158)..(3159): n is a, c, g, or t
  misc_feature (3162)..(3163): n is a, c, g, or t
  misc_feature (3167)..(3168): n is a, c, g, or t
  misc_feature (3173)..(3173): n is a, c, g, or t
  misc_feature (3178)..(3179): n is a, c, g, or t
  misc_feature (3181)..(3181): n is a, c, g, or t
  misc_feature (3221)..(3221): n is a, c, g, or t
atccctacggccgcatcgcggccgagccctcgcctcccgggccggtgtctccggctgctcgaaggcgtccggagccgcgcggaactcggggcggcccgggcgcgcggcgctgattggcagagagggcgccgccgtccaggaaacggctcgggtttcagtgggggcgtgacccaccgcgagaaggcgggggcggcggcggcggcgcgggcggcggctggaggagagcgcggtggagagccgagcgggcgggcggcgggtgcggagcgggcgagggagcgcgcgcggccgccacaaagctcgggcgccgcggggctgcatgcggcgtacctggcccggcgcggcgactgctctccgggctggcgggggccggccgcgagccccgggggccccgaggccgcagcttgcctgcgcgctctgagccttcgcaactcgcgagcaaagtttggtggaggcaacgccaagcctgagtcctttcttcctctcgttccccaaatccgagggcagcccgcgggcgtcatgcccgcgctcctccgcagcctggggtacgcgtgaagcccgggaggcttggcgccggcgaagacccaaggaccactcttctgcgtttggagttgctccccacaaccccgggctcgtcgctttctccatcccgacccacgcggggcgcggggacaacacaggtcgcggaggagcgttgccattcaagtgactgcagcagcagcggcagcgcctcggttcctgagcccaccgcaggctgaaggcattgcgcgtagtccatgcccgtagaggaagtgtgcagatgggattaacgtccacatggagatatggaagaggaccggggattggtaccgtaaccatggtcagctggggtcgtttcatctgcctggtcgtggtcaccatggcaaccttgtccctggcccggccctccttcagtttagttgaggataccacattagagccagaagagccaccaaccaaataccaaatctctcaaccagaagtgtacgtggctgcgccaggggagtcgctagaggtgcgctgcctgttgaaagatgccgccgtgatcagttggactaaggatggggtgcacttggggcccaacaataggacagtgcttattggggagtacttgcagataaagggcgccacgcctagagactccggcctctatgcttgtactgccagtaggactgtagacagtgaaacttggtacttcatggtgaatgtcacagatgccatctcatccggagatgatgaggatgacaccgatggtgcggaagattttgtcagtgagaacagtaacaacaagagagcaccatactggaccaacacagaaaagatggaaaagcggctccatgctgtgcctgcggccaacactgtcaagtttcgctgcccagccggggggaacccaatgccaaccatgcggtggctgaaaaacgggaaggagtttaagcaggagcatcgcattggaggctacaaggtacgaaaccagcactggagcctcattatggaaagtgtggtcccatctgacaagggaaattatacctgtgtggtggagaatgaatacgggtccatcaatcacacgtaccacctggatgttgtggagcgatcgcctcaccggcccatcctccaagccggactgccggcaaatgcctccacagtggtcggaggagacgtagagtttgtctgcaaggtttacagtgatgcccagccccacatccagtggatcaagcacgtggaaaagaacggcagtaaatacgggcccgacgggctgccctacctcaaggttctcaagcactcggggataaatagttccaatgcagaagtgctggctctgttcaatgtgaccgaggcggatgctggggaatatatatgtaaggtctccaattatatagggcaggccaaccagtctgcctggctcactgtcctgccaaaacagcaagcgcctggaagagaaaaggagattacagcttccccagactacctggagatagccatttactgcataggggtcttcttaatcgcctgtatggtggtaacagtcatcctgtgccgaatgaagaacacgaccaagaagccagacttcagcagccagccggctgtgcacaagctgaccaaacgtatccccctgcggagacaggtaacagtttcggctgagtccagctcctccatgaactccaacaccccgctggtgaggataacaacacgcctctcttcaacggcagacacccccatgctggcaggggtctccgagtatgaacttccagaggacccaaaatgggagtttccaagagataagctgacactgggcaagcccctgggagaaggttgctttgggcaagtggtcatggcggaagcagtgggaattgacaaagacaagcccaaggaggcggtcaccgtggccgtgaagatgttgaaagatgatgccacagagaaagacctttctgatctggtgtcagagatggagatgatgaagatgattgggaaacacaagaatatcataaatcttcttggagcctgcacacaggatgggcctctctatgtcatagttgagtatgcctctaaaggcaacctccgagaatacctccgagcccggaggccacccgggatggagtactcctatgacattaaccgtgttcctgaggagcagatgaccttcaaggacttggtgtcatgcacctaccagctggccagaggcatggagtacttggcttcccaaaaatgtattcatcgagatttagcagccagaaatgttttggtaacagaaaacaatgtgatgaaaatagcagactttggactcgccagagatatcaacaatatagactattacaaaaagaccaccaatgggcggcttccagtcaagtggatggctccagaagccctgtttgatagagtatacactcatcagagtgatgtctggtccttcggggtgttaatgtgggagatcttcactttagggggctcgccctacccagggattcccgtggaggaactttttaagctgctgaaggaaggacacagaatggataagccagccaactgcaccaacgaactgtacatgatgatgagggactgttggcatgcagtgccctcccagagaccaacgttcaagcagttggtagaagacttggatcgaattctcactctcacaaccaatgagnnaannctcnntctanaaccnntnagaacttccagagcacctcaggaagagagggcacggagantcatgctcttcaatgcctcagatcggaagtaacacctgccatttcctgtgagagcccattggctgacactggttccaaggtcccaaactaactacatgggaagcaggaagcaccaagaagctgatggagaatcgggttttggaagcaatagtga

SEQ ID NO: 310896 - DNA, 3358 bp, Homo sapiens
atccctacggccgcatcgcggccgagccctcgcctcccgggccggtgtctccggctgctcgaaggcgtccggagccgcgcggaactcggggcggcccgggcgcgcggcgctgattggcagagagggcgccgccgtccaggaaacggctcgggtttcagtgggggcgtgacccaccgcgagaaggcgggggcggcggcggcggcgcgggcggcggctggaggagagcgcggtggagagccgagcgggcgggcggcgggtgcggagcgggcgagggagcgcgcgcggccgccacaaagctcgggcgccgcggggctgcatgcggcgtacctggcccggcgcggcgactgctctccgggctggcgggggccggccgcgagccccgggggccccgaggccgcagcttgcctgcgcgctctgagccttcgcaactcgcgagcaaagtttggtggaggcaacgccaagcctgagtcctttcttcctctcgttccccaaatccgagggcagcccgcgggcgtcatgcccgcgctcctccgcagcctggggtacgcgtgaagcccgggaggcttggcgccggcgaagacccaaggaccactcttctgcgtttggagttgctccccacaaccccgggctcgtcgctttctccatcccgacccacgcggggcgcggggacaacacaggtcgcggaggagcgttgccattcaagtgactgcagcagcagcggcagcgcctcggttcctgagcccaccgcaggctgaaggcattgcgcgtagtccatgcccgtagaggaagtgtgcagatgggattaacgtccacatggagatatggaagaggaccggggattggtaccgtaaccatggtcagctggggtcgtttcatctgcctggtcgtggtcaccatggcaaccttgtccctggcccggccctccttcagtttagttgaggataccacattagagccagaagagccaccaaccaaataccaaatctctcaaccagaagtgtacgtggctgcgccaggggagtcgctagaggtgcgctgcctgttgaaagatgccgccgtgatcagttggactaaggatggggtgcacttggggcccaacaataggacagtgcttattggggagtacttgcagataaagggcgccacgcctagagactccggcctctatgcttgtactgccagtaggactgtagacagtgaaacttggtacttcatggtgaatgtcacagatgccatctcatccggagatgatgaggatgacaccgatggtgcggaagattttgtcagtgagaacagtaacaacaagagagcaccatactggaccaacacagaaaagatggaaaagcggctccatgctgtgcctgcggccaacactgtcaagtttcgctgcccagccggggggaacccaatgccaaccatgcggtggctgaaaaacgggaaggagtttaagcaggagcatcgcattggaggctacaaggtacgaaaccagcactggagcctcattatggaaagtgtggtcccatctgacaagggaaattatacctgtgtggtggagaatgaatacgggtccatcaatcacacgtaccacctggatgttgtggagcgatcgcctcaccggcccatcctccaagccggactgccggcaaatgcctccacagtggtcggaggagacgtagagtttgtctgcaaggtttacagtgatgcccagccccacatccagtggatcaagcacgtggaaaagaacggcagtaaatacgggcccgacgggctgccctacctcaaggttctcaagcactcggggataaatagttccaatgcagaagtgctggctctgttcaatgtgaccgaggcggatgctggggaatatatatgtaaggtctccaattatatagggcaggccaaccagtctgcctggctcactgtcctgccaaaacagcaagcgcctggaagagaaaaggagattacagcttccccagactacctggagatagccatttactgcataggggtcttcttaatcgcctgtatggtggtaacagtcatcctgtgccgaatgaagaacacgaccaagaagccagacttcagcagccagccggctgtgcacaagctgaccaaacgtatccccctgcggagacaggtaacagtttcggctgagtccagctcctccatgaactccaacaccccgctggtgaggataacaacacgcctctcttcaacggcagacacccccatgctggcaggggtctccgagtatgaacttccagaggacccaaaatgggagtttccaagagataagctgacactgggcaagcccctgggagaaggttgctttgggcaagtggtcatggcggaagcagtgggaattgacaaagacaagcccaaggaggcggtcaccgtggccgtgaagatgttgaaagatgatgccacagagaaagacctttctgatctggtgtcagagatggagatgatgaagatgattgggaaacacaagaatatcataaatcttcttggagcctgcacacaggatgggcctctctatgtcatagttgagtatgcctctaaaggcaacctccgagaatacctccgagcccggaggccacccgggatggagtactcctatgacattaaccgtgttcctgaggagcagatgaccttcaaggacttggtgtcatgcacctaccagctggccagaggcatggagtacttggcttcccaaaaatgtattcatcgagatttagcagccagaaatgttttggtaacagaaaacaatgtgatgaaaatagcagactttggactcgccagagatatcaacaatatagactattacaaaaagaccaccaatgggcggcttccagtcaagtggatggctccagaagccctgtttgatagagtatacactcatcagagtgatgtctggtccttcggggtgttaatgtgggagatcttcactttagggggctcgccctacccagggattcccgtggaggaactttttaagctgctgaaggaaggacacagaatggataagccagccaactgcaccaacgaactgtacatgatgatgagggactgttggcatgcagtgccctcccagagaccaacgttcaagcagttggtagaagacttggatcgaattctcactctcacaaccaatgagcggtacaagctgcttccctgtcctgacaagcacaataaaaggtgcaaacctgaggaacgtggggacctcacagaggcaggcgcagccggctcatcgagatgtgtggacagcagaaagcgagtgaggcaagagaaaatcagcacagggtaaacatcagagatcaaagggcagcagctggagtcactgggtggagaagcagtg

SEQ ID NO: 310897 - DNA, 3311 bp, Homo sapiens
atccctacggccgcatcgcggccgagccctcgcctcccgggccggtgtctccggctgctcgaaggcgtccggagccgcgcggaactcggggcggcccgggcgcgcggcgctgattggcagagagggcgccgccgtccaggaaacggctcgggtttcagtgggggcgtgacccaccgcgagaaggcgggggcggcggcggcggcgcgggcggcggctggaggagagcgcggtggagagccgagcgggcgggcggcgggtgcggagcgggcgagggagcgcgcgcggccgccacaaagctcgggcgccgcggggctgcatgcggcgtacctggcccggcgcggcgactgctctccgggctggcgggggccggccgcgagccccgggggccccgaggccgcagcttgcctgcgcgctctgagccttcgcaactcgcgagcaaagtttggtggaggcaacgccaagcctgagtcctttcttcctctcgttccccaaatccgagggcagcccgcgggcgtcatgcccgcgctcctccgcagcctggggtacgcgtgaagcccgggaggcttggcgccggcgaagacccaaggaccactcttctgcgtttggagttgctccccacaaccccgggctcgtcgctttctccatcccgacccacgcggggcgcggggacaacacaggtcgcggaggagcgttgccattcaagtgactgcagcagcagcggcagcgcctcggttcctgagcccaccgcaggctgaaggcattgcgcgtagtccatgcccgtagaggaagtgtgcagatgggattaacgtccacatggagatatggaagaggaccggggattggtaccgtaaccatggtcagctggggtcgtttcatctgcctggtcgtggtcaccatggcaaccttgtccctggcccggccctccttcagtttagttgaggataccacattagagccagaagagccaccaaccaaataccaaatctctcaaccagaagtgtacgtggctgcgccaggggagtcgctagaggtgcgctgcctgttgaaagatgccgccgtgatcagttggactaaggatggggtgcacttggggcccaacaataggacagtgcttattggggagtacttgcagataaagggcgccacgcctagagactccggcctctatgcttgtactgccagtaggactgtagacagtgaaacttggtacttcatggtgaatgtcacagatgccatctcatccggagatgatgaggatgacaccgatggtgcggaagattttgtcagtgagaacagtaacaacaagagagcaccatactggaccaacacagaaaagatggaaaagcggctccatgctgtgcctgcggccaacactgtcaagtttcgctgcccagccggggggaacccaatgccaaccatgcggtggctgaaaaacgggaaggagtttaagcaggagcatcgcattggaggctacaaggtacgaaaccagcactggagcctcattatggaaagtgtggtcccatctgacaagggaaattatacctgtgtggtggagaatgaatacgggtccatcaatcacacgtaccacctggatgttgtggagcgatcgcctcaccggcccatcctccaagccggactgccggcaaatgcctccacagtggtcggaggagacgtagagtttgtctgcaaggtttacagtgatgcccagccccacatccagtggatcaagcacgtggaaaagaacggcagtaaatacgggcccgacgggctgccctacctcaaggttctcaagcactcggggataaatagttccaatgcagaagtgctggctctgttcaatgtgaccgaggcggatgctggggaatatatatgtaaggtctccaattatatagggcaggccaaccagtctgcctggctcactgtcctgccaaaacagcaagcgcctggaagagaaaaggagattacagcttccccagactacctggagatagccatttactgcataggggtcttcttaatcgcctgtatggtggtaacagtcatcctgtgccgaatgaagaacacgaccaagaagccagacttcagcagccagccggctgtgcacaagctgaccaaacgtatccccctgcggagacaggtaacagtttcggctgagtccagctcctccatgaactccaacaccccgctggtgaggataacaacacgcctctcttcaacggcagacacccccatgctggcaggggtctccgagtatgaacttccagaggacccaaaatgggagtttccaagagataagctgacactgggcaagcccctgggagaaggttgctttgggcaagtggtcatggcggaagcagtgggaattgacaaagacaagcccaaggaggcggtcaccgtggccgtgaagatgttgaaagatgatgccacagagaaagacctttctgatctggtgtcagagatggagatgatgaagatgattgggaaacacaagaatatcataaatcttcttggagcctgcacacaggatgggcctctctatgtcatagttgagtatgcctctaaaggcaacctccgagaatacctccgagcccggaggccacccgggatggagtactcctatgacattaaccgtgttcctgaggagcagatgaccttcaaggacttggtgtcatgcacctaccagctggccagaggcatggagtacttggcttcccaaaaatgtattcatcgagatttagcagccagaaatgttttggtaacagaaaacaatgtgatgaaaatagcagactttggactcgccagagatatcaacaatatagactattacaaaaagaccaccaatgggcggcttccagtcaagtggatggctccagaagccctgtttgatagagtatacactcatcagagtgatgtctggtccttcggggtgttaatgtgggagatcttcactttagggggctcgccctacccagggattcccgtggaggaactttttaagctgctgaaggaaggacacagaatggataagccagccaactgcaccaacgaactgtacatgatgatgagggactgttggcatgcagtgccctcccagagaccaacgttcaagcagttggtagaagacttggatcgaattctcactctcacaaccaatgagagcttccagagcagcttaaaaagttcctccacgggaatccccgggtggcctccgggctcggaggtattctcggaggttgcctttagaggcatactcaactatgacatagagaggcccatcctgtgtgcaggctccaagaagatttatgatattc

SEQ ID NO: 310898 - DNA, 3303 bp, Homo sapiens
atccctacggccgcatcgcggccgagccctcgcctcccgggccggtgtctccggctgctcgaaggcgtccggagccgcgcggaactcggggcggcccgggcgcgcggcgctgattggcagagagggcgccgccgtccaggaaacggctcgggtttcagtgggggcgtgacccaccgcgagaaggcgggggcggcggcggcggcgcgggcggcggctggaggagagcgcggtggagagccgagcgggcgggcggcgggtgcggagcgggcgagggagcgcgcgcggccgccacaaagctcgggcgccgcggggctgcatgcggcgtacctggcccggcgcggcgactgctctccgggctggcgggggccggccgcgagccccgggggccccgaggccgcagcttgcctgcgcgctctgagccttcgcaactcgcgagcaaagtttggtggaggcaacgccaagcctgagtcctttcttcctctcgttccccaaatccgagggcagcccgcgggcgtcatgcccgcgctcctccgcagcctggggtacgcgtgaagcccgggaggcttggcgccggcgaagacccaaggaccactcttctgcgtttggagttgctccccacaaccccgggctcgtcgctttctccatcccgacccacgcggggcgcggggacaacacaggtcgcggaggagcgttgccattcaagtgactgcagcagcagcggcagcgcctcggttcctgagcccaccgcaggctgaaggcattgcgcgtagtccatgcccgtagaggaagtgtgcagatgggattaacgtccacatggagatatggaagaggaccggggattggtaccgtaaccatggtcagctggggtcgtttcatctgcctggtcgtggtcaccatggcaaccttgtccctggcccggccctccttcagtttagttgaggataccacattagagccagaagagccaccaaccaaataccaaatctctcaaccagaagtgtacgtggctgcgccaggggagtcgctagaggtgcgctgcctgttgaaagatgccgccgtgatcagttggactaaggatggggtgcacttggggcccaacaataggacagtgcttattggggagtacttgcagataaagggcgccacgcctagagactccggcctctatgcttgtactgccagtaggactgtagacagtgaaacttggtacttcatggtgaatgtcacagatgccatctcatccggagatgatgaggatgacaccgatggtgcggaagattttgtcagtgagaacagtaacaacaagagagcaccatactggaccaacacagaaaagatggaaaagcggctccatgctgtgcctgcggccaacactgtcaagtttcgctgcccagccggggggaacccaatgccaaccatgcggtggctgaaaaacgggaaggagtttaagcaggagcatcgcattggaggctacaaggtacgaaaccagcactggagcctcattatggaaagtgtggtcccatctgacaagggaaattatacctgtgtggtggagaatgaatacgggtccatcaatcacacgtaccacctggatgttgtggagcgatcgcctcaccggcccatcctccaagccggactgccggcaaatgcctccacagtggtcggaggagacgtagagtttgtctgcaaggtttacagtgatgcccagccccacatccagtggatcaagcacgtggaaaagaacggcagtaaatacgggcccgacgggctgccctacctcaaggttctcaagcactcggggataaatagttccaatgcagaagtgctggctctgttcaatgtgaccgaggcggatgctggggaatatatatgtaaggtctccaattatatagggcaggccaaccagtctgcctggctcactgtcctgccaaaacagcaagcgcctggaagagaaaaggagattacagcttccccagactacctggagatagccatttactgcataggggtcttcttaatcgcctgtatggtggtaacagtcatcctgtgccgaatgaagaacacgaccaagaagccagacttcagcagccagccggctgtgcacaagctgaccaaacgtatccccctgcggagacaggtaacagtttcggctgagtccagctcctccatgaactccaacaccccgctggtgaggataacaacacgcctctcttcaacggcagacacccccatgctggcaggggtctccgagtatgaacttccagaggacccaaaatgggagtttccaagagataagctgacactgggcaagcccctgggagaaggttgctttgggcaagtggtcatggcggaagcagtgggaattgacaaagacaagcccaaggaggcggtcaccgtggccgtgaagatgttgaaagatgatgccacagagaaagacctttctgatctggtgtcagagatggagatgatgaagatgattgggaaacacaagaatatcataaatcttcttggagcctgcacacaggatgggcctctctatgtcatagttgagtatgcctctaaaggcaacctccgagaatacctccgagcccggaggccacccgggatggagtactcctatgacattaaccgtgttcctgaggagcagatgaccttcaaggacttggtgtcatgcacctaccagctggccagaggcatggagtacttggcttcccaaaaatgtattcatcgagatttagcagccagaaatgttttggtaacagaaaacaatgtgatgaaaatagcagactttggactcgccagagatatcaacaatatagactattacaaaaagaccaccaatgggcggcttccagtcaagtggatggctccagaagccctgtttgatagagtatacactcatcagagtgatgtctggtccttcggggtgttaatgtgggagatcttcactttagggggctcgccctacccagggattcccgtggaggaactttttaagctgctgaaggaaggacacagaatggataagccagccaactgcaccaacgaactgtacatgatgatgagggactgttggcatgcagtgccctcccagagaccaacgttcaagcagttggtagaagacttggatcgaattctcactctcacaaccaatgagcctctatcctgaagagcgttggaccctggagctgctggccacatcttgatctgccatatgtggtccaagaatgaagtcaacacgaaggagaatgaaggtgctgagggataaagttattgacattctaggagctcctggatcaaacc

SEQ ID NO: 310899 - DNA, 3261 bp, Homo sapiens
atccctacggccgcatcgcggccgagccctcgcctcccgggccggtgtctccggctgctcgaaggcgtccggagccgcgcggaactcggggcggcccgggcgcgcggcgctgattggcagagagggcgccgccgtccaggaaacggctcgggtttcagtgggggcgtgacccaccgcgagaaggcgggggcggcggcggcggcgcgggcggcggctggaggagagcgcggtggagagccgagcgggcgggcggcgggtgcggagcgggcgagggagcgcgcgcggccgccacaaagctcgggcgccgcggggctgcatgcggcgtacctggcccggcgcggcgactgctctccgggctggcgggggccggccgcgagccccgggggccccgaggccgcagcttgcctgcgcgctctgagccttcgcaactcgcgagcaaagtttggtggaggcaacgccaagcctgagtcctttcttcctctcgttccccaaatccgagggcagcccgcgggcgtcatgcccgcgctcctccgcagcctggggtacgcgtgaagcccgggaggcttggcgccggcgaagacccaaggaccactcttctgcgtttggagttgctccccacaaccccgggctcgtcgctttctccatcccgacccacgcggggcgcggggacaacacaggtcgcggaggagcgttgccattcaagtgactgcagcagcagcggcagcgcctcggttcctgagcccaccgcaggctgaaggcattgcgcgtagtccatgcccgtagaggaagtgtgcagatgggattaacgtccacatggagatatggaagaggaccggggattggtaccgtaaccatggtcagctggggtcgtttcatctgcctggtcgtggtcaccatggcaaccttgtccctggcccggccctccttcagtttagttgaggataccacattagagccagaagagccaccaaccaaataccaaatctctcaaccagaagtgtacgtggctgcgccaggggagtcgctagaggtgcgctgcctgttgaaagatgccgccgtgatcagttggactaaggatggggtgcacttggggcccaacaataggacagtgcttattggggagtacttgcagataaagggcgccacgcctagagactccggcctctatgcttgtactgccagtaggactgtagacagtgaaacttggtacttcatggtgaatgtcacagatgccatctcatccggagatgatgaggatgacaccgatggtgcggaagattttgtcagtgagaacagtaacaacaagagagcaccatactggaccaacacagaaaagatggaaaagcggctccatgctgtgcctgcggccaacactgtcaagtttcgctgcccagccggggggaacccaatgccaaccatgcggtggctgaaaaacgggaaggagtttaagcaggagcatcgcattggaggctacaaggtacgaaaccagcactggagcctcattatggaaagtgtggtcccatctgacaagggaaattatacctgtgtggtggagaatgaatacgggtccatcaatcacacgtaccacctggatgttgtggagcgatcgcctcaccggcccatcctccaagccggactgccggcaaatgcctccacagtggtcggaggagacgtagagtttgtctgcaaggtttacagtgatgcccagccccacatccagtggatcaagcacgtggaaaagaacggcagtaaatacgggcccgacgggctgccctacctcaaggttctcaagcactcggggataaatagttccaatgcagaagtgctggctctgttcaatgtgaccgaggcggatgctggggaatatatatgtaaggtctccaattatatagggcaggccaaccagtctgcctggctcactgtcctgccaaaacagcaagcgcctggaagagaaaaggagattacagcttccccagactacctggagatagccatttactgcataggggtcttcttaatcgcctgtatggtggtaacagtcatcctgtgccgaatgaagaacacgaccaagaagccagacttcagcagccagccggctgtgcacaagctgaccaaacgtatccccctgcggagacaggtaacagtttcggctgagtccagctcctccatgaactccaacaccccgctggtgaggataacaacacgcctctcttcaacggcagacacccccatgctggcaggggtctccgagtatgaacttccagaggacccaaaatgggagtttccaagagataagctgacactgggcaagcccctgggagaaggttgctttgggcaagtggtcatggcggaagcagtgggaattgacaaagacaagcccaaggaggcggtcaccgtggccgtgaagatgttgaaagatgatgccacagagaaagacctttctgatctggtgtcagagatggagatgatgaagatgattgggaaacacaagaatatcataaatcttcttggagcctgcacacaggatgggcctctctatgtcatagttgagtatgcctctaaaggcaacctccgagaatacctccgagcccggaggccacccgggatggagtactcctatgacattaaccgtgttcctgaggagcagatgaccttcaaggacttggtgtcatgcacctaccagctggccagaggcatggagtacttggcttcccaaaaatgtattcatcgagatttagcagccagaaatgttttggtaacagaaaacaatgtgatgaaaatagcagactttggactcgccagagatatcaacaatatagactattacaaaaagaccaccaatgggcggcttccagtcaagtggatggctccagaagccctgtttgatagagtatacactcatcagagtgatgtctggtccttcggggtgttaatgtgggagatcttcactttagggggctcgccctacccagggattcccgtggaggaactttttaagctgctgaaggaaggacacagaatggataagccagccaactgcaccaacgaactgtacatgatgatgagggactgttggcatgcagtgccctcccagagaccaacgttcaagcagttggtagaagacttggatcgaattctcactctcacaaccaatgagtaaagccaaggatatgggagggaaaaaaaggggaaagagtcatggaaagccagcttcttgctgaaactccactaggtgccctgctggaatctcccttgaaagag

SEQ ID NO: 310900 - DNA, 3213 bp, Homo sapiens
atccctacggccgcatcgcggccgagccctcgcctcccgggccggtgtctccggctgctcgaaggcgtccggagccgcgcggaactcggggcggcccgggcgcgcggcgctgattggcagagagggcgccgccgtccaggaaacggctcgggtttcagtgggggcgtgacccaccgcgagaaggcgggggcggcggcggcggcgcgggcggcggctggaggagagcgcggtggagagccgagcgggcgggcggcgggtgcggagcgggcgagggagcgcgcgcggccgccacaaagctcgggcgccgcggggctgcatgcggcgtacctggcccggcgcggcgactgctctccgggctggcgggggccggccgcgagccccgggggccccgaggccgcagcttgcctgcgcgctctgagccttcgcaactcgcgagcaaagtttggtggaggcaacgccaagcctgagtcctttcttcctctcgttccccaaatccgagggcagcccgcgggcgtcatgcccgcgctcctccgcagcctggggtacgcgtgaagcccgggaggcttggcgccggcgaagacccaaggaccactcttctgcgtttggagttgctccccacaaccccgggctcgtcgctttctccatcccgacccacgcggggcgcggggacaacacaggtcgcggaggagcgttgccattcaagtgactgcagcagcagcggcagcgcctcggttcctgagcccaccgcaggctgaaggcattgcgcgtagtccatgcccgtagaggaagtgtgcagatgggattaacgtccacatggagatatggaagaggaccggggattggtaccgtaaccatggtcagctggggtcgtttcatctgcctggtcgtggtcaccatggcaaccttgtccctggcccggccctccttcagtttagttgaggataccacattagagccagaagatgccatctcatccggagatgatgaggatgacaccgatggtgcggaagattttgtcagtgagaacagtaacaacaagagagcaccatactggaccaacacagaaaagatggaaaagcggctccatgctgtgcctgcggccaacactgtcaagtttcgctgcccagccggggggaacccaatgccaaccatgcggtggctgaaaaacgggaaggagtttaagcaggagcatcgcattggaggctacaaggtacgaaaccagcactggagcctcattatggaaagtgtggtcccatctgacaagggaaattatacctgtgtggtggagaatgaatacgggtccatcaatcacacgtaccacctggatgttgtggagcgatcgcctcaccggcccatcctccaagccggactgccggcaaatgcctccacagtggtcggaggagacgtagagtttgtctgcaaggtttacagtgatgcccagccccacatccagtggatcaagcacgtggaaaagaacggcagtaaatacgggcccgacgggctgccctacctcaaggttctcaagcactcggggataaatagttccaatgcagaagtgctggctctgttcaatgtgaccgaggcggatgctggggaatatatatgtaaggtctccaattatatagggcaggccaaccagtctgcctggctcactgtcctgccaaaacagcaagcgcctggaagagaaaaggagattacagcttccccagactacctggagatagccatttactgcataggggtcttcttaatcgcctgtatggtggtaacagtcatcctgtgccgaatgaagaacacgaccaagaagccagacttcagcagccagccggctgtgcacaagctgaccaaacgtatccccctgcggagacaggtaacagtttcggctgagtccagctcctccatgaactccaacaccccgctggtgaggataacaacacgcctctcttcaacggcagacacccccatgctggcaggggtctccgagtatgaacttccagaggacccaaaatgggagtttccaagagataagctgacactgggcaagcccctgggagaaggttgctttgggcaagtggtcatggcggaagcagtgggaattgacaaagacaagcccaaggaggcggtcaccgtggccgtgaagatgttgaaagatgatgccacagagaaagacctttctgatctggtgtcagagatggagatgatgaagatgattgggaaacacaagaatatcataaatcttcttggagcctgcacacaggatgggcctctctatgtcatagttgagtatgcctctaaaggcaacctccgagaatacctccgagcccggaggccacccgggatggagtactcctatgacattaaccgtgttcctgaggagcagatgaccttcaaggacttggtgtcatgcacctaccagctggccagaggcatggagtacttggcttcccaaaaatgtattcatcgagatttagcagccagaaatgttttggtaacagaaaacaatgtgatgaaaatagcagactttggactcgccagagatatcaacaatatagactattacaaaaagaccaccaatgggcggcttccagtcaagtggatggctccagaagccctgtttgatagagtatacactcatcagagtgatgtctggtccttcggggtgttaatgtgggagatcttcactttagggggctcgccctacccagggattcccgtggaggaactttttaagctgctgaaggaaggacacagaatggataagccagccaactgcaccaacgaactgtacatgatgatgagggactgttggcatgcagtgccctcccagagaccaacgttcaagcagttggtagaagacttggatcgaattctcactctcacaaccaatgagatctgaaagtttatggcttcattgagaaactgggaaaagttggtcaggcgcagtggctcatgcctgtaatcccagcactttgggaggccgaggcaggcggatcatgaggtcaggagttccagaccagcctggccaacatggtgaaaccctgtctctactaaagatacaaaaaattagccgggcgtgttggtgtgcgcctgtaatcccagctactccgggaggctgaggcaggagagtcacttgaaccggggaggcggaggttacagtgagccgagatcatgccattgcattccagccttggcgacagagcgagactccatctc

SEQ ID NO: 310901 - DNA, 2046 bp, Homo sapiens
atccctacggccgcatcgcggccgagccctcgcctcccgggccggtgtctccggctgctcgaaggcgtccggagccgcgcggaactcggggcggcccgggcgcgcggcgctgattggcagagagggcgccgccgtccaggaaacggctcgggtttcagtgggggcgtgacccaccgcgagaaggcgggggcggcggcggcggcgcgggcggcggctggaggagagcgcggtggagagccgagcgggcgggcggcgggtgcggagcgggcgagggagcgcgcgcggccgccacaaagctcgggcgccgcggggctgcatgcggcgtacctggcccggcgcggcgactgctctccgggctggcgggggccggccgcgagccccgggggccccgaggccgcagcttgcctgcgcgctctgagccttcgcaactcgcgagcaaagtttggtggaggcaacgccaagcctgagtcctttcttcctctcgttccccaaatccgagggcagcccgcgggcgtcatgcccgcgctcctccgcagcctggggtacgcgtgaagcccgggaggcttggcgccggcgaagacccaaggaccactcttctgcgtttggagttgctccccacaaccccgggctcgtcgctttctccatcccgacccacgcggggcgcggggacaacacaggtcgcggaggagcgttgccattcaagtgactgcagcagcagcggcagcgcctcggttcctgagcccaccgcaggctgaaggcattgcgcgtagtccatgcccgtagaggaagtgtgcagatgggattaacgtccacatggagatatggaagaggaccggggattggtaccgtaaccatggtcagctggggtcgtttcatctgcctggtcgtggtcaccatggcaaccttgtccctggcccggccctccttcagtttagttgaggataccacattagagccagaagagccaccaaccaaataccaaatctctcaaccagaagtgtacgtggctgcgccaggggagtcgctagaggtgcgctgcctgttgaaagatgccgccgtgatcagttggactaaggatggggtgcacttggggcccaacaataggacagtgcttattggggagtacttgcagataaagggcgccacgcctagagactccggcctctatgcttgtactgccagtaggactgtagacagtgaaacttggtacttcatggtgaatgtcacagatgccatctcatccggagatgatgaggatgacaccgatggtgcggaagattttgtcagtgagaacagtaacaacaagagagcaccatactggaccaacacagaaaagatggaaaagcggctccatgctgtgcctgcggccaacactgtcaagtttcgctgcccagccggggggaacccaatgccaaccatgcggtggctgaaaaacgggaaggagtttaagcaggagcatcgcattggaggctacaaggtacgaaaccagcactggagcctcattatggaaagtgtggtcccatctgacaagggaaattatacctgtgtggtggagaatgaatacgggtccatcaatcacacgtaccacctggatgttgtgggcagccagggtttatgagctttgcatgatcctcatggttcccaagcgtcatctgtgtaaagtggacgtggtatgaaatgtctgacattttggaagctgagattactctgaaaatgttaattgggcaggtgaaaagggtacagatgtgctgtagcagacctttggttttaaaagagaagcatcatttccccaacagggcaactgtagaaggccagctgaagagtaaaggaaaaggtctgaggactgagcctgtggctggctggaaaaaggtgaatgttgagggcccttcacttccatcacaagaaagtcattagacggtaccaattcagtgtctgttcctggcatctatttcctctgtgcaaagggaaccatgtatatgagcttataaatacatttttgtcagagtgcacagataagtaggccattttaattaaacattgaagacc

SEQ ID NO: 310902 - DNA, 443 bp, Homo sapiens
gtcatcatggagggaaaatttaagccattaaaactatcttaactgaaaacaatcccaggctctttgcgagggttcctgggttgttgactttgctatggagaaggtctcagttgtagataattgcaacctttttgctttgcaaaaaacacatccatggaatatgttcttttgcatacagatgccatctcatccggagatgatgaggatgacaccgatggtgcggaagattttgtcagtgagaacagtaacaacaagagtaagtaactgcccggctccgatggtccccgagagaggagcatggagggaagttctgcctgtcacctgtcttcttgtcgactcttctgcgccatgctgtgtcccgcggcccttgcctttccccgctgtgtctactttcctgactttcaaacctgagaataaaccagtgttgctgcacaacttctcta

SEQ ID NO: 310903 - DNA, 438 bp, Homo sapiens
tcgcgatgtgtagaattgcgacgagggcgggagatcgtggggacatcacaggtcgcggaggagcgttgccattcaagtgactgcagcagcagcggcagcgcctcggttcctgagcccaccgcaggctgaaggcattgcgcgtagtccatgcccgtagaggaagtgtgcagatgggattaacgtccacatggagatatggaagaggaccggggattggtaccgtaaccatggtcagctggggtcgtttcatctgcctggtcgtggtcaccatggcaaccttgtccctggcccggccctccttcagtttagttgaggataccacattagagccagaagagccaccaaccaaataccaaatctctcaaccagaagtgcgcctgggtgcagaggaatagagaaaattagagtttgaacatgtagtaagagtgagtgaatatt

SEQ ID NO: 310904 - DNA, 5001 bp, Homo sapiens
atccctacggccgcatcgcggccgagccctcgcctcccgggccggtgtctccggctgctcgaaggcgtccggagccgcgcggaactcggggcggcccgggcgcgcggcgctgattggcagagagggcgccgccgtccaggaaacggctcgggtttcagtgggggcgtgacccaccgcgagaaggcgggggcggcggcggcggcgcgggcggcggctggaggagagcgcggtggagagccgagcgggcgggcggcgggtgcggagcgggcgagggagcgcgcgcggccgccacaaagctcgggcgccgcggggctgcatgcggcgtacctggcccggcgcggcgactgctctccgggctggcgggggccggccgcgagccccgggggccccgaggccgcagcttgcctgcgcgctctgagccttcgcaactcgcgagcaaagtttggtggaggcaacgccaagcctgagtcctttcttcctctcgttccccaaatccgagggcagcccgcgggcgtcatgcccgcgctcctccgcagcctggggtacgcgtgaagcccgggaggcttggcgccggcgaagacccaaggaccactcttctgcgtttggagttgctccccacaaccccgggctcgtcgctttctccatcccgacccacgcggggcgcggggacaacacaggtcgcggaggagcgttgccattcaagtgactgcagcagcagcggcagcgcctcggttcctgagcccaccgcaggctgaaggcattgcgcgtagtccatgcccgtagaggaagtgtgcagatgggattaacgtccacatggagatatggaagaggaccggggattggtaccgtaaccatggtcagctggggtcgtttcatctgcctggtcgtggtcaccatggcaaccttgtccctggcccggccctccttcagtttagttgaggataccacattagagccagaagagccaccaaccaaataccaaatctctcaaccagaagtgtacgtggctgcgccaggggagtcgctagaggtgcgctgcctgttgaaagatgccgccgtgatcagttggactaaggatggggtgcacttggggcccaacaataggacagtgcttattggggagtacttgcagataaagggcgccacgcctagagactccggcctctatgcttgtactgccagtaggactgtagacagtgaaacttggtacttcatggtgaatgtcacagatgccatctcatccggagatgatgaggatgacaccgatggtgcggaagattttgtcagtgagaacagtaacaacaagagagcaccatactggaccaacacagaaaagatggaaaagcggctccatgctgtgcctgcggccaacactgtcaagtttcgctgcccagccggggggaacccaatgccaaccatgcggtggctgaaaaacgggaaggagtttaagcaggagcatcgcattggaggctacaaggtacgaaaccagcactggagcctcattatggaaagtgtggtcccatctgacaagggaaattatacctgtgtggtggagaatgaatacgggtccatcaatcacacgtaccacctggatgttgtggagcgatcgcctcaccggcccatcctccaagccggactgccggcaaatgcctccacagtggtcggaggagacgtagagtttgtctgcaaggtttacagtgatgcccagccccacatccagtggatcaagcacgtggaaaagaacggcagtaaatacgggcccgacgggctgccctacctcaaggttctcaagcactcggggataaatagttccaatgcagaagtgctggctctgttcaatgtgaccgaggcggatgctggggaatatatatgtaaggtctccaattatatagggcaggccaaccagtctgcctggctcactgtcctgccaaaacagcaaggccgccggtgttaacaccacggacaaagagattgaggttctctatattcggaatgtaacttttgaggacgctggggaatatacgtgcttggcgggtaattctattgggatatcctttcactctgcatggttgacagttctgccagcgcctggaagagaaaaggagattacagcttccccagactacctggagatagccatttactgcataggggtcttcttaatcgcctgtatggtggtaacagtcatcctgtgccgaatgaagaacacgaccaagaagccagacttcagcagccagccggctgtgcacaagctgaccaaacgtatccccctgcggagacaggtaacagtttcggctgagtccagctcctccatgaactccaacaccccgctggtgaggataacaacacgcctctcttcaacggcagacacccccatgctggcaggggtctccgagtatgaacttccagaggacccaaaatgggagtttccaagagataagctgacactgggcaagcccctgggagaaggttgctttgggcaagtggtcatggcggaagcagtgggaattgacaaagacaagcccaaggaggcggtcaccgtggccgtgaagatgttgaaagatgatgccacagagaaagacctttctgatctggtgtcagagatggagatgatgaagatgattgggaaacacaagaatatcataaatcttcttggagcctgcacacaggatgggcctctctatgtcatagttgagtatgcctctaaaggcaacctccgagaatacctccgagcccggaggccacccgggatggagtactcctatgacattaaccgtgttcctgaggagcagatgaccttcaaggacttggtgtcatgcacctaccagctggccagaggcatggagtacttggcttcccaaaaatgtattcatcgagatttagcagccagaaatgttttggtaacagaaaacaatgtgatgaaaatagcagactttggactcgccagagatatcaacaatatagactattacaaaaagaccaccaatgggcggcttccagtcaagtggatggctccagaagccctgtttgatagagtatacactcatcagagtgatgtctggtccttcggggtgttaatgtgggagatcttcactttagggggctcgccctacccagggattcccgtggaggaactttttaagctgctgaaggaaggacacagaatggataagccagccaactgcaccaacgaactgtacatgatgatgagggactgttggcatgcagtgccctcccagagaccaacgttcaagcagttggtagaagacttggatcgaattctcactctcacaaccaatgaggaatacttggacctcagccaacctctcgaacagtattcacctagttaccctgacacaagaagttcttgttcttcaggagatgattctgttttttctccagaccccatgccttacgaaccatgccttcctcagtatccacacataaacggcagtgttaaaacatgaatgactgtgtctgcctgtccccaaacaggacagcactgggaacctagctacactgagcagggagaccatgcctcccagagcttgttgtctccacttgtatatatggatcagaggagtaaataattggaaaagtaatcagcatatgtgtaaagatttatacagttgaaaacttgtaatcttccccaggaggagaagaaggtttctggagcagtggactgccacaagccaccatgtaacccctctcacctgccgtgcgtactggctgtggaccagtaggactcaaggtggacgtgcgttctgccttccttgttaattttgtaataattggagaagatttatgtcagcacacacttacagagcacaaatgcagtatataggtgctggatgtatgtaaatatattcaaattatgtataaatatatattatatatttacaaggagttattttttgtattgattttaaatggatgtcccaatgcacctagaaaattggtctctctttttttaatagctatttgctaaatgctgttcttacacataatttcttaattttcaccgagcagaggtggaaaaatacttttgctttcagggaaaatggtataacgttaatttattaataaattggtaatatacaaaacaattaatcatttatagttttttttgtaatttaagtggcatttctatgcaggcagcacagcagactagttaatctattgcttggacttaactagttatcagatcctttgaaaagagaatatttacaatatatgactaatttggggaaaatgaagttttgatttatttgtgtttaaatgctgctgtcagacgattgttcttagacctcctaaatgccccatattaaaagaactcattcataggaaggtgtttcattttggtgtgcaaccctgtcattacgtcaacgcaacgtctaactggacttcccaagataaatggtaccagcgtcctcttaaaagatgccttaatccattccttgaggacagaccttagttgaaatgatagcagaatgtgcttctctctggcagctggccttctgcttctgagttgcacattaatcagattagcctgtattctcttcagtgaattttgataatggcttccagactctttggcgttggagacgcctgttaggatcttcaagtcccatcatagaaaattgaaacacagagttgttctgctgatagttttggggatacgtccatctttttaagggattgctttcatctaattctggcaggacctcaccaaaagatccagcctcatacctacatcagacaaaatatcgccgttgttccttctgtactaaagtattgtgttttgctttggaaacacccactcactttgcaatagccgtgcaagatgaatgcagattacactgatcttatgtgttacaaaattggagaaagtatttaataaaacctgttaatttttatactgacaataaaaatgtttctacagatattaatgttaacaagacaaaataaatgtcacgcaacttatttttttaaaaaaaaaaa

SEQ ID NO: 310905 - DNA, 4480 bp, Homo sapiens
atccctacggccgcatcgcggccgagccctcgcctcccgggccggtgtctccggctgctcgaaggcgtccggagccgcgcggaactcggggcggcccgggcgcgcggcgctgattggcagagagggcgccgccgtccaggaaacggctcgggtttcagtgggggcgtgacccaccgcgagaaggcgggggcggcggcggcggcgcgggcggcggctggaggagagcgcggtggagagccgagcgggcgggcggcgggtgcggagcgggcgagggagcgcgcgcggccgccacaaagctcgggcgccgcggggctgcatgcggcgtacctggcccggcgcggcgactgctctccgggctggcgggggccggccgcgagccccgggggccccgaggccgcagcttgcctgcgcgctctgagccttcgcaactcgcgagcaaagtttggtggaggcaacgccaagcctgagtcctttcttcctctcgttccccaaatccgagggcagcccgcgggcgtcatgcccgcgctcctccgcagcctggggtacgcgtgaagcccgggaggcttggcgccggcgaagacccaaggaccactcttctgcgtttggagttgctccccacaaccccgggctcgtcgctttctccatcccgacccacgcggggcgcggggacaacacaggtcgcggaggagcgttgccattcaagtgactgcagcagcagcggcagcgcctcggttcctgagcccaccgcaggctgaaggcattgcgcgtagtccatgcccgtagaggaagtgtgcagatgggattaacgtccacatggagatatggaagaggaccggggattggtaccgtaaccatggtcagctggggtcgtttcatctgcctggtcgtggtcaccatggcaaccttgtccctggcccggccctccttcagtttagttgaggataccacattagagccagaagagccaccaaccaaataccaaatctctcaaccagaagtgtacgtggctgcgccaggggagtcgctagaggtgcgctgcctgttgaaagatgccgccgtgatcagttggactaaggatggggtgcacttggggcccaacaataggacagtgcttattggggagtacttgcagataaagggcgccacgcctagagactccggcctctatgcttgtactgccagtaggactgtagacagtgaaacttggtacttcatggtgaatgtcacagatgccatctcatccggagatgatgaggatgacaccgatggtgcggaagattttgtcagtgagaacagtaacaacaagagagcaccatactggaccaacacagaaaagatggaaaagcggctccatgctgtgcctgcggccaacactgtcaagtttcgctgcccagccggggggaacccaatgccaaccatgcggtggctgaaaaacgggaaggagtttaagcaggagcatcgcattggaggctacaaggtacgaaaccagcactggagcctcattatggaaagtgtggtcccatctgacaagggaaattatacctgtgtggtggagaatgaatacgggtccatcaatcacacgtaccacctggatgttgtggagcgatcgcctcaccggcccatcctccaagccggactgccggcaaatgcctccacagtggtcggaggagacgtagagtttgtctgcaaggtttacagtgatgcccagccccacatccagtggatcaagcacgtggaaaagaacggcagtaaatacgggcccgacgggctgccctacctcaaggttctcaaggccgccggtgttaacaccacggacaaagagattgaggttctctatattcggaatgtaacttttgaggacgctggggaatatacgtgcttggcgggtaattctattgggatatcctttcactctgcatggttgacagttctgccagcgcctggaagagaaaaggagattacagcttccccagactacctggagatagccatttactgcataggggtcttcttaatcgcctgtatggtggtaacagtcatcctgtgccgaatgaagaacacgaccaagaagccagacttcagcagccagccggctgtgcacaagctgaccaaacgtatccccctgcggagacaggtaacagtttcggctgagtccagctcctccatgaactccaacaccccgctggtgaggataacaacacgcctctcttcaacggcagacacccccatgctggcaggggtctccgagtatgaacttccagaggacccaaaatgggagtttccaagagataagctgacactgggcaagcccctgggagaaggttgctttgggcaagtggtcatggcggaagcagtgggaattgacaaagacaagcccaaggaggcggtcaccgtggccgtgaagatgttgaaagatgatgccacagagaaagacctttctgatctggtgtcagagatggagatgatgaagatgattgggaaacacaagaatatcataaatcttcttggagcctgcacacaggatgggcctctctatgtcatagttgagtatgcctctaaaggcaacctccgagaatacctccgagcccggaggccacccgggatggagtactcctatgacattaaccgtgttcctgaggagcagatgaccttcaaggacttggtgtcatgcacctaccagctggccagaggcatggagtacttggcttcccaaaaatgtattcatcgagatttagcagccagaaatgttttggtaacagaaaacaatgtgatgaaaatagcagactttggactcgccagagatatcaacaatatagactattacaaaaagaccaccaatgggcggcttccagtcaagtggatggctccagaagccctgtttgatagagtatacactcatcagagtgatgtctggtccttcggggtgttaatgtgggagatcttcactttagggggctcgccctacccagggattcccgtggaggaactttttaagctgctgaaggaaggacacagaatggataagccagccaactgcaccaacgaactgtacatgatgatgagggactgttggcatgcagtgccctcccagagaccaacgttcaagcagttggtagaagacttggatcgaattctcactctcacaaccaatgaggaatacttggacctcagccaacctctcgaacagtattcacctagttaccctgacacaagaagttcttgttcttcaggagatgattctgttttttctccagaccccatgccttacgaaccatgccttcctcagtatccacacataaacggcagtgttaaaacatgaatgactgtgtctgcctgtccccaaacaggacagcactgggaacctagctacactgagcagggagaccatgcctcccagagcttgttgtctccacttgtatatatggatcagaggagtaaataattggaaaagtaatcagcatatgtgtaaagatttatacagttgaaaacttgtaatcttccccaggaggagaagaaggtttctggagcagtggactgccacaagccaccatgtaacccctctcacctgccgtgcgtactggctgtggaccagtaggactcaaggtggacgtgcgttctgccttccttgttaattttgtaataattggagaagatttatgtcagcacacacttacagagcacaaatgcagtatataggtgctggatgtatgtaaatatattcaaattatgtataaatatatattatatatttacaaggagttattttttgtattgattttaaatggatgtcccaatgcacctagaaaattggtctctctttttttaatagctatttgctaaatgctgttcttacacataatttcttaattttcaccgagcagaggtggaaaaatacttttgctttcagggaaaatggtataacgttaatttattaataaattggtaatatacaaaacaattaatcatttatagttttttttgtaatttaagtggcatttctatgcaggcagcacagcagactagttaatctattgcttggacttaactagttatcagatcctttgaaaagagaatatttacaatatatgactaatttggggaaaatgaagttttgatttatttgtgtttaaatgctgctgtcagacgattgttcttagacctcctaaatgccccatattaaaagaactcattcataggaaggtgtttcattttggtgtgcaaccctgtcattacgtcaacgcaacgtctaactggacttcccaagataaatggtaccagcgtcctcttaaaagatgccttaatccattccttgaggacagaccttagttgaaatgatagcagaatgtgcttctctctggcagctggccttctgcttctgagttgcacattaatcagattagcctgtattctcttcagtgaattttgatagtcattgcgttggagacgcctgttaggatctctaaacagagtgtctgctgat

SEQ ID NO: 310906 - DNA, 4946 bp, Homo sapiens
atccctacggccgcatcgcggccgagccctcgcctcccgggccggtgtctccggctgctcgaaggcgtccggagccgcgcggaactcggggcggcccgggcgcgcggcgctgattggcagagagggcgccgccgtccaggaaacggctcgggtttcagtgggggcgtgacccaccgcgagaaggcgggggcggcggcggcggcgcgggcggcggctggaggagagcgcggtggagagccgagcgggcgggcggcgggtgcggagcgggcgagggagcgcgcgcggccgccacaaagctcgggcgccgcggggctgcatgcggcgtacctggcccggcgcggcgactgctctccgggctggcgggggccggccgcgagccccgggggccccgaggccgcagcttgcctgcgcgctctgagccttcgcaactcgcgagcaaagtttggtggaggcaacgccaagcctgagtcctttcttcctctcgttccccaaatccgagggcagcccgcgggcgtcatgcccgcgctcctccgcagcctggggtacgcgtgaagcccgggaggcttggcgccggcgaagacccaaggaccactcttctgcgtttggagttgctccccacaaccccgggctcgtcgctttctccatcccgacccacgcggggcgcggggacaacacaggtcgcggaggagcgttgccattcaagtgactgcagcagcagcggcagcgcctcggttcctgagcccaccgcaggctgaaggcattgcgcgtagtccatgcccgtagaggaagtgtgcagatgggattaacgtccacatggagatatggaagaggaccggggattggtaccgtaaccatggtcagctggggtcgtttcatctgcctggtcgtggtcaccatggcaaccttgtccctggcccggccctccttcagtttagttgaggataccacattagagccagaagagccaccaaccaaataccaaatctctcaaccagaagtgtacgtggctgcgccaggggagtcgctagaggtgcgctgcctgttgaaagatgccgccgtgatcagttggactaaggatggggtgcacttggggcccaacaataggacagtgcttattggggagtacttgcagataaagggcgccacgcctagagactccggcctctatgcttgtactgccagtaggactgtagacagtgaaacttggtacttcatggtgaatgtcacagatgccatctcatccggagatgatgaggatgacaccgatggtgcggaagattttgtcagtgagaacagtaacaacaagagagcaccatactggaccaacacagaaaagatggaaaagcggctccatgctgtgcctgcggccaacactgtcaagtttcgctgcccagccggggggaacccaatgccaaccatgcggtggctgaaaaacgggaaggagtttaagcaggagcatcgcattggaggctacaaggtacgaaaccagcactggagcctcattatggaaagtgtggtcccatctgacaagggaaattatacctgtgtggtggagaatgaatacgggtccatcaatcacacgtaccacctggatgttgtggagcgatcgcctcaccggcccatcctccaagccggactgccggcaaatgcctccacagtggtcggaggagacgtagagtttgtctgcaaggtttacagtgatgcccagccccacatccagtggatcaagcacgtggaaaagaacggcagtaaatacgggcccgacgggctgccctacctcaaggttctcaagcactcggggataaatagttccaatgcagaagtgctggctctgttcaatgtgaccgaggcggatgctggggaatatatatgtaaggtctccaattatatagggcaggccaaccagtctgcctggctcactgtcctgccaaaacagcaaggccgccggtgttaacaccacggacaaagagattgaggttctctatattcggaatgtaacttttgaggacgctggggaatatacgtgcttggcgggtaattctattgggatatcctttcactctgcatggttgacagttctgccagcgcctggaagagaaaaggagattacagcttccccagactacctggagatagccatttactgcataggggtcttcttaatcgcctgtatggtggtaacagtcatcctgtgccgaatgaagaacacgaccaagaagccagacttcagcagccagccggctgtgcacaagctgaccaaacgtatccccctgcggagacaggtaacagtttcggctgagtccagctcctccatgaactccaacaccccgctggtgaggataacaacacgcctctcttcaacggcagacacccccatgctggcaggggtctccgagtatgaacttccagaggacccaaaatgggagtttccaagagataagctgacactgggcaagcccctgggagaaggttgctttgggcaagtggtcatggcggaagcagtgggaattgacaaagacaagcccaaggaggcggtcaccgtggccgtgaagatgttgaaagatgatgccacagagaaagacctttctgatctggtgtcagagatggagatgatgaagatgattgggaaacacaagaatatcataaatcttcttggagcctgcacacaggatgggcctctctatgtcatagttgagtatgcctctaaaggcaacctccgagaatacctccgagcccggaggccacccgggatggagtactcctatgacattaaccgtgttcctgaggagcagatgaccttcaaggacttggtgtcatgcacctaccagctggccagaggcatggagtacttggcttcccaaaaatgtattcatcgagatttagcagccagaaatgttttggtaacagaaaacaatgtgatgaaaatagcagactttggactcgccagagatatcaacaatatagactattacaaaaagaccaccaatgggcggcttccagtcaagtggatggctccagaagccctgtttgatagagtatacactcatcagagtgatgtctggtccttcggggtgttaatgtgggagatcttcactttagggggctcgccctacccagggattcccgtggaggaactttttaagctgctgaaggaaggacacagaatggataagccagccaactgcaccaacgaactgtacatgatgatgagggactgttggcatgcagtgccctcccagagaccaacgttcaagcagttggtagaagacttggatcgaattctcactctcacaaccaatgaggaatacttggacctcagccaacctctcgaacagtattcacctagttaccctgacacaagaagttcttgttcttcaggagatgattctgttttttctccagaccccatgccttacgaaccatgccttcctcagtatccacacataaacggcagtctagctacactgagcagggagaccatgcctcccagagcttgttgtctccacttgtatatatggatcagaggagtaaataattggaaaagtaatcagcatatgtgtaaagatttatacagttgaaaacttgtaatcttccccaggaggagaagaaggtttctggagcagtggactgccacaagccaccatgtaacccctctcacctgccgtgcgtactggctgtggaccagtaggactcaaggtggacgtgcgttctgccttccttgttaattttgtaataattggagaagatttatgtcagcacacacttacagagcacaaatgcagtatataggtgctggatgtatgtaaatatattcaaattatgtataaatatatattatatatttacaaggagttattttttgtattgattttaaatggatgtcccaatgcacctagaaaattggtctctctttttttaatagctatttgctaaatgctgttcttacacataatttcttaattttcaccgagcagaggtggaaaaatacttttgctttcagggaaaatggtataacgttaatttattaataaattggtaatatacaaaacaattaatcatttatagttttttttgtaatttaagtggcatttctatgcaggcagcacagcagactagttaatctattgcttggacttaactagttatcagatcctttgaaaagagaatatttacaatatatgactaatttggggaaaatgaagttttgatttatttgtgtttaaatgctgctgtcagacgattgttcttagacctcctaaatgccccatattaaaagaactcattcataggaaggtgtttcattttggtgtgcaaccctgtcattacgtcaacgcaacgtctaactggacttcccaagataaatggtaccagcgtcctcttaaaagatgccttaatccattccttgaggacagaccttagttgaaatgatagcagaatgtgcttctctctggcagctggccttctgcttctgagttgcacattaatcagattagcctgtattctcttcagtgaattttgataatggcttccagactctttggcgttggagacgcctgttaggatcttcaagtcccatcatagaaaattgaaacacagagttgttctgctgatagttttggggatacgtccatctttttaagggattgctttcatctaattctggcaggacctcaccaaaagatccagcctcatacctacatcagacaaaatatcgccgttgttccttctgtactaaagtattgtgttttgctttggaaacacccactcactttgcaatagccgtgcaagatgaatgcagattacactgatcttatgtgttacaaaattggagaaagtatttaataaaacctgttaatttttatactgacaataaaaatgtttctacagatattaatgttaacaagacaaaataaatgtcacgcaacttatttttttaaaaaaaaaaa

SEQ ID NO: 310907 - DNA, 4949 bp, Homo sapiens
atccctacggccgcatcgcggccgagccctcgcctcccgggccggtgtctccggctgctcgaaggcgtccggagccgcgcggaactcggggcggcccgggcgcgcggcgctgattggcagagagggcgccgccgtccaggaaacggctcgggtttcagtgggggcgtgacccaccgcgagaaggcgggggcggcggcggcggcgcgggcggcggctggaggagagcgcggtggagagccgagcgggcgggcggcgggtgcggagcgggcgagggagcgcgcgcggccgccacaaagctcgggcgccgcggggctgcatgcggcgtacctggcccggcgcggcgactgctctccgggctggcgggggccggccgcgagccccgggggccccgaggccgcagcttgcctgcgcgctctgagccttcgcaactcgcgagcaaagtttggtggaggcaacgccaagcctgagtcctttcttcctctcgttccccaaatccgagggcagcccgcgggcgtcatgcccgcgctcctccgcagcctggggtacgcgtgaagcccgggaggcttggcgccggcgaagacccaaggaccactcttctgcgtttggagttgctccccacaaccccgggctcgtcgctttctccatcccgacccacgcggggcgcggggacaacacaggtcgcggaggagcgttgccattcaagtgactgcagcagcagcggcagcgcctcggttcctgagcccaccgcaggctgaaggcattgcgcgtagtccatgcccgtagaggaagtgtgcagatgggattaacgtccacatggagatatggaagaggaccggggattggtaccgtaaccatggtcagctggggtcgtttcatctgcctggtcgtggtcaccatggcaaccttgtccctggcccggccctccttcagtttagttgaggataccacattagagccagaagagccaccaaccaaataccaaatctctcaaccagaagtgtacgtggctgcgccaggggagtcgctagaggtgcgctgcctgttgaaagatgccgccgtgatcagttggactaaggatggggtgcacttggggcccaacaataggacagtgcttattggggagtacttgcagataaagggcgccacgcctagagactccggcctctatgcttgtactgccagtaggactgtagacagtgaaacttggtacttcatggtgaatgtcacagatgccatctcatccggagatgatgaggatgacaccgatggtgcggaagattttgtcagtgagaacagtaacaacaagagagcaccatactggaccaacacagaaaagatggaaaagcggctccatgctgtgcctgcggccaacactgtcaagtttcgctgcccagccggggggaacccaatgccaaccatgcggtggctgaaaaacgggaaggagtttaagcaggagcatcgcattggaggctacaaggtacgaaaccagcactggagcctcattatggaaagtgtggtcccatctgacaagggaaattatacctgtgtggtggagaatgaatacgggtccatcaatcacacgtaccacctggatgttgtggagcgatcgcctcaccggcccatcctccaagccggactgccggcaaatgcctccacagtggtcggaggagacgtagagtttgtctgcaaggtttacagtgatgcccagccccacatccagtggatcaagcacgtggaaaagaacggcagtaaatacgggcccgacgggctgccctacctcaaggttctcaagcactcggggataaatagttccaatgcagaagtgctggctctgttcaatgtgaccgaggcggatgctggggaatatatatgtaaggtctccaattatatagggcaggccaaccagtctgcctggctcactgtcctgccaaaacagcaaggccgccggtgttaacaccacggacaaagagattgaggttctctatattcggaatgtaacttttgaggacgctggggaatatacgtgcttggcgggtaattctattgggatatcctttcactctgcatggttgacagttctgccagcgcctggaagagaaaaggagattacagcttccccagactacctggagatagccatttactgcataggggtcttcttaatcgcctgtatggtggtaacagtcatcctgtgccgaatgaagaacacgaccaagaagccagacttcagcagccagccggctgtgcacaagctgaccaaacgtatccccctgcggagacaggtaacagtttcggctgagtccagctcctccatgaactccaacaccccgctggtgaggataacaacacgcctctcttcaacggcagacacccccatgctggcaggggtctccgagtatgaacttccagaggacccaaaatgggagtttccaagagataagctgacactgggcaagcccctgggagaaggttgctttgggcaagtggtcatggcggaagcagtgggaattgacaaagacaagcccaaggaggcggtcaccgtggccgtgaagatgttgaaagatgatgccacagagaaagacctttctgatctggtgtcagagatggagatgatgaagatgattgggaaacacaagaatatcataaatcttcttggagcctgcacacaggatgggcctctctatgtcatagttgagtatgcctctaaaggcaacctccgagaatacctccgagcccggaggccacccgggatggagtactcctatgacattaaccgtgttcctgaggagcagatgaccttcaaggacttggtgtcatgcacctaccagctggccagaggcatggagtacttggcttcccaaaaatgtattcatcgagatttagcagccagaaatgttttggtaacagaaaacaatgtgatgaaaatagcagactttggactcgccagagatatcaacaatatagactattacaaaaagaccaccaatgggcggcttccagtcaagtggatggctccagaagccctgtttgatagagtatacactcatcagagtgatgtctggtccttcggggtgttaatgtgggagatcttcactttagggggctcgccctacccagggattcccgtggaggaactttttaagctgctgaaggaaggacacagaatggataagccagccaactgcaccaacgaactgtacatgatgatgagggactgttggcatgcagtgccctcccagagaccaacgttcaagcagttggtagaagacttggatcgaattctcactctcacaaccaatgaggaatacttggacctcagccaacctctcgaacagtattcacctagttaccctgacacaagaagttcttgttcttcaggagatgattctgttttttctccagaccccatgccttacgaaccatgccttcctcagtatccacacataaacggcagtgttaaaacatgaatgactgtgtctgcctgtccccaaacaggacagcactgggaacctagctacactgagcagggagaccatgcctcccagagcttgttgtctccacttgtatatatggatcagaggagtaaataattggaaaagtaatcagcatatgtgtaaagatttatacagttggccacaagccaccatgtaacccctctcacctgccgtgcgtactggctgtggaccagtaggactcaaggtggacgtgcgttctgccttccttgttaattttgtaataattggagaagatttatgtcagcacacacttacagagcacaaatgcagtatataggtgctggatgtatgtaaatatattcaaattatgtataaatatatattatatatttacaaggagttattttttgtattgattttaaatggatgtcccaatgcacctagaaaattggtctctctttttttaatagctatttgctaaatgctgttcttacacataatttcttaattttcaccgagcagaggtggaaaaatacttttgctttcagggaaaatggtataacgttaatttattaataaattggtaatatacaaaacaattaatcatttatagttttttttgtaatttaagtggcatttctatgcaggcagcacagcagactagttaatctattgcttggacttaactagttatcagatcctttgaaaagagaatatttacaatatatgactaatttggggaaaatgaagttttgatttatttgtgtttaaatgctgctgtcagacgattgttcttagacctcctaaatgccccatattaaaagaactcattcataggaaggtgtttcattttggtgtgcaaccctgtcattacgtcaacgcaacgtctaactggacttcccaagataaatggtaccagcgtcctcttaaaagatgccttaatccattccttgaggacagaccttagttgaaatgatagcagaatgtgcttctctctggcagctggccttctgcttctgagttgcacattaatcagattagcctgtattctcttcagtgaattttgataatggcttccagactctttggcgttggagacgcctgttaggatcttcaagtcccatcatagaaaattgaaacacagagttgttctgctgatagttttggggatacgtccatctttttaagggattgctttcatctaattctggcaggacctcaccaaaagatccagcctcatacctacatcagacaaaatatcgccgttgttccttctgtactaaagtattgtgttttgctttggaaacacccactcactttgcaatagccgtgcaagatgaatgcagattacactgatcttatgtgttacaaaattggagaaagtatttaataaaacctgttaatttttatactgacaataaaaatgtttctacagatattaatgttaacaagacaaaataaatgtcacgcaacttatttttttaaaaaaaaaaa

SEQ ID NO: 310908 - DNA, 4317 bp, Homo sapiens
atccctacggccgcatcgcggccgagccctcgcctcccgggccggtgtctccggctgctcgaaggcgtccggagccgcgcggaactcggggcggcccgggcgcgcggcgctgattggcagagagggcgccgccgtccaggaaacggctcgggtttcagtgggggcgtgacccaccgcgagaaggcgggggcggcggcggcggcgcgggcggcggctggaggagagcgcggtggagagccgagcgggcgggcggcgggtgcggagcgggcgagggagcgcgcgcggccgccacaaagctcgggcgccgcggggctgcatgcggcgtacctggcccggcgcggcgactgctctccgggctggcgggggccggccgcgagccccgggggccccgaggccgcagcttgcctgcgcgctctgagccttcgcaactcgcgagcaaagtttggtggaggcaacgccaagcctgagtcctttcttcctctcgttccccaaatccgagggcagcccgcgggcgtcatgcccgcgctcctccgcagcctggggtacgcgtgaagcccgggaggcttggcgccggcgaagacccaaggaccactcttctgcgtttggagttgctccccacaaccccgggctcgtcgctttctccatcccgacccacgcggggcgcggggacaacacaggtcgcggaggagcgttgccattcaagtgactgcagcagcagcggcagcgcctcggttcctgagcccaccgcaggctgaaggcattgcgcgtagtccatgcccgtagaggaagtgtgcagatgggattaacgtccacatggagatatggaagaggaccggggattggtaccgtaaccatggtcagctggggtcgtttcatctgcctggtcgtggtcaccatggcaaccttgtccctggcccggccctccttcagtttagttgaggataccacattagagccagaagagccaccaaccaaataccaaatctctcaaccagaagtgtacgtggctgcgccaggggagtcgctagaggtgcgctgcctgttgaaagatgccgccgtgatcagttggactaaggatggggtgcacttggggcccaacaataggacagtgcttattggggagtacttgcagataaagggcgccacgcctagagactccggcctctatgcttgtactgccagtaggactgtagacagtgaaacttggtacttcatggtgaatgtcacagatgccatctcatccggagatgatgaggatgacaccgatggtgcggaagattttgtcagtgagaacagtaacaacaagagagcaccatactggaccaacacagaaaagatggaaaagcggctccatgctgtgcctgcggccaacactgtcaagtttcgctgcccagccggggggaacccaatgccaaccatgcggtggctgaaaaacgggaaggagtttaagcaggagcatcgcattggaggctacaaggtacgaaaccagcactggagcctcattatggaaagtgtggtcccatctgacaagggaaattatacctgtgtggtggagaatgaatacgggtccatcaatcacacgtaccacctggatgttgtggagcgatcgcctcaccggcccatcctccaagccggactgccggcaaatgcctccacagtggtcggaggagacgtagagtttgtctgcaaggtttacagtgatgcccagccccacatccagtggatcaagcacgtggaaaagaacggcagtaaatacgctgacactgggcaagcccctgggagaaggttgctttgggcaagtggtcatggcggaagcagtgggaattgacaaagacaagcccaaggaggcggtcaccgtggccgtgaagatgttgaaagatgatgccacagagaaagacctttctgatctggtgtcagagatggagatgatgaagatgattgggaaacacaagaatatcataaatcttcttggagcctgcacacaggatgggcctctctatgtcatagttgagtatgcctctaaaggcaacctccgagaatacctccgagcccggaggccacccgggatggagtactcctatgacattaaccgtgttcctgaggagcagatgaccttcaaggacttggtgtcatgcacctaccagctggccagaggcatggagtacttggcttcccaaaaatgtattcatcgagatttagcagccagaaatgttttggtaacagaaaacaatgtgatgaaaatagcagactttggactcgccagagatatcaacaatatagactattacaaaaagaccaccaatgggcggcttccagtcaagtggatggctccagaagccctgtttgatagagtatacactcatcagagtgatgtctggtccttcggggtgttaatgtgggagatcttcactttagggggctcgccctacccagggattcccgtggaggaactttttaagctgctgaaggaaggacacagaatggataagccagccaactgcaccaacgaactgtacatgatgatgagggactgttggcatgcagtgccctcccagagaccaacgttcaagcagttggtagaagacttggatcgaattctcactctcacaaccaatgaggaatacttggacctcagccaacctctcgaacagtattcacctagttaccctgacacaagaagttcttgttcttcaggagatgattctgttttttctccagaccccatgccttacgaaccatgccttcctcagtatccacacataaacggcagtgttaaaacatgaatgactgtgtctgcctgtccccaaacaggacagcactgggaacctagctacactgagcagggagaccatgcctcccagagcttgttgtctccacttgtatatatggatcagaggagtaaataattggaaaagtaatcagcatatgtgtaaagatttatacagttgaaaacttgtaatcttccccaggaggagaagaaggtttctggagcagtggactgccacaagccaccatgtaacccctctcacctgccgtgcgtactggctgtggaccagtaggactcaaggtggacgtgcgttctgccttccttgttaattttgtaataattggagaagatttatgtcagcacacacttacagagcacaaatgcagtatataggtgctggatgtatgtaaatatattcaaattatgtataaatatatattatatatttacaaggagttattttttgtattgattttaaatggatgtcccaatgcacctagaaaattggtctctctttttttaatagctatttgctaaatgctgttcttacacataatttcttaattttcaccgagcagaggtggaaaaatacttttgctttcagggaaaatggtataacgttaatttattaataaattggtaatatacaaaacaattaatcatttatagttttttttgtaatttaagtggcatttctatgcaggcagcacagcagactagttaatctattgcttggacttaactagttatcagatcctttgaaaagagaatatttacaatatatgactaatttggggaaaatgaagttttgatttatttgtgtttaaatgctgctgtcagacgattgttcttagacctcctaaatgccccatattaaaagaactcattcataggaaggtgtttcattttggtgtgcaaccctgtcattacgtcaacgcaacgtctaactggacttcccaagataaatggtaccagcgtcctcttaaaagatgccttaatccattccttgaggacagaccttagttgaaatgatagcagaatgtgcttctctctggcagctggccttctgcttctgagttgcacattaatcagattagcctgtattctcttcagtgaattttgataatggcttccagactctttggcgttggagacgcctgttaggatcttcaagtcccatcatagaaaattgaaacacagagttgttctgctgatagttttggggatacgtccatctttttaagggattgctttcatctaattctggcaggacctcaccaaaagatccagcctcatacctacatcagacaaaatatcgccgttgttccttctgtactaaagtattgtgttttgctttggaaacacccactcactttgcaatagccgtgcaagatgaatgcagattacactgatcttatgtgttacaaaattggagaaagtatttaataaaacctgttaatttttatactgacaataaaaatgtttctacagatattaatgttaacaagacaaaataaatgtcacgcaacttatttttttaaaaaaaaaaa

SEQ ID NO: 310909 - DNA, 3924 bp, Homo sapiens
gaacccgcagcagtccgagtggtgtctgggagccaccaaccaaataccaaatctctcaaccagaagtgtacgtggctgcgccaggggagtcgctagaggtgcgctgcctgttgaaagatgccgccgtgatcagttggactaaggatggggtgcacttggggcccaacaataggacagtgcttattggggagtacttgcagataaagggcgccacgcctagagactccggcctctatgcttgtactgccagtaggactgtagacagtgaaacttggtacttcatggtgaatgtcacagatgccatctcatccggagatgatgaggatgacaccgatggtgcggaagattttgtcagtgagaacagtaacaacaagagagcaccatactggaccaacacagaaaagatggaaaagcggctccatgctgtgcctgcggccaacactgtcaagtttcgctgcccagccggggggaacccaatgccaaccatgcggtggctgaaaaacgggaaggagtttaagcaggagcatcgcattggaggctacaaggtacgaaaccagcactggagcctcattatggaaagtgtggtcccatctgacaagggaaattatacctgtgtggtggagaatgaatacgggtccatcaatcacacgtaccacctggatgttgtggagcgatcgcctcaccggcccatcctccaagccggactgccggcaaatgcctccacagtggtcggaggagacgtagagtttgtctgcaaggtttacagtgatgcccagccccacatccagtggatcaagcacgtggaaaagaacggcagtaaatacgggcccgacgggctgccctacctcaaggttctcaagcactcggggataaatagttccaatgcagaagtgctggctctgttcaatgtgaccgaggcggatgctggggaatatatatgtaaggtctccaattatatagggcaggccaaccagtctgcctggctcactgtcctgccaaaacagcaagcgcctggaagagaaaaggagattacagcttccccagactacctggagatagccatttactgcataggggtcttcttaatcgcctgtatggtggtaacagtcatcctgtgccgaatgaagaacacgaccaagaagccagacttcagcagccagccggctgtgcacaagctgaccaaacgtatccccctgcggagacaggtaacagtttcggctgagtccagctcctccatgaactccaacaccccgctggtgaggataacaacacgcctctcttcaacggcagacacccccatgctggcaggggtctccgagtatgaacttccagaggacccaaaatgggagtttccaagagataagctgacactgggcaagcccctgggagaaggttgctttgggcaagtggtcatggcggaagcagtgggaattgacaaagacaagcccaaggaggcggtcaccgtggccgtgaagatgttgaaagatgatgccacagagaaagacctttctgatctggtgtcagagatggagatgatgaagatgattgggaaacacaagaatatcataaatcttcttggagcctgcacacaggatgggcctctctatgtcatagttgagtatgcctctaaaggcaacctccgagaatacctccgagcccggaggccacccgggatggagtactcctatgacattaaccgtgttcctgaggagcagatgaccttcaaggacttggtgtcatgcacctaccagctggccagaggcatggagtacttggcttcccaaaaatgtattcatcgagatttagcagccagaaatgttttggtaacagaaaacaatgtgatgaaaatagcagactttggactcgccagagatatcaacaatatagactattacaaaaagaccaccaatgggcggcttccagtcaagtggatggctccagaagccctgtttgatagagtatacactcatcagagtgatgtctggtccttcggggtgttaatgtgggagatcttcactttagggggctcgccctacccagggattcccgtggaggaactttttaagctgctgaaggaaggacacagaatggataagccagccaactgcaccaacgaactgtacatgatgatgagggactgttggcatgcagtgccctcccagagaccaacgttcaagcagttggtagaagacttggatcgaattctcactctcacaaccaatgaggaatacttggacctcagccaacctctcgaacagtattcacctagttaccctgacacaagaagttcttgttcttcaggagatgattctgttttttctccagaccccatgccttacgaaccatgccttcctcagtatccacacataaacggcagtgttaaaacatgaatgactgtgtctgcctgtccccaaacaggacagcactgggaacctagctacactgagcagggagaccatgcctcccagagcttgttgtctccacttgtatatatggatcagaggagtaaataattggaaaagtaatcagcatatgtgtaaagatttatacagttgaaaacttgtaatcttccccaggaggagaagaaggtttctggagcagtggactgccacaagccaccatgtaacccctctcacctgccgtgcgtactggctgtggaccagtaggactcaaggtggacgtgcgttctgccttccttgttaattttgtaataattggagaagatttatgtcagcacacacttacagagcacaaatgcagtatataggtgctggatgtatgtaaatatattcaaattatgtataaatatatattatatatttacaaggagttattttttgtattgattttaaatggatgtcccaatgcacctagaaaattggtctctctttttttaatagctatttgctaaatgctgttcttacacataatttcttaattttcaccgagcagaggtggaaaaatacttttgctttcagggaaaatggtataacgttaatttattaataaattggtaatatacaaaacaattaatcatttatagttttttttgtaatttaagtggcatttctatgcaggcagcacagcagactagttaatctattgcttggacttaactagttatcagatcctttgaaaagagaatatttacaatatatgactaatttggggaaaatgaagttttgatttatttgtgtttaaatgctgctgtcagacgattgttcttagacctcctaaatgccccatattaaaagaactcattcataggaaggtgtttcattttggtgtgcaaccctgtcattacgtcaacgcaacgtctaactggacttcccaagataaatggtaccagcgtcctcttaaaagatgccttaatccattccttgaggacagaccttagttgaaatgatagcagaatgtgcttctctctggcagctggccttctgcttctgagttgcacattaatcagattagcctgtattctcttcagtgaattttgataatggcttccagactctttggcgttggagacgcctgttaggatcttcaagtcccatcatagaaaattgaaacacagagttgttctgctgatagttttggggatacgtccatctttttaagggattgctttcatctaattctggcaggacctcaccaaaagatccagcctcatacctacatcagacaaaatatcgccgttgttccttctgtactaaagtattgtgttttgctttggaaacacccactcactttgcaatagccgtgcaagatgaatgcagattacactgatcttatgtgttacaaaattggagaaagtatttaataaaacctgttaatttttatactgacaataaaaatgtttctacagatattaatgttaacaagacaaaataaatgtcacgcaacttatttttttaaaaaaaaaaa

SEQ ID NO: 310910 - DNA, 3496 bp, Homo sapiens
atccctacggccgcatcgcggccgagccctcgcctcccgggccggtgtctccggctgctcgaaggcgtccggagccgcgcggaactcggggcggcccgggcgcgcggcgctgattggcagagagggcgccgccgtccaggaaacggctcgggtttcagtgggggcgtgacccaccgcgagaaggcgggggcggcggcggcggcgcgggcggcggctggaggagagcgcggtggagagccgagcgggcgggcggcgggtgcggagcgggcgagggagcgcgcgcggccgccacaaagctcgggcgccgcggggctgcatgcggcgtacctggcccggcgcggcgactgctctccgggctggcgggggccggccgcgagccccgggggccccgaggccgcagcttgcctgcgcgctctgagccttcgcaactcgcgagcaaagtttggtggaggcaacgccaagctgctggctctgttcaatgtgaccgaggcggatgctggggaatatatatgtaaggtctccaattatatagggcaggccaaccagtctgcctggctcactgtcctgccaaaacagcaagcgcctggaagagaaaaggagattacagcttccccagactacctggagatagccatttactgcataggggtcttcttaatcgcctgtatggtggtaacagtcatcctgtgccgaatgaagaacacgaccaagaagccagacttcagcagccagccggctgtgcacaagctgaccaaacgtatccccctgcggagacaggtaacagtttcggctgagtccagctcctccatgaactccaacaccccgctggtgaggataacaacacgcctctcttcaacggcagacacccccatgctggcaggggtctccgagtatgaacttccagaggacccaaaatgggagtttccaagagataagctgacactgggcaagcccctgggagaaggttgctttgggcaagtggtcatggcggaagcagtgggaattgacaaagacaagcccaaggaggcggtcaccgtggccgtgaagatgttgaaagatgatgccacagagaaagacctttctgatctggtgtcagagatggagatgatgaagatgattgggaaacacaagaatatcataaatcttcttggagcctgcacacaggatgggcctctctatgtcatagttgagtatgcctctaaaggcaacctccgagaatacctccgagcccggaggccacccgggatggagtactcctatgacattaaccgtgttcctgaggagcagatgaccttcaaggacttggtgtcatgcacctaccagctggccagaggcatggagtacttggcttcccaaaaatgtattcatcgagatttagcagccagaaatgttttggtaacagaaaacaatgtgatgaaaatagcagactttggactcgccagagatatcaacaatatagactattacaaaaagaccaccaatgggcggcttccagtcaagtggatggctccagaagccctgtttgatagagtatacactcatcagagtgatgtctggtccttcggggtgttaatgtgggagatcttcactttagggggctcgccctacccagggattcccgtggaggaactttttaagctgctgaaggaaggacacagaatggataagccagccaactgcaccaacgaactgtacatgatgatgagggactgttggcatgcagtgccctcccagagaccaacgttcaagcagttggtagaagacttggatcgaattctcactctcacaaccaatgaggaatacttggacctcagccaacctctcgaacagtattcacctagttaccctgacacaagaagttcttgttcttcaggagatgattctgttttttctccagaccccatgccttacgaaccatgccttcctcagtatccacacataaacggcagtgttaaaacatgaatgactgtgtctgcctgtccccaaacaggacagcactgggaacctagctacactgagcagggagaccatgcctcccagagcttgttgtctccacttgtatatatggatcagaggagtaaataattggaaaagtaatcagcatatgtgtaaagatttatacagttgaaaacttgtaatcttccccaggaggagaagaaggtttctggagcagtggactgccacaagccaccatgtaacccctctcacctgccgtgcgtactggctgtggaccagtaggactcaaggtggacgtgcgttctgccttccttgttaattttgtaataattggagaagatttatgtcagcacacacttacagagcacaaatgcagtatataggtgctggatgtatgtaaatatattcaaattatgtataaatatatattatatatttacaaggagttattttttgtattgattttaaatggatgtcccaatgcacctagaaaattggtctctctttttttaatagctatttgctaaatgctgttcttacacataatttcttaattttcaccgagcagaggtggaaaaatacttttgctttcagggaaaatggtataacgttaatttattaataaattggtaatatacaaaacaattaatcatttatagttttttttgtaatttaagtggcatttctatgcaggcagcacagcagactagttaatctattgcttggacttaactagttatcagatcctttgaaaagagaatatttacaatatatgactaatttggggaaaatgaagttttgatttatttgtgtttaaatgctgctgtcagacgattgttcttagacctcctaaatgccccatattaaaagaactcattcataggaaggtgtttcattttggtgtgcaaccctgtcattacgtcaacgcaacgtctaactggacttcccaagataaatggtaccagcgtcctcttaaaagatgccttaatccattccttgaggacagaccttagttgaaatgatagcagaatgtgcttctctctggcagctggccttctgcttctgagttgcacattaatcagattagcctgtattctcttcagtgaattttgataatggcttccagactctttggcgttggagacgcctgttaggatcttcaagtcccatcatagaaaattgaaacacagagttgttctgctgatagttttggggatacgtccatctttttaagggattgctttcatctaattctggcaggacctcaccaaaagatccagcctcatacctacatcagacaaaatatcgccgttgttccttctgtactaaagtattgtgttttgctttggaaacacccactcactttgcaatagccgtgcaagatgaatgcagattacactgatcttatgtgttacaaaattggagaaagtatttaataaaacctgttaatttttatactgacaataaaaatgtttctacagatattaatgttaacaagacaaaataaatgtcacgcaacttatttttttaaaaaaaaaaa

SEQ ID NO: 310911 - DNA, 2528 bp, Homo sapiens
cccaagtcggaggaagtgtcaccctggggtgatccagagggctttttgcagcaccagcactggatgccttggggagcagaggacacttctgaatctcgaaccttcaaaactttgaaacttaaccgatattttcctgaagtttcctttaacagtgcattatggatttaacatacatgagtatgtctaagccttttttgaacctgtttacattttcaactcggagagcttctgagagtaatcagttacatctgttaaattacccactgaatgaagaagtattccccttcaattatccccgaaactacaatagtaaaatgtaattcagaaaataaatattcatagtctcaactacttaaagggggtctggggacccacaacatgttaccggttttcattttgctggggctcgcatttgaagcaagggctctagtgaggaggtggtgtagactcagcgggttatttaggtccgtgtgaagccgagttgcctgcccagcacctatagctcaactaggttttattggtctctacctgtcaatagttgatttatgatggattccaagagaaaagctaaggacagcctggggtacatcagacgtggtctcagggaggtcttcgtggaagtcaggtgggctgggtctctgttcaccttctaggggtctcctgtcctgtcccacgtccaatacccacatctcaagagtttgtgtttgaaataaaactcttctcttcccttctttcaggaatacttggacctcagtcagcctctcgaaccgtattcaccttgttatcctgacccaagatgaaataaaacgtctctcttcccttctttcaggaatacttggacctcagccaacctctcgaacagtattcacctagttaccctgacacaagaagttcttgttcttcaggagatgattctgttttttctccagaccccatgccttacgaaccatgccttcctcagtatccacacataaacggcagtgttaaaacatgaatgactgtgtctgcctgtccccaaacaggacagcactgggaacctagctacactgagcagggagaccatgcctcccagagcttgttgtctccacttgtatatatggatcagaggagtaaataattggaaaagtaatcagcatatgtgtaaagatttatacagttgaaaacttgtaatcttccccaggaggagaagaaggtttctggagcagtggactgccacaagccaccatgtaacccctctcacctgccgtgcgtactggctgtggaccagtaggactcaaggtggacgtgcgttctgccttccttgttaattttgtaataattggagaagatttatgtcagcacacacttacagagcacaaatgcagtatataggtgctggatgtatgtaaatatattcaaattatgtataaatatatattatatatttacaaggagttattttttgtattgattttaaatggatgtcccaatgcacctagaaaattggtctctctttttttaatagctatttgctaaatgctgttcttacacataatttcttaattttcaccgagcagaggtggaaaaatacttttgctttcagggaaaatggtataacgttaatttattaataaattggtaatatacaaaacaattaatcatttatagttttttttgtaatttaagtggcatttctatgcaggcagcacagcagactagttaatctattgcttggacttaactagttatcagatcctttgaaaagagaatatttacaatatatgactaatttggggaaaatgaagttttgatttatttgtgtttaaatgctgctgtcagacgattgttcttagacctcctaaatgccccatattaaaagaactcattcataggaaggtgtttcattttggtgtgcaaccctgtcattacgtcaacgcaacgtctaactggacttcccaagataaatggtaccagcgtcctcttaaaagatgccttaatccattccttgaggacagaccttagttgaaatgatagcagaatgtgcttctctctggcagctggccttctgcttctgagttgcacattaatcagattagcctgtattctcttcagtgaattttgataatggcttccagactctttggcgttggagacgcctgttaggatcttcaagtcccatcatagaaaattgaaacacagagttgttctgctgatagttttggggatacgtccatctttttaagggattgctttcatctaattctggcaggacctcaccaaaagatccagcctcatacctacatcagacaaaatatcgccgttgttccttctgtactaaagtattgtgttttgctttggaaacacccactcactttgcaatagccgtgcaagatgaatgcagattacactgatcttatgtgttacaaaattggagaaagtatttaataaaacctgttaatttttatactgacaataaaaatgtttctacagatattaatgttaacaagacaaaataaatgtcacgcaacttatttttttaaaaaaaaaaa

SEQ ID NO: 310912 - DNA, 2474 bp, Homo sapiens
cccaagtcggaggaagtgtcaccctggggtgatccagagggctttttgcagcaccagcactggatgccttggggagcagaggacacttctgaatctcgaaccttcaaaactttgaaacttaaccgatattttcctgaagtttcctttaacagtgcattatggatttaacatacatgagtatgtctaagccttttttgaacctgtttacattttcaactcggagagcttctgagagtaatcagttacatctgttaaattacccactgaatgaagaagtattccccttcaattatccccgaaactacaatagtaaaatgtaattcagtgttaccggttttcattttgctggggctcgcatttgaagcaagggctctagtgaggaggtggtgtagactcagcgggttatttaggtccgtgtgaagccgagttgcctgcccagcacctatagctcaactaggttttattggtctctacctgtcaatagttgatttatgatggattccaagagaaaagctaaggacagcctggggtacatcagacgtggtctcagggaggtcttcgtggaagtcaggtgggctgggtctctgttcaccttctaggggtctcctgtcctgtcccacgtccaatacccacatctcaagagtttgtgtttgaaataaaactcttctcttcccttctttcaggaatacttggacctcagtcagcctctcgaaccgtattcaccttgttatcctgacccaagatgaaataaaacgtctctcttcccttctttcaggaatacttggacctcagccaacctctcgaacagtattcacctagttaccctgacacaagaagttcttgttcttcaggagatgattctgttttttctccagaccccatgccttacgaaccatgccttcctcagtatccacacataaacggcagtgttaaaacatgaatgactgtgtctgcctgtccccaaacaggacagcactgggaacctagctacactgagcagggagaccatgcctcccagagcttgttgtctccacttgtatatatggatcagaggagtaaataattggaaaagtaatcagcatatgtgtaaagatttatacagttgaaaacttgtaatcttccccaggaggagaagaaggtttctggagcagtggactgccacaagccaccatgtaacccctctcacctgccgtgcgtactggctgtggaccagtaggactcaaggtggacgtgcgttctgccttccttgttaattttgtaataattggagaagatttatgtcagcacacacttacagagcacaaatgcagtatataggtgctggatgtatgtaaatatattcaaattatgtataaatatatattatatatttacaaggagttattttttgtattgattttaaatggatgtcccaatgcacctagaaaattggtctctctttttttaatagctatttgctaaatgctgttcttacacataatttcttaattttcaccgagcagaggtggaaaaatacttttgctttcagggaaaatggtataacgttaatttattaataaattggtaatatacaaaacaattaatcatttatagttttttttgtaatttaagtggcatttctatgcaggcagcacagcagactagttaatctattgcttggacttaactagttatcagatcctttgaaaagagaatatttacaatatatgactaatttggggaaaatgaagttttgatttatttgtgtttaaatgctgctgtcagacgattgttcttagacctcctaaatgccccatattaaaagaactcattcataggaaggtgtttcattttggtgtgcaaccctgtcattacgtcaacgcaacgtctaactggacttcccaagataaatggtaccagcgtcctcttaaaagatgccttaatccattccttgaggacagaccttagttgaaatgatagcagaatgtgcttctctctggcagctggccttctgcttctgagttgcacattaatcagattagcctgtattctcttcagtgaattttgataatggcttccagactctttggcgttggagacgcctgttaggatcttcaagtcccatcatagaaaattgaaacacagagttgttctgctgatagttttggggatacgtccatctttttaagggattgctttcatctaattctggcaggacctcaccaaaagatccagcctcatacctacatcagacaaaatatcgccgttgttccttctgtactaaagtattgtgttttgctttggaaacacccactcactttgcaatagccgtgcaagatgaatgcagattacactgatcttatgtgttacaaaattggagaaagtatttaataaaacctgttaatttttatactgacaataaaaatgtttctacagatattaatgttaacaagacaaaataaatgtcacgcaacttatttttttaaaaaaaaaaa

SEQ ID NO: 310913 - DNA, 2891 bp, Homo sapiens
atccctacggccgcatcgcggccgagccctcgcctcccgggccggtgtctccggctgctcgaaggcgtccggagccgcgcggaactcggggcggcccgggcgcgcggcgctgattggcagagagggcgccgccgtccaggaaacggctcgggtttcagtgggggcgtgacccaccgcgagaaggcgggggcggcggcggcggcgcgggcggcggctggaggagagcgcggtggagagccgagcgggcgggcggcgggtgcggagcgggcgagggagcgcgcgcggccgccacaaagctcgggcgccgcggggctgcatgcggcgtacctggcccggcgcggcgactgctctccgggctggcgggggccggccgcgagccccgggggccccgaggccgcagcttgcctgcgcgctctgagccttcgcaactcgcgagcaaagtttggtggaggcaacgccaagcctgagtcctttcttcctctcgttccccaaatccgagggcagcccgcgggcgtcatgcccgcgctcctccgcagcctggggtacgcgtgaagcccgggaggcttggcgccggcgaagacccaaggaccactcttctgcgtttggagttgctccccacaaccccgggctcgtcgctttctccatcccgacccacgcggggcgcggggacaacacaggtcgcggaggagcgttgccattcaagtgactgcagcagcagcggcagcgcctcggttcctgagcccaccgcaggctgaaggcattgcgcgtagtccatgcccgtagaggaagtgtgcagatgggattaacgtccacatggagatatggaagaggaccggggattggtaccgtaaccatggtcagctggggtcgtttcatctgcctggtcgtggtcaccatggcaaccttgtccctggcccggccctccttcagtttagttgaggataccacattagagccagaagagccaccaaccaaataccaaatctctcaaccagaagtgtacgtggctgcgccaggggagtcgctagaggtgcgctgcctgttgaaagatgccgccgtgatcagttggactaaggatggggtgcacttggggcccaacaataggacagtgcttattggggagtacttgcagataaagggcgccacgcctagagactccggcctctatgcttgtactgccagtaggactgtagacagtgaaacttggtacttcatggtgaatgtcacagatgccatctcatccggagatgatgaggatgacaccgatggtgcggaagattttgtcagtgagaacagtaacaacaagagagcaccatactggaccaacacagaaaagatggaaaagcggctccatgctgtgcctgcggccaacactgtcaagtttcgctgcccagccggggggaacccaatgccaaccatgcggtggctgaaaaacgggaaggagtttaagcaggagcatcgcattggaggctacaaggtacgaaaccagcactggagcctcattatggaaagtgtggtcccatctgacaagggaaattatacctgtgtggtggagaatgaatacgggtccatcaatcacacgtaccacctggatgttgtggagcgatcgcctcaccggcccatcctccaagccggactgccggcaaatgcctccacagtggtcggaggagacgtagagtttgtctgcaaggtttacagtgatgcccagccccacatccagtggatcaagcacgtggaaaagaacggcagtaaatacgggcccgacgggctgccctacctcaaggttctcaagcactcggggataaatagttccaatgcagaagtgctggctctgttcaatgtgaccgaggcggatgctggggaatatatatgtaaggtctccaattatatagggcaggccaaccagtctgcctggctcactgtcctgccaaaacagcaaggccgccggtgttaacaccacggacaaagagattgaggttctctatattcggaatgtaacttttgaggacgctggggaatatacgtgcttggcgggtaattctattgggatatcctttcactctgcatggttgacagttctgccagcgcctggaagagaaaaggagattacagcttccccagactacctggagatagccatttactgcataggggtcttcttaatcgcctgtatggtggtaacagtcatcctgtgccgaatgaagaacacgaccaagaagccagacttcagcagccagccggctgtgcacaagctgaccaaacgtatccccctgcggagacaggtaacagtttcggctgagtccagctcctccatgaactccaacaccccgctggtgaggataacaacacgcctctcttcaacggcagacacccccatgctggcaggggtctccgagtatgaacttccagaggacccaaaatgggagtttccaagagataagctgacactgggcaagcccctgggagaaggttgctttgggcaagtggtcatggcggaagcagtgggaattgacaaagacaagcccaaggaggcggtcaccgtggccgtgaagatgttgaaagatgatgccacagagaaagacctttctgatctggtgtcagagatggagatgatgaagatgattgggaaacacaagaatatcataaatcttcttggagcctgcacacaggatgggcctctctatgtcatagttgagtatgcctctaaaggcaacctccgagaatacctccgagcccggaggccacccgggatggagtactcctatgacattaaccgtgttcctgaggagcagatgaccttcaaggacttggtgtcatgcacctaccagcatgggggtgtctgccgttgaagagaggcgtgttgttatcctcaccagagaggggcggagcag

SEQ ID NO: 310914 - DNA, 2610 bp, Homo sapiens
atccctacggccgcatcgcggccgagccctcgcctcccgggccggtgtctccggctgctcgaaggcgtccggagccgcgcggaactcggggcggcccgggcgcgcggcgctgattggcagagagggcgccgccgtccaggaaacggctcgggtttcagtgggggcgtgacccaccgcgagaaggcgggggcggcggcggcggcgcgggcggcggctggaggagagcgcggtggagagccgagcgggcgggcggcgggtgcggagcgggcgagggagcgcgcgcggccgccacaaagctcgggcgccgcggggctgcatgcggcgtacctggcccggcgcggcgactgctctccgggctggcgggggccggccgcgagccccgggggccccgaggccgcagcttgcctgcgcgctctgagccttcgcaactcgcgagcaaagtttggtggaggcaacgccaagcctgagtcctttcttcctctcgttccccaaatccgagggcagcccgcgggcgtcatgcccgcgctcctccgcagcctggggtacgcgtgaagcccgggaggcttggcgccggcgaagacccaaggaccactcttctgcgtttggagttgctccccacaaccccgggctcgtcgctttctccatcccgacccacgcggggcgcggggacaacacaggtcgcggaggagcgttgccattcaagtgactgcagcagcagcggcagcgcctcggttcctgagcccaccgcaggctgaaggcattgcgcgtagtccatgcccgtagaggaagtgtgcagatgggattaacgtccacatggagatatggaagaggaccggggattggtaccgtaaccatggtcagctggggtcgtttcatctgcctggtcgtggtcaccatggcaaccttgtccctggcccggccctccttcagtttagttgaggataccacattagagccagaagagccaccaaccaaataccaaatctctcaaccagaagtgtacgtggctgcgccaggggagtcgctagaggtgcgctgcctgttgaaagatgccgccgtgatcagttggactaaggatggggtgcacttggggcccaacaataggacagtgcttattggggagtacttgcagataaagggcgccacgcctagagactccggcctctatgcttgtactgccagtaggactgtagacagtgaaacttggtacttcatggtgaatgtcacagatgccatctcatccggagatgatgaggatgacaccgatggtgcggaagattttgtcagtgagaacagtaacaacaagagagcaccatactggaccaacacagaaaagatggaaaagcggctccatgctgtgcctgcggccaacactgtcaagtttcgctgcccagccggggggaacccaatgccaaccatgcggtggctgaaaaacgggaaggagtttaagcaggagcatcgcattggaggctacaaggtacgaaaccagcactggagcctcattatggaaagtgtggtcccatctgacaagggaaattatacctgtgtggtggagaatgaatacgggtccatcaatcacacgtaccacctggatgttgtggagcgatcgcctcaccggcccatcctccaagccggactgccggcaaatgcctccacagtggtcggaggagacgtagagtttgtctgcaaggtttacagtgatgcccagccccacatccagtggatcaagcacgtggaaaagaacggcagtaaatacgggcccgacgggctgccctacctcaaggttctcaagcactcggggataaatagttccaatgcagaagtgctggctctgttcaatgtgaccgaggcggatgctggggaatatatatgtaaggtctccaattatatagggcaggccaaccagtctgcctggctcactgtcctgccaaaacagcaaggccgccggtgttaacaccacggacaaagagattgaggttctctatattcggaatgtaacttttgaggacgctggggaatatacgtgcttggcgggtaattctattgggatatcctttcactctgcatggttgacagttctgccagcgcctggaagagaaaaggagattacagcttccccagactacctggagatagccatttactgcataggggtcttcttaatcgcctgtatggtggtaacagtcatcctgtgccgaatgaagaacacgaccaagaagccagacttcagcagccagccggctgtgcacaagctgaccaaacgtatccccctgcggagacaggtaacagtttcggctgagtccagctcctccatgaactccaacaccccgctggtgaggataacaacacgcctctcttcaacggcagacaaaatatcgccgttgttccttctgtactaaagtattgtgttttgctttggaaacacccactcactttgcaatagccgtgcaagatgaatgcagattacactgatcttatgtgttacaaaattggagaaagtatttaataaaacctgttaatttttatactgacaataaaaatgtttctacagatattaatgttaacaagacaaaataaatgtcacgcaacttatttttttaaaaaaaaaaa

SEQ ID NO: 310915 - DNA, 1494 bp, Homo sapiens
atccctacggccgcatcgcggccgagccctcgcctcccgggccggtgtctccggctgctcgaaggcgtccggagccgcgcggaactcggggcggcccgggcgcgcggcgctgattggcagagagggcgccgccgtccaggaaacggctcgggtttcagtgggggcgtgacccaccgcgagaaggcgggggcggcggcggcggcgcgggcggcggctggaggagagcgcggtggagagccgagcgggcgggcggcgggtgcggagcgggcgagggagcgcgcgcggccgccacaaagctcgggcgccgcggggctgcatgcggcgtacctggcccggcgcggcgactgctctccgggctggcgggggccggccgcgagccccgggggccccgaggccgcagcttgcctgcgcgctctgagccttcgcaactcgcgagcaaagtttggtggaggcaacgccaagcctgagtcctttcttcctctcgttccccaaatccgagggcagcccgcgggcgtcatgcccgcgctcctccgcagcctggggtacgcgtgaagcccgggaggcttggcgccggcgaagacccaaggaccactcttctgcgtttggagttgctccccacaaccccgggctcgtcgctttctccatcccgacccacgcggggcgcggggacaacacaggtcgcggaggagcgttgccattcaagtgactgcagcagcagcggcagcgcctcggttcctgagcccaccgcaggctgaaggcattgcgcgtagtccatgcccgtagaggaagtgtgcagatgggattaacgtccacatggagatatggaagaggaccggggattggtaccgtaaccatggtcagctggggtcgtttcatctgcctggtcgtggtcaccatggcaaccttgtccctggcccggccctccttcagtttagttgaggataccacattagagccagaagagccaccaaccaaataccaaatctctcaaccagaagtgtacgtggctgcgccaggggagtcgctagaggtgcgctgcctgttgaaagatgccgccgtgatcagttggactaaggatggggtgcacttggggcccaacaataggacagtgcttattggggagtacttgcagataaagggcgccacgcctagagactccggcctctatgcttgtactgccagtaggactgtagacagtgaaacttggtacttcatggtgaatgtcacagatgccatctcatccggagatgatgaggatgacaccgatggtgcggaagattttgtcagtgagaacagtaacaacaagagtaagtaactgcccggctccgatggtccccgagagaggagcatggagggaagttctgcctgtcacctgtcttcttgtcgactcttctgcgccatgctgtgtcccgcggcccttgcctttccccgctgtgtctactttcctgactttcaaacctgagaataaaccagtgttgctgcacaacttctcta

SEQ ID NO: 310916 - DNA, 2253 bp, Homo sapiens
atccctacggccgcatcgcggccgagccctcgcctcccgggccggtgtctccggctgctcgaaggcgtccggagccgcgcggaactcggggcggcccgggcgcgcggcgctgattggcagagagggcgccgccgtccaggaaacggctcgggtttcagtgggggcgtgacccaccgcgagaaggcgggggcggcggcggcggcgcgggcggcggctggaggagagcgcggtggagagccgagcgggcgggcggcgggtgcggagcgggcgagggagcgcgcgcggccgccacaaagctcgggcgccgcggggctgcatgcggcgtacctggcccggcgcggcgactgctctccgggctggcgggggccggccgcgagccccgggggccccgaggccgcagcttgcctgcgcgctctgagccttcgcaactcgcgagcaaagtttggtggaggcaacgccaagcctgagtcctttcttcctctcgttccccaaatccgagggcagcccgcgggcgtcatgcccgcgctcctccgcagcctggggtacgcgtgaagcccgggaggcttggcgccggcgaagacccaaggaccactcttctgcgtttggagttgctccccacaaccccgggctcgtcgctttctccatcccgacccacgcggggcgcggggacaacacaggtcgcggaggagcgttgccattcaagtgactgcagcagcagcggcagcgcctcggttcctgagcccaccgcaggctgaaggcattgcgcgtagtccatgcccgtagaggaagtgtgcagatgggattaacgtccacatggagatatggaagaggaccggggattggtaccgtaaccatggtcagctggggtcgtttcatctgcctggtcgtggtcaccatggcaaccttgtccctggcccggccctccttcagtttagttgaggataccacattagagccagaagagccaccaaccaaataccaaatctctcaaccagaagtgtacgtggctgcgccaggggagtcgctagaggtgcgctgcctgttgaaagatgccgccgtgatcagttggactaaggatggggtgcacttggggcccaacaataggacagtgcttattggggagtacttgcagataaagggcgccacgcctagagactccggcctctatgcttgtactgccagtaggactgtagacagtgaaacttggtacttcatggtgaatgtcacagatgccatctcatccggagatgatgaggatgacaccgatggtgcggaagattttgtcagtgagaacagtaacaacaagagagcaccatactggaccaacacagaaaagatggaaaagcggctccatgctgtgcctgcggccaacactgtcaagtttcgctgcccagccggggggaacccaatgccaaccatgcggtggctgaaaaacgggaaggagtttaagcaggagcatcgcattggaggctacaaggtacgaaaccagcactggagcctcattatggaaagtgtggtcccatctgacaagggaaattatacctgtgtggtggagaatgaatacgggtccatcaatcacacgtaccacctggatgttgtgggcagccagggtttatgagctttgcatgatcctcatggttcccaagcgtcatctgtgtaaagtggacgtggtatgaaatgtctgacattttggaagctgagattactctgaaaatgttaattgggcaggtgaaaagggtacagatgtgctgtagcagacctttggttttaaaagagaagcatcatttccccaacagggcaactgtagaaggccagctgaagagtaaaggaaaaggtctgaggactgagcctgtggctggctggaaaaaggtgaatgttgagggcccttcacttccatcacaagaaagtcattagacggtaccaattcagtgtctgttcctggcatctatttcctctgtgcaaagggaaccatgtatatgagcttataaatacatttttgtcagagtgcacagataagtaggccattttaattaaacattgaagaccacctcgcctgttgtcttggaaattcaagtttcttcccaggttttgcctgtgatgatggggctttgttgtaactaatgaagaaaggaggtttctgtgtcttggaggattgctaacatatggaactctacccaagacatacttcattgttgcaggatggcaggttaagatcccttccatgtaggggccatcttttctctttcctgtcat

SEQ ID NO: 310917 - DNA, 1227 bp, Homo sapiens
atccctacggccgcatcgcggccgagccctcgcctcccgggccggtgtctccggctgctcgaaggcgtccggagccgcgcggaactcggggcggcccgggcgcgcggcgctgattggcagagagggcgccgccgtccaggaaacggctcgggtttcagtgggggcgtgacccaccgcgagaaggcgggggcggcggcggcggcgcgggcggcggctggaggagagcgcggtggagagccgagcgggcgggcggcgggtgcggagcgggcgagggagcgcgcgcggccgccacaaagctcgggcgccgcggggctgcatgcggcgtacctggcccggcgcggcgactgctctccgggctggcgggggccggccgcgagccccgggggccccgaggccgcagcttgcctgcgcgctctgagccttcgcaactcgcgagcaaagtttggtggaggcaacgccaagcctgagtcctttcttcctctcgttccccaaatccgagggcagcccgcgggcgtcatgcccgcgctcctccgcagcctggggtacgcgtgaagcccgggaggcttggcgccggcgaagacccaaggaccactcttctgcgtttggagttgctccccacaaccccgggctcgtcgctttctccatcccgacccacgcggggcgcggggacaacacaggtcgcggaggagcgttgccattcaagtgactgcagcagcagcggcagcgcctcggttcctgagcccaccgcaggctgaaggcattgcgcgtagtccatgcccgtagaggaagtgtgcagatgggattaacgtccacatggagatatggaagaggaccggggattggtaccgtaaccatggtcagctggggtcgtttcatctgcctggtcgtggtcaccatggcaaccttgtccctggcccggccctccttcagtttagttgaggataccacattagagccagaagatgccatctcatccggagatgatgaggatgacaccgatggtgcggaagattttgtcagtgagaacagtaacaacaagagtaagtaactgcccggctccgatggtccccgagagaggagcatggagggaagttctgcctgtcacctgtcttcttgtcgactcttctgcgccatgctgtgtcccgcggcccttgcctttccccgctgtgtctactttcctgactttcaaacctgagaataaaccagtgttgctgcacaacttctcta

SEQ ID NO: 310918 - DNA, 679 bp, Homo sapiens
gtcttaacgttttttctttgagccattctaaattacaaatatttaattggctcaagatcaaaagctcttctctggcacttaggaaagctgaccaccgcactagcaaggataccttccctaaagaaaataaaccgagaataccaatgtgaaatttaatagccgttccaccagtaattgacattctctaaaacgtcactaggaaaatactcaggcgcgtgtgtaccctaagtctcattagttccatatgataagcactccatgctttagtaagccgctgaaagatttttatatttagttctggaatttccctcactacaccccatcaccagatgctatgtgctaatcccctatttacacatttaggctgacactgggcaagcccctgggagaaggttgctttgggcaagtggtcatggcggaagcagtgggaattgacaaagacaagcccaaggaggcggtcaccgtggccgtgaagatgttgaaaggtgagcggggaggcgggaggctcggggaggggctgggtggagagtcttatcaagaaagttccttttgtggcatgtgaactctatcatggcacggggtcagagagcacatagttgacctaggggttgagaagttttcggtataaatcagcatctcggacagactatttatcttgagctgtgtgtacttataaaga

SEQ ID NO: 310919 - DNA, 500 bp, Homo sapiens
gaagagattgcacttaaatgaatacagctgaccttcagaagttgaaaggaaaggaacggttcaaggggggaaagaaaccaactttcttcttctgccaaaattgttgtttctagtataagttcctttaactgtagacttggaatctactgatatccctgtttttttcctatcagatctgaaagtttatggcttcattgagaaactgggaaaagttggtcaggcgcagtggctcatgcctgtaatcccagcactttgggaggccgaggcaggcggatcatgaggtcaggagttccagaccagcctggccaacatggtgaaaccctgtctctactaaagatacaaaaaattagccgggcgtgttggtgtgcgcctgtaatcccagctactccgggaggctgaggcaggagagtcacttgaaccggggaggcggaggttacagtgagccgagatcatgccattgcattccagccttggcgacagagcgagactccatctcaaaa

SEQ ID NO: 310920 - DNA, 1825 bp, Homo sapiens
cccctgcccgcctccgggcgcccgtcacttcctgcccggcccggtgaaggccctgccgggcggcggcggcggcgacagcgtgcgagccatggtcgcgctggagaaccccgagtgcggcccggaggcggcggagggcaccccgggcgggcggcggctgctgccccttcccagctgcctgcctgccctagccagctcccaggtgaagagactctcggcttccaggcggaaacagcacttcatcaaccaggcagtgcggaactcagacctcgtgcccaaggccaaggggcggaagagcctccagcgcctggagaacacccagtacctcctgaccctgctggagacagacgggggcctgcctggcctggaggatggggacttggcaccccctgcatcaccaggcatctttgccgaggcctgcaacaacgccacctatgtggaggtctggaacgatttcatgaaccgctccggggaggagcaggagcgggttcttcgctacctggaggatgagggcaggagcaaggcgcggaggaggggccctggccgtggggaggaccggaggagagaggaccccgcctatacaccccgcgagtgcttccagcgcatcagccggcgtctgcgagccgtcctcaagcgcagccgcatccccatggaaacgctggagacctgggaggagcggctgcttcggttcttctccgtgtccccccaggccgtgtacacagcaatgctagacaacagcttcgagaggcttctgctgcacgctgtctgccagtacatggacctcatctcggccagtgctgacctggaggggaagcggcagatgaaggtcagtaatcggcacctggatttcctgccgccggggctgctcctgtccgcctacctggagcagcacagctgatggcggccccgcggagaccccgctgccacctcgcccagccatcaagccctccgataccttcggctaaaatatctttcatatttttagaatttgtcctcggaaacctttttcgcttggggtggtctctctcactctgccccctcctcacgcagctcttggcagtcaacagacgctggcggctggggctgcccatgccatcccagctccaagcttcccactccgggacttgtgtttgggtggggagacctgacctgggcatgttcctgtttcttcatcgttgagcttttctggcccggtctgaagctcaagtgaggagggggaggctgggtttttatcacttttaatgaatttggtgtgatttgttgtagatttttaaatttcccttttggagagaaaaaccaaaaaaactcgccccactggtaaaacatgggtcttggtcccagcccctgctcagcccctcccagtttttagcttgaatgagggtggggtctctgggaccctgcccctcatgccagaagcatcttgtgttgtatatgtgtgcgcgcgtgtgccctgagacccaggacagaagccacggtcctaagagccggttttatcctcgtcattctgcgtgtcctcccccacgccacctgtgtcggggctcagggtctcctgctttatatgagcccccttcctttcctcccctcctttatgctgggggtccaggacttccagccagaagcctctgcccttgcactaccttgtctgtcaccccatcccgtgtcccctcgtcccccagcctgactcctgcctgatagctcctgtgtccccatgctggtcctcctggcccaggctgcaggagccaggctggggggcctccgcacccccttgctgcgtgtgggtaattgtgttttgggggaaagtggggaatttaataaatttctggtgctc

SEQ ID NO: 310921 - DNA, 977 bp, Homo sapiens
  misc_feature (36)..(36): n is a, c, g, or t
  misc_feature (61)..(61): n is a, c, g, or t
  misc_feature (67)..(67): n is a, c, g, or t
  misc_feature (70)..(72): n is a, c, g, or t
  misc_feature (76)..(76): n is a, c, g, or t
  misc_feature (79)..(79): n is a, c, g, or t
  misc_feature (93)..(93): n is a, c, g, or t
  misc_feature (95)..(95): n is a, c, g, or t
  misc_feature (114)..(114): n is a, c, g, or t
  misc_feature (123)..(123): n is a, c, g, or t
  misc_feature (177)..(177): n is a, c, g, or t
  misc_feature (189)..(190): n is a, c, g, or t
  misc_feature (194)..(194): n is a, c, g, or t
  misc_feature (196)..(196): n is a, c, g, or t
  misc_feature (210)..(211): n is a, c, g, or t
  misc_feature (220)..(220): n is a, c, g, or t
  misc_feature (232)..(232): n is a, c, g, or t
  misc_feature (250)..(252): n is a, c, g, or t
  misc_feature (255)..(257): n is a, c, g, or t
  misc_feature (266)..(267): n is a, c, g, or t
  misc_feature (271)..(273): n is a, c, g, or t
  misc_feature (309)..(309): n is a, c, g, or t
  misc_feature (314)..(314): n is a, c, g, or t
  misc_feature (323)..(325): n is a, c, g, or t
  misc_feature (328)..(328): n is a, c, g, or t
  misc_feature (356)..(356): n is a, c, g, or t
  misc_feature (373)..(373): n is a, c, g, or t
  misc_feature (376)..(376): n is a, c, g, or t
  misc_feature (378)..(378): n is a, c, g, or t
  misc_feature (380)..(381): n is a, c, g, or t
cccattccaccccctccccaatccccccaccccatnaccctttccttttttttatcccctncccttncannncccntcncccccacctcttancnctccttccccttccctacncccaatctnttatttttattctttttttttatcatttttaattaatttttttttatttttttnatatttttaaanncccntnttttatataaaaannaaaaaaagngtgggaagtttnaaaagatttttctttttnnnatnnncttttgatnncctnnnattttttttgtttaattatttttttttttgttttanggttngggtgattnnntantcttctttttttttatattttttttttntttttcccttatccccnttncntnntgccacggtcctaagagccggttttatcctcgtcattctgcgtgtcctcccccacgccacctgtgtcggggctcagggtctcctgctttatatgagcccccttcctttcctcccctcctttatgctgggggtccaggacttccagccagaagcctctgcccttgcactaccttgtctgtcaccccatcccgtgtcccctcgtcccccagcctgactcctgcctgatagctcctgtgtccccatgctggtcctcctggcccaggctgcaggagccaggctggggggcctccgcacccccttgctgcgtgtgggtaattgtgttttgggggaaagtggggaatttaataaatttctggtgctcaaaaaaaaaaaaaaaaaaaaaaaaaaaaaaaagaggggggggccaacattatgtgccgggggcgcgggaacaaagggggtcattgaaatgggccaaggggccaaagcgggtctcccggccccagagttttcttggctcccaagggcgaaacatcagccggggcccccatataagggggcccggaacaaaatcgcggagagcccaggggtaccccggcattaaggaggcgcagaaa

SEQ ID NO: 310922 - DNA, 179 bp, Homo sapiens
gcggccccctactactactactactgctcgaattcaagcttctaacgatgtacggggacatgctggtcctcctggcccaggctgcaggagccaggctggggggcctccgcacccccttgctgcgtgtgggtaattgtgttttgggggaaagtggggaatttaataaatttctggtgctc

SEQ ID NO: 310923 - DNA, 2126 bp, Homo sapiens
cccctgcccgcctccgggcgcccgtcacttcctgcccggcccggtgaaggccctgccgggcggcggcggcggcgacagcgtgcgagccatggtcgcgctggagaaccccgagtgcggcccggaggcggcggagggcaccccgggcgggcggcggctgctgccccttcccagctgcctgcctgccctagccagctcccaggtgaagagactctcggcttccaggcggaaacagcacttcatcaaccaggcagtgcggaactcagacctcgtgcccaaggccaaggggcggaagagcctccagcgcctggagaacacccagtacctcctgaccctgctggagacagacgggggcctgcctggcctggaggatggggacttggcaccccctgcatcaccaggcatctttgccgaggcctgcaacaacgccacctatgtggaggtctggaacgatttcatgaaccgctccggggaggagcaggagcgggttcttcgctacctggaggatgagggcaggagcaaggcgcggaggaggggccctggccgtggggaggaccggaggagagaggaccccgcctatacaccccgcgagtgcttccagcgcatcagccggcgtctgcgagccgtcctcaagcgcagccgcatccccatggaaacgctggagacctgggaggagcggctgcttcggttcttctccgtgtccccccaggccgtgtacacagcaatgctagacaacagcttcgagaggcttctgctgcacgctgtctgccagtacatggacctcatctcggccagtgctgacctggaggggaagcggcagatgaaggtcagtaatcggcacctggatttcctgccgccggggctgctcctgtccgcctacctggagcagcacagctgatggcggccccgcggagaccccgctgccacctcgcccagccatcaagccctccgataccttcggctaaaatatctttcatatttttagaatttgtcctcggaaacctttttcgcttggggtggtctctctcactctgccccctcctcacgcagctcttggcagtcaacagacgctggcggctggggctgcccatgccatcccagctccaagcttcccactccgggacttgtgtttgggtggggagacctgacctgggcatgttcctgtttcttcatcgttgagcttttctggcccggtctgaagctcaagtgaggagggggaggctgggtttttatcacttttaatgaatttggtgtgatttgttgtagatttttaaatttcccttttggagagaaaaaccaaaaaaactcgccccactggtaaaacatgggtcttggtcccagcccctgctcagcccctcccagtttttagcttgaatgagggtggggtctctgggaccctgcccctcatgccagaagcatcttgtgttgtatatgtgtgcgcgcgtgtgccctgagacccaggacagaagccacggtcctaagagccggttttatcctcgtcattctgcgtgtcctcccccacgccacctgtgtcggggctcagggtctcctgctttatatgagcccccttcctttcctcccctcctttatgctgggggtccaggacttccagccagaagcctctgcccttgcactaccttgtctgtcaccccatcccgtgtcccctcgtcccccagcctgactcctgcctgatagctcctgtgtccccatgctggtcctcctggcccaggctgcaggagccaggctggggggcctccgcacccccttgctgcgtgtgggtaattgtgttttgggggaaagtggggaatttaataaatttctggtgctctggaaaaaaaaacaaaacaaaacaaaaaaaaaaaaaaaaaaaaaaaaaaaaaaaaaaaaaaaaaaaaaaaaaaaaaaaaaaaaaaaaaaaaaaaaaaagaggggggggccaacattatgtgccgggggcgcgggaacaaagggggtcattgaaatgggccaaggggccaaagcgggtctcccggccccagagttttcttggctcccaagggcgaaacatcagccggggcccccatataagggggcccggaacaaaatcgcggagagcccaggggtaccccggcattaaggaggcgcagaaa

SEQ ID NO: 310924 - DNA, 2060 bp, Homo sapiens
cccctgcccgcctccgggcgcccgtcacttcctgcccggcccggtgaaggccctgccgggcggcggcggcggcgacagcgtgcgagccatggtcgcgctggagaaccccgagtgcggcccggaggcggcggagggcaccccgggcgggcggcggctgctgccccttcccagctgcctgcctgccctagccagctcccaggtgaagagactctcggcttccaggcggaaacagcacttcatcaaccaggcagtgcggaactcagacctcgtgcccaaggccaaggggcggaagagcctccagcgcctggagaacacccagtacctcctgaccctgctggagacagacgggggcctgcctggcctggaggatggggacttggcaccccctgcatcaccaggcatctttgccgaggcctgcaacaacgccacctatgtggaggtctggaacgatttcatgaaccgctccggggaggagcaggagcgggttcttcgctacctggaggatgagggcaggagcaaggcgcggaggaggggccctggccgtggggaggaccggaggagagaggaccccgcctatacaccccgcgagtgcttccagcgcatcagccggcgtctgcgagccgtcctcaagcgcagccgcatccccatggaaacgctggagacctgggaggagcggctgcttcggttcttctccgtgtccccccaggccgtgtacacagcaatgctagacaacagcttcgagaggcttctgctgcacgctgtctgccagtacatggacctcatctcggccagtgctgacctggaggggaagcggcagatgaaggtcagtaatcggcacctggatttcctgccgccggggctgctcctgtccgcctacctggagcagcacagctgatggcggccccgcggagaccccgctgccacctcgcccagccatcaagccctccgataccttcggctaaaatatctttcatatttttagaatttgtcctcggaaacctttttcgcttggggtggtctctctcactctgccccctcctcacgcagctcttggcagtcaacagacgctggcggctggggctgcccatgccatcccagctccaagcttcccactccgggacttgtgtttgggtggggagacctgacctgggcatgttcctgtttcttcatcgttgagcttttctggcccggtctgaagctcaagtgaggagggggaggctgggtttttatcacttttaatgaatttggtgtgatttgttgtagatttttaaatttcccttttggagagaaaaaccaaaaaaactcgccccactggtaaaacatgggtcttggtcccagcccctgctcagcccctcccagtttttagcttgaatgagggtggggtctctgggaccctgcccctcatgccagaagcatcttgtgttgtatatgtgtgcgcgcgtgtgccctgagacccaggacagaagccacggtcctaagagccggttttatcctcgtcattctgcgtgtcctcccccacgccacctgtgtcggggctcagggtctcctgctttatatgagcccccttcctttcctcccctcctttatgctgggggtccaggacttccagccagaagcctctgcccttgcactaccttgtctgtcaccccatcccgtgtcccctcgtcccccagcctgactcctgcctgatagctcctgtgtccccatgctggtcctcctggcccaggctgcaggagccaggctggggggcctccgcacccccttgctgcgtgtgggtaattgtgttttgggggaaagtggggaatttaataaatttctggtgctcaaaaaaaaaaaaaaaaaaaaaaaaaaaaaaaagaggggggggccaacattatgtgccgggggcgcgggaacaaagggggtcattgaaatgggccaaggggccaaagcgggtctcccggccccagagttttcttggctcccaagggcgaaacatcagccggggcccccatataagggggcccggaacaaaatcgcggagagcccaggggtaccccggcattaaggaggcgcagaaa

SEQ ID NO: 310925 - DNA, 1878 bp, Homo sapiens
cccctgcccgcctccgggcgcccgtcacttcctgcccggcccggtgaaggccctgccgggcggcggcggcggcgacagcgtgcgagccatggtcgcgctggagaaccccgagtgcggcccggaggcggcggagggcaccccgggcgggcggcggctgctgccccttcccagctgcctgcctgccctagccagctcccaggtgaagagactctcggcttccaggcggaaacagcacttcatcaaccaggcagtgcggaactcagacctcgtgcccaaggccaaggggcggaagagcctccagcgcctggagaacacccagtacctcctgaccctgctggagacagacgggggcctgcctggcctggaggatggggacttggcaccccctgcatcaccaggcatctttgccgaggcctgcaacaacgccacctatgtggaggtctggaacgatttcatgaaccgctccggggaggagcaggagcgggttcttcgctacctggaggatgagggcaggagcaaggcgcggaggaggggccctggccgtggggaggaccggaggagagaggaccccgcctatacaccccgcgagtgcttccagcgcatcagccggcgtctgcgagccgtcctcaagcgcagccgcatccccatggaaacgctggagacctgggaggagcggctgcttcggttcttctccgtgtccccccaggccgtgtacacagcaatgctagacaacagcttcgagaggcttctgctgcacgctgtctgccagtacatggacctcatctcggccagtgctgacctggaggggaagcggcagatgaaggtcagtaatcggcacctggatttcctgccgccggggctgctcctgtccgcctacctggagcagcacagctgatggcggccccgcggagaccccgctgccacctcgcccagccatcaagccctccgataccttcggctaaaatatctttcatatttttagaatttgtcctcggaaacctttttcgcttggggtggtctctctcactctgccccctcctcacgcagctcttggcagtcaacagacgctggcggctggggctgcccatgccatcccagctccaagcttcccactccgggacttgtgtttgggtggggagacctgacctgggcatgttcctgtttcttcatcgttgagcttttctggcccggtctgaagctcaagtgaggagggggaggctgggtttttatcacttttaatgaatttggtgtgatttgttgtagatttttaaatttcccttttggagagaaaaaccaaaaaaactcgccccactggtaaaacatgggtcttggtcccagcccctgctcagcccctcccagtttttagcttgaatgagggtggggtctctgggaccctgcccctcatgccagaagcatcttgtgttgtatatgtgtgcgcgcgtgtgccctgagacccaggacagaagccacggtcctaagagccggttttatcctcgtcattctgcgtgtcctcccccacgccacctgtgtcggggctcagggtctcctgctttatatgagcccccttcctttcctcccctcctttatgctgggggtccaggacttccagccagaagcctctacctgcacgacaacacataaaaaaaaaaaaaaaaaaaaaaaaaaaaaaaaaaaagaggggggggccaacattatgtgccgggggcgcgggaacaaagggggtcattgaaatgggccaaggggccaaagcgggtctcccggccccagagttttcttggctcccaagggcgaaacatcagccggggcccccatataagggggcccggaacaaaatcgcggagagcccaggggtaccccggcattaaggaggcgcagaaa

SEQ ID NO: 310926 - DNA, 2238 bp, Homo sapiens
cccctgcccgcctccgggcgcccgtcacttcctgcccggcccggtgaaggccctgccgggcggcggcggcggcgacagcgtgcgagccatggtcgcgctggagaaccccgagtgcggcccggaggcggcggagggcaccccgggcgggcggcggctgcttcttgctctgttgcccaggctggagtgcagtggtgccatcatgccaacctcgacctcctggacttaagtgatcctcctgcctcaggcccctgagtagctgggactacagtcttgctatgttgctcaggctggtcttgaacccctgagctcaagtgatccaccggcctcagcctcccacaatgctgggatcaccggcatgagccaccacacccagcccgtcttcacaattgtatctgcttcctgtgatgtgaggatgaaacaaaataggattttaagggcccaggacttcacacaccgtaggggtgagctctccattgctgggggaaaccaagcgggccatggctgtggtagggcccttctcggagatcctggccggccttgaccctgaggaccacccctgccccggcccacaggccccttcccagctgcctgcctgccctagccagctcccaggtgaagagactctcggcttccaggcggaaacagcacttcatcaaccaggcagtgcggaactcagacctcgtgcccaaggccaaggggcggaagagcctccagcgcctggagaacacccagtacctcctgaccctgctggagacagacgggggcctgcctggcctggaggatggggacttggcaccccctgcatcaccaggcatctttgccgaggcctgcaacaacgccacctatgtggaggtctggaacgatttcatgaaccgctccggggaggagcaggagcgggttcttcgctacctggaggatgagggcaggagcaaggcgcggaggaggggccctggccgtggggaggaccggaggagagaggaccccgcctatacaccccgcgagtgcttccagcgcatcagccggcgtctgcgagccgtcctcaagcgcagccgcatccccatggaaacgctggagacctgggaggagcggctgcttcggttcttctccgtgtccccccaggccgtgtacacagcaatgctagacaacagcttcgagaggcttctgctgcacgctgtctgccagtacatggacctcatctcggccagtgctgacctggaggggaagcggcagatgaaggtcagtaatcggcacctggatttcctgccgccggggctgctcctgtccgcctacctggagcagcacagctgatggcggccccgcggagaccccgctgccacctcgcccagccatcaagccctccgataccttcggctaaaatatctttcatatttttagaatttgtcctcggaaacctttttcgcttggggtggtctctctcactctgccccctcctcacgcagctcttggcagtcaacagacgctggcggctggggctgcccatgccatcccagctccaagcttcccactccgggacttgtgtttgggtggggagacctgacctgggcatgttcctgtttcttcatcgttgagcttttctggcccggtctgaagctcaagtgaggagggggaggctgggtttttatcacttttaatgaatttggtgtgatttgttgtagatttttaaatttcccttttggagagaaaaaccaaaaaaactcgccccactggtaaaacatgggtcttggtcccagcccctgctcagcccctcccagtttttagcttgaatgagggtggggtctctgggaccctgcccctcatgccagaagcatcttgtgttgtatatgtgtgcgcgcgtgtgccctgagacccaggacagaagccacggtcctaagagccggttttatcctcgtcattctgcgtgtcctcccccacgccacctgtgtcggggctcagggtctcctgctttatatgagcccccttcctttcctcccctcctttatgctgggggtccaggacttccagccagaagcctctgcccttgcactaccttgtctgtcaccccatcccgtgtcccctcgtcccccagcctgactcctgcctgatagctcctgtgtccccatgctggtcctcctggcccaggctgcaggagccaggctggggggcctccgcacccccttgctgcgtgtgggtaattgtgttttgggggaaagtggggaatttaataaatttctggtgctc

SEQ ID NO: 310927 - DNA, 2127 bp, Homo sapiens
cccctgcccgcctccgggcgcccgtcacttcctgcccggcccggtgaaggccctgccgggcggcggcggcggcgacagcgtgcgagccatggtcgcgctggagaaccccgagtgcggcccggaggcggcggagggcaccccgggcgggcggcggctgcttcttgctctgttgcccaggctggagtgcagtggtgccatcatgccaacctcgacctcctggacttaagtgatcctcctgcctcaggcccctgagtagctgggactacagtcttgctatgttgctcaggctggtcttgaacccctgagctcaagtgatccaccggcctcagcctcccacaatgctgggatcaccggcatgagccaccacacccagcccgtcttcacaattgtatctgcttcctgtgatgtgaggatgaaacaaaataggattttaagggcccaggacttcacacaccgtaggggccccttcccagctgcctgcctgccctagccagctcccaggtgaagagactctcggcttccaggcggaaacagcacttcatcaaccaggcagtgcggaactcagacctcgtgcccaaggccaaggggcggaagagcctccagcgcctggagaacacccagtacctcctgaccctgctggagacagacgggggcctgcctggcctggaggatggggacttggcaccccctgcatcaccaggcatctttgccgaggcctgcaacaacgccacctatgtggaggtctggaacgatttcatgaaccgctccggggaggagcaggagcgggttcttcgctacctggaggatgagggcaggagcaaggcgcggaggaggggccctggccgtggggaggaccggaggagagaggaccccgcctatacaccccgcgagtgcttccagcgcatcagccggcgtctgcgagccgtcctcaagcgcagccgcatccccatggaaacgctggagacctgggaggagcggctgcttcggttcttctccgtgtccccccaggccgtgtacacagcaatgctagacaacagcttcgagaggcttctgctgcacgctgtctgccagtacatggacctcatctcggccagtgctgacctggaggggaagcggcagatgaaggtcagtaatcggcacctggatttcctgccgccggggctgctcctgtccgcctacctggagcagcacagctgatggcggccccgcggagaccccgctgccacctcgcccagccatcaagccctccgataccttcggctaaaatatctttcatatttttagaatttgtcctcggaaacctttttcgcttggggtggtctctctcactctgccccctcctcacgcagctcttggcagtcaacagacgctggcggctggggctgcccatgccatcccagctccaagcttcccactccgggacttgtgtttgggtggggagacctgacctgggcatgttcctgtttcttcatcgttgagcttttctggcccggtctgaagctcaagtgaggagggggaggctgggtttttatcacttttaatgaatttggtgtgatttgttgtagatttttaaatttcccttttggagagaaaaaccaaaaaaactcgccccactggtaaaacatgggtcttggtcccagcccctgctcagcccctcccagtttttagcttgaatgagggtggggtctctgggaccctgcccctcatgccagaagcatcttgtgttgtatatgtgtgcgcgcgtgtgccctgagacccaggacagaagccacggtcctaagagccggttttatcctcgtcattctgcgtgtcctcccccacgccacctgtgtcggggctcagggtctcctgctttatatgagcccccttcctttcctcccctcctttatgctgggggtccaggacttccagccagaagcctctgcccttgcactaccttgtctgtcaccccatcccgtgtcccctcgtcccccagcctgactcctgcctgatagctcctgtgtccccatgctggtcctcctggcccaggctgcaggagccaggctggggggcctccgcacccccttgctgcgtgtgggtaattgtgttttgggggaaagtggggaatttaataaatttctggtgctc

SEQ ID NO: 310928 - DNA, 2018 bp, Homo sapiens
cccctgcccgcctccgggcgcccgtcacttcctgcccggcccggtgaaggccctgccgggcggcggcggcggcgacagcgtgcgagccatggtcgcgctggagaaccccgagtgcggcccggaggcggcggagggcaccccgggcgggcggcggctgcttcttgctatgttgctcaggctggtcttgaacccctgagctcaagtgatccaccggcctcagcctcccacaatgctgggatcaccggcatgagccaccacacccagcccgtcttcacaattgtatctgcttcctgtgatgtgaggatgaaacaaaataggattttaagggcccaggacttcacacaccgtaggggccccttcccagctgcctgcctgccctagccagctcccaggtgaagagactctcggcttccaggcggaaacagcacttcatcaaccaggcagtgcggaactcagacctcgtgcccaaggccaaggggcggaagagcctccagcgcctggagaacacccagtacctcctgaccctgctggagacagacgggggcctgcctggcctggaggatggggacttggcaccccctgcatcaccaggcatctttgccgaggcctgcaacaacgccacctatgtggaggtctggaacgatttcatgaaccgctccggggaggagcaggagcgggttcttcgctacctggaggatgagggcaggagcaaggcgcggaggaggggccctggccgtggggaggaccggaggagagaggaccccgcctatacaccccgcgagtgcttccagcgcatcagccggcgtctgcgagccgtcctcaagcgcagccgcatccccatggaaacgctggagacctgggaggagcggctgcttcggttcttctccgtgtccccccaggccgtgtacacagcaatgctagacaacagcttcgagaggcttctgctgcacgctgtctgccagtacatggacctcatctcggccagtgctgacctggaggggaagcggcagatgaaggtcagtaatcggcacctggatttcctgccgccggggctgctcctgtccgcctacctggagcagcacagctgatggcggccccgcggagaccccgctgccacctcgcccagccatcaagccctccgataccttcggctaaaatatctttcatatttttagaatttgtcctcggaaacctttttcgcttggggtggtctctctcactctgccccctcctcacgcagctcttggcagtcaacagacgctggcggctggggctgcccatgccatcccagctccaagcttcccactccgggacttgtgtttgggtggggagacctgacctgggcatgttcctgtttcttcatcgttgagcttttctggcccggtctgaagctcaagtgaggagggggaggctgggtttttatcacttttaatgaatttggtgtgatttgttgtagatttttaaatttcccttttggagagaaaaaccaaaaaaactcgccccactggtaaaacatgggtcttggtcccagcccctgctcagcccctcccagtttttagcttgaatgagggtggggtctctgggaccctgcccctcatgccagaagcatcttgtgttgtatatgtgtgcgcgcgtgtgccctgagacccaggacagaagccacggtcctaagagccggttttatcctcgtcattctgcgtgtcctcccccacgccacctgtgtcggggctcagggtctcctgctttatatgagcccccttcctttcctcccctcctttatgctgggggtccaggacttccagccagaagcctctgcccttgcactaccttgtctgtcaccccatcccgtgtcccctcgtcccccagcctgactcctgcctgatagctcctgtgtccccatgctggtcctcctggcccaggctgcaggagccaggctggggggcctccgcacccccttgctgcgtgtgggtaattgtgttttgggggaaagtggggaatttaataaatttctggtgctc

SEQ ID NO: 310929 - DNA, 1762 bp, Homo sapiens
cccctgcccgcctccgggcgcccgtcacttcctgcccggcccggtgaaggccctgccgggcggcggcggcggcgacagcgtgcgagccatggtcgcgctggagaaccccgagtgcggcccggaggcggcggagggcaccccgggcgggcggcggctgctgcggaaacagcacttcatcaaccaggcagtgcggaactcagacctcgtgcccaaggccaaggggcggaagagcctccagcgcctggagaacacccagtacctcctgaccctgctggagacagacgggggcctgcctggcctggaggatggggacttggcaccccctgcatcaccaggcatctttgccgaggcctgcaacaacgccacctatgtggaggtctggaacgatttcatgaaccgctccggggaggagcaggagcgggttcttcgctacctggaggatgagggcaggagcaaggcgcggaggaggggccctggccgtggggaggaccggaggagagaggaccccgcctatacaccccgcgagtgcttccagcgcatcagccggcgtctgcgagccgtcctcaagcgcagccgcatccccatggaaacgctggagacctgggaggagcggctgcttcggttcttctccgtgtccccccaggccgtgtacacagcaatgctagacaacagcttcgagaggcttctgctgcacgctgtctgccagtacatggacctcatctcggccagtgctgacctggaggggaagcggcagatgaaggtcagtaatcggcacctggatttcctgccgccggggctgctcctgtccgcctacctggagcagcacagctgatggcggccccgcggagaccccgctgccacctcgcccagccatcaagccctccgataccttcggctaaaatatctttcatatttttagaatttgtcctcggaaacctttttcgcttggggtggtctctctcactctgccccctcctcacgcagctcttggcagtcaacagacgctggcggctggggctgcccatgccatcccagctccaagcttcccactccgggacttgtgtttgggtggggagacctgacctgggcatgttcctgtttcttcatcgttgagcttttctggcccggtctgaagctcaagtgaggagggggaggctgggtttttatcacttttaatgaatttggtgtgatttgttgtagatttttaaatttcccttttggagagaaaaaccaaaaaaactcgccccactggtaaaacatgggtcttggtcccagcccctgctcagcccctcccagtttttagcttgaatgagggtggggtctctgggaccctgcccctcatgccagaagcatcttgtgttgtatatgtgtgcgcgcgtgtgccctgagacccaggacagaagccacggtcctaagagccggttttatcctcgtcattctgcgtgtcctcccccacgccacctgtgtcggggctcagggtctcctgctttatatgagcccccttcctttcctcccctcctttatgctgggggtccaggacttccagccagaagcctctgcccttgcactaccttgtctgtcaccccatcccgtgtcccctcgtcccccagcctgactcctgcctgatagctcctgtgtccccatgctggtcctcctggcccaggctgcaggagccaggctggggggcctccgcacccccttgctgcgtgtgggtaattgtgttttgggggaaagtggggaatttaataaatttctggtgctc

SEQ ID NO: 310930 - DNA, 1700 bp, Homo sapiens
cccctgcccgcctccgggcgcccgtcacttcctgcccggcccggtgaaggccctgccgggcggcggcggcggcgacagcgtgcgagccatggtcgcgctggagaaccccgagtgcggcccggaggcggcggagggcaccccgggcgggcggcggctgctgccccttcccagctgcctgcctgccctagccagctcccaggtgaagagactctcggcttccaggcggaaacagcacttcatcaaccaggcagtgcggaactcagacctcgtgcccaaggccaaggggcggaagagcctccagcgcctggagaacagtctggaacgatttcatgaaccgctccggggaggagcaggagcgggttcttcgctacctggaggatgagggcaggagcaaggcgcggaggaggggccctggccgtggggaggaccggaggagagaggaccccgcctatacaccccgcgagtgcttccagcgcatcagccggcgtctgcgagccgtcctcaagcgcagccgcatccccatggaaacgctggagacctgggaggagcggctgcttcggttcttctccgtgtccccccaggccgtgtacacagcaatgctagacaacagcttcgagaggcttctgctgcacgctgtctgccagtacatggacctcatctcggccagtgctgacctggaggggaagcggcagatgaaggtcagtaatcggcacctggatttcctgccgccggggctgctcctgtccgcctacctggagcagcacagctgatggcggccccgcggagaccccgctgccacctcgcccagccatcaagccctccgataccttcggctaaaatatctttcatatttttagaatttgtcctcggaaacctttttcgcttggggtggtctctctcactctgccccctcctcacgcagctcttggcagtcaacagacgctggcggctggggctgcccatgccatcccagctccaagcttcccactccgggacttgtgtttgggtggggagacctgacctgggcatgttcctgtttcttcatcgttgagcttttctggcccggtctgaagctcaagtgaggagggggaggctgggtttttatcacttttaatgaatttggtgtgatttgttgtagatttttaaatttcccttttggagagaaaaaccaaaaaaactcgccccactggtaaaacatgggtcttggtcccagcccctgctcagcccctcccagtttttagcttgaatgagggtggggtctctgggaccctgcccctcatgccagaagcatcttgtgttgtatatgtgtgcgcgcgtgtgccctgagacccaggacagaagccacggtcctaagagccggttttatcctcgtcattctgcgtgtcctcccccacgccacctgtgtcggggctcagggtctcctgctttatatgagcccccttcctttcctcccctcctttatgctgggggtccaggacttccagccagaagcctctgcccttgcactaccttgtctgtcaccccatcccgtgtcccctcgtcccccagcctgactcctgcctgatagctcctgtgtccccatgctggtcctcctggcccaggctgcaggagccaggctggggggcctccgcacccccttgctgcgtgtgggtaattgtgttttgggggaaagtggggaatttaataaatttctggtgctc

SEQ ID NO: 310931 - DNA, 1393 bp, Homo sapiens
cccctgcccgcctccgggcgcccgtcacttcctgcccggcccggtgaaggccctgccgggcggcggcggcggcgacagcgtgcgagccatggtcgcgctggagaaccccgagtgcggcccggaggcggcggagggcaccccgggcgggcggcggctgctgccccttcccagctgcctgcctgccctagccagctcccaggtgaagagactctcggcttccaggcggaaacagcacttcatcaaccaggcagtgcggaactcagacctcgtgcccaaggccaaggggcggaagagcctccagcgcctggagaacacccagtacctcctgaccctgctggagacagacgggggcctgcctggcctggaggatggggacttggcaccccctgcatcaccaggcatctttgccgaggcctgcaacaacgccacctatgtggaggtctggaacgatttcatgaaccgctccggggaggagcaggagcgggttcttcgctacctggaggatgagggcaggagcaaggcgcggaggaggggccctggccgtggggaggaccggaggagagaggaccccgcctatacaccccgcgagtgcttccagcgcatcagccggcgtctgcgagccgtcctcaagcgcagccgcatccccatggaaacgctggagacctgggaggagcggctgcttcggttcttctccgtgtccccccaggccgtgtacacagcaatgctagacaacagcttcgagaggcttctgctgcacgctgtctgccagtacatggacctcatctcggccagtgctgacctggaggggaagcggcagatgaaggtcagtaatcggcacctggatttcctgccgccggggctgctcctgtccgcctacctggagcagcacagctgatggcggccccgcggagaccccgctgccacctcgcccagccatcaagccctccgataccttcggctaaaatatctttcatatttttagaatttgtcctcggaaacctttttcgcttggggtggtctctctcactctgccccctcctcacgcagctcttggcagtcaacagacgctggcggctggggctgcccatgccatcccagctccaagcttcccactccgggacttgtgtttgggtggggagacctgacctgggcatgttcctgtttcttcatcgttgagcttttctggcccggtctgaagctcaagtgaggagggggaggctgggtttttatcacttttaatgaattcccactgtatattttaaaaaacctttttgtttgtataccaaaaaactctccaaccggtaaacatgggtgtagttcccggccgtgctcctcacattttttaaaagagcttgattcccggaggggggttgttttcacctccgatccctgc

SEQ ID NO: 310932 - DNA, 1273 bp, Homo sapiens
cccctgcccgcctccgggcgcccgtcacttcctgcccggcccggtgaaggccctgccgggcggcggcggcggcgacagcgtgcgagccatggtcgcgctggagaaccccgagtgcggcccggaggcggcggagggcaccccgggcgggcggcggctgctgccccttcccagctgcctgcctgccctagccagctcccaggtgaagagactctcggcttccaggcggaaacagcacttcatcaaccaggcagtgcggaactcagacctcgtgcccaaggccaaggggcggaagagcctccagcgcctggagaacacccagtacctcctgaccctgctggagacagacgggggcctgcctggcctggaggatggggacttggcaccccctgcatcaccaggcatctttgccgaggcctgcaacaacgccacctatgtggaggtctggaacgatttcatgaaccgctccggggaggagcaggagcgggttcttcgctacctggaggatgagggcaggagcaaggcgcggaggaggggccctggccgtggggaggaccggaggagagaggaccccgcctatacaccccgcgagtgcttccagcgcatcagccggcgtctgcgagccgtcctcaagcgcagccgcatccccatggaaacgctggagacctgggaggagcggctgcttcggttcttctccgtgtccccccaggccgtgtacacagcaatgctagacaacagcttcgagaggcttctgctgcacgctgtctgccagtacatggacctcatctcggccagtgctgacctggaggggaagcggcagatgaaggtcagtaatcggcacctggatttcctgccgccggggctgctcctgtccgcctacctggagcagcacagctgatggcggccccgcggagaccccgctgccacctcgcccagccatcaagccctccgataccttcggctaaaatatctttcatatttttagaatttgtcctcggaaacctttttcgcttggggtggtctctctcactctgccccctcctcacgcagctcttggcagtcaacagacgctggcggctggggctgcccatgccatcccagctccaagcttcccactccgggacttgtgtttgggtggggagacctgacctgggcatgttcctgtttcttcatcgttgagcttttctggcccgtacgcgcgcacacatatacacacaagatgcattctggcatcagggtacaagggccccagcgacctaacccctcagcgcacagc

SEQ ID NO: 310933 - DNA, 1130 bp, Homo sapiens
gaccgaccacctgtcctgggaggtgtgaatctcaccatcaagaaggactgtgaaggactgatgcccagccagaggcgggcagtggcagactgacggacggacgacggacagggcggatgtgtatgaaggtcagtaatcggcacctggatttcctgccgccggggctgctcctgtccgcctacctggagcagcacagctgatggcggccccgcggagaccccgctgccacctcgcccagccatcaagccctccgataccttcggctaaaatatctttcatatttttagaatttgtcctcggaaacctttttcgcttggggtggtctctctcactctgccccctcctcacgcagctcttggcagtcaacagacgctggcggctggggctgcccatgccatcccagctccaagcttcccactccgggacttgtgtttgggtggggagacctgacctgggcatgttcctgtttcttcatcgttgagcttttctggcccggtctgaagctcaagtgaggagggggaggctgggtttttatcacttttaatgaatttggtgtgatttgttgtagatttttaaatttcccttttggagagaaaaaccaaaaaaactcgccccactggtaaaacatgggtcttggtcccagcccctgctcagcccctcccagtttttagcttgaatgagggtggggtctctgggaccctgcccctcatgccagaagcatcttgtgttgtatatgtgtgcgcgcgtgtgccctgagacccaggacagaagccacggtcctaagagccggttttatcctcgtcattctgcgtgtcctcccccacgccacctgtgtcggggctcagggtctcctgctttatatgagcccccttcctttcctcccctcctttatgctgggggtccaggacttccagccagaagcctctgcccttgcactaccttgtctgtcaccccatcccgtgtcccctcgtcccccagcctgactcctgcctgatagctcctgtgtccccatgctggtcctcctggcccaggctgcaggagccaggctggggggcctccgcacccccttgctgcgtgtgggtaattgtgttttgggggaaagtggggaatttaataaatttctggtgctc

SEQ ID NO: 310934 - DNA, 1043 bp, Homo sapiens
  misc_feature (36)..(36): n is a, c, g, or t
  misc_feature (61)..(61): n is a, c, g, or t
  misc_feature (67)..(67): n is a, c, g, or t
  misc_feature (70)..(72): n is a, c, g, or t
  misc_feature (76)..(76): n is a, c, g, or t
  misc_feature (79)..(79): n is a, c, g, or t
  misc_feature (93)..(93): n is a, c, g, or t
  misc_feature (95)..(95): n is a, c, g, or t
  misc_feature (114)..(114): n is a, c, g, or t
  misc_feature (123)..(123): n is a, c, g, or t
  misc_feature (177)..(177): n is a, c, g, or t
  misc_feature (189)..(190): n is a, c, g, or t
  misc_feature (194)..(194): n is a, c, g, or t
  misc_feature (196)..(196): n is a, c, g, or t
  misc_feature (210)..(211): n is a, c, g, or t
  misc_feature (220)..(220): n is a, c, g, or t
  misc_feature (232)..(232): n is a, c, g, or t
  misc_feature (250)..(252): n is a, c, g, or t
  misc_feature (255)..(257): n is a, c, g, or t
  misc_feature (266)..(267): n is a, c, g, or t
  misc_feature (271)..(273): n is a, c, g, or t
  misc_feature (309)..(309): n is a, c, g, or t
  misc_feature (314)..(314): n is a, c, g, or t
  misc_feature (323)..(325): n is a, c, g, or t
  misc_feature (328)..(328): n is a, c, g, or t
  misc_feature (356)..(356): n is a, c, g, or t
  misc_feature (373)..(373): n is a, c, g, or t
  misc_feature (376)..(376): n is a, c, g, or t
  misc_feature (378)..(378): n is a, c, g, or t
  misc_feature (380)..(381): n is a, c, g, or t
cccattccaccccctccccaatccccccaccccatnaccctttccttttttttatcccctncccttncannncccntcncccccacctcttancnctccttccccttccctacncccaatctnttatttttattctttttttttatcatttttaattaatttttttttatttttttnatatttttaaanncccntnttttatataaaaannaaaaaaagngtgggaagtttnaaaagatttttctttttnnnatnnncttttgatnncctnnnattttttttgtttaattatttttttttttgttttanggttngggtgattnnntantcttctttttttttatattttttttttntttttcccttatccccnttncntnntgccacggtcctaagagccggttttatcctcgtcattctgcgtgtcctcccccacgccacctgtgtcggggctcagggtctcctgctttatatgagcccccttcctttcctcccctcctttatgctgggggtccaggacttccagccagaagcctctgcccttgcactaccttgtctgtcaccccatcccgtgtcccctcgtcccccagcctgactcctgcctgatagctcctgtgtccccatgctggtcctcctggcccaggctgcaggagccaggctggggggcctccgcacccccttgctgcgtgtgggtaattgtgttttgggggaaagtggggaatttaataaatttctggtgctctggaaaaaaaaacaaaacaaaacaaaaaaaaaaaaaaaaaaaaaaaaaaaaaaaaaaaaaaaaaaaaaaaaaaaaaaaaaaaaaaaaaaaaaaaaaaagaggggggggccaacattatgtgccgggggcgcgggaacaaagggggtcattgaaatgggccaaggggccaaagcgggtctcccggccccagagttttcttggctcccaagggcgaaacatcagccggggcccccatataagggggcccggaacaaaatcgcggagagcccaggggtaccccggcattaaggaggcgcagaaa

SEQ ID NO: 310935 - DNA, 781 bp, Homo sapiens
tgatacgtctccctctttgacttttctgaatctccccactccacctcgtggttctcatctctgtgtctctgattctgataatctgtcctctgtctgtgtgccctgagacccaggacagaagccacggtcctaagagccggttttatcctcgtcattctgcgtgtcctcccccacgccacctgtgtcggggctcagggtctcctgctttatatgagcccccttcctttcctcccctcctttatgctgggggtccaggacttccagccagaagcctctgcccttgcactaccttgtctgtcaccccatcccgtgtcccctcgtcccccagcctgactcctgcctgatagctcctgtgtccccatgctggtcctcctggcccaggctgcaggagccaggctggggggcctccgcacccccttgctgcgtgtgggtaattgtgttttgggggaaagtggggaatttaataaatttctggtgctctggaaaaaaaaacaaaacaaaacaaaaaaaaaaaaaaaaaaaaaaaaaaaaaaaaaaaaaaaaaaaaaaaaaaaaaaaaaaaaaaaaaaaaaaaaaaagaggggggggccaacattatgtgccgggggcgcgggaacaaagggggtcattgaaatgggccaaggggccaaagcgggtctcccggccccagagttttcttggctcccaagggcgaaacatcagccggggcccccatataagggggcccggaacaaaatcgcggagagcccaggggtaccccggcattaaggaggcgcagaaa

SEQ ID NO: 310936 - DNA, 592 bp, Homo sapiens
cccctgcccgcctccgggcgcccgtcacttcctgcccggcccggtgaaggccctgccgggcggcggcggcggcgacagcgtgcgagccatggtcgcgctggagaaccccgagtgcggcccggaggcggcggagggcaccccgggcgggcggcggctgctgccccttcccagctgcctgcctgccctagccagctcccaggtgaagagactctcggcttccaggcggaaacagcacttcatcaaccaggcagtgcggaactcagacctcgtgcccaaggccaaggggcggaagagcctccagcgcctggagaacacccagtacctcctgaccctgctggagacagacgggggcctgcctggcctggaggacttccagccagaagcctctgcccttgcactaccttgtctgtcaccccatcccgtgtcccctcgtcccccagcctgactcctgcctgatagctcctgtgtccccatgctggtcctcctggcccaggctgcaggagccaggctggggggcctccgcacccccttgctgcgtgtgggtaattgtgttttgggggaaagtggggaatttaataaatttctggtgctc

SEQ ID NO: 310937 - DNA, 255 bp, Homo sapiens
gatgataaaaaaggaggaaggctagttcttgggtccccatggtgcctgggggtccccaaatgccaccccggcccagagagcatctgtttccacctagcccagtacctcctgaccctgctggagacagacgggggcctgcctggcctggaggatggggacttggcaccccctgcatcaccaggcatctttgccgaggcctgcaacaacgccacctatgtggaggtgtggcccccaaccccctcactccctccacac

SEQ ID NO: 310938 - DNA, 485 bp, Homo sapiens
ccggtaccatctgtgactccaccacaggctcatggtaacgccgatccgttcacttaatgccgctagcggcgctagcggcattaagtgaacgatgacatcttggcacgcgccttcagccgcttcccatccttccttaaggccaaggtgatccgtgacaagcgcacaggcaagaccaagggctacggcttcgtcagcttcaaggaccccagcgactacgtgcgcgccatgcgtgagatgaatgggaagtatgtgggctcgcgccccatcaagcttcgcaagagcatgtggaaggaccggaatctggacgtggtccgcaagaagcagaaggaaaagaagaagctgggcctgagatagggtctgtggccaggcacccgctcccacctggccgggcgctggctcctccctcagttctctttggaaaacccccagctgtccacccatcccctgccccaaaaccagtttcaataaatttacgttcatttcca

SEQ ID NO: 310939 - DNA, 505 bp, Homo sapiens
ccggtaccatctgtgactccaccacaggctcatggtaacgccgatccgttcacttaatgccgctagcggcgctagcggcattaagtgaacgatgacatcttggcacgcgccttcagccgcttcccatccttccttaaggccaaggtgatccgtgacaagcgcacaggcaagaccaagggctacggcttcgtcagcttcaaggaccccagcgactacgtgcgcgccatgcgtgagatgaatgggaagtatgtgggctcgcgccccatcaagcttcgcaagagcatgtggaaggaccggaatctggacgtggtccgcaagaagcagaaggaaaagaagaagctgggcctgagatagggtctgtggccaggcacccgctcccacctggccgggcgctggctcctccctcagttctctttggaaaacccccagctgtccacccatcccctgccccaaaaccagtttcaataaatttacgttcatttccatgccgctagcggggcatgga

SEQ ID NO: 310940 - DNA, 1525 bp, Homo sapiens
tgacctcttcctcgacaggtccagcagactctggaggcccgagcagctgctgcagccacagtagttcctcccatggtgggtggccctccttttgtaggccctgttggcttatggccctggtgagtcggacgtcgacctggactggcccagagggcatcgacggaaggccatagtaccgtgcggcgggcgagctgatggcctcctcctagtagggctcccgtagtcctgacgtcgcaggcgcttcagtccgcccgagcgtgctagcatgagagcgagaattccgggtcgtctcactctgcaagtaagcgcggatgctacggacgcatattgggccgtgaaggacggtgcgtaatgcagtgggactcaagtggggatctccactacataggcgtcgaagacgcgcgcgtaggacatcacgactatagcatcgtgagacaacatacacacgtgacgtgcgaacacgacagtgggctcgcgaagttagagtcattaaactatgggaagccaatcgacggacacacatcatgggatgaaaggcacaggaagcaacgacaggtacaagcgagaagtcactgaatgccaggaaggaaggagaccatggaagaaggcaataaagagataacatagccaagagagcagagctagagcgatgcgcgagtgcccagagtgaccgaagagatggagacaacaaagggagcaacagtgccacctagatgaggaacgataccaaggagaaggtagccacaaatgatgtgcagaacagaagaaggagagaacacagggacagacaaacgagatgacaaaggtagacacatggaaaagagaaggccatcattatgaaccaacacagcgaagaaactagagaggcagcaaccccacacaaggagagagaccaacaacaacaacgaggaaaataatatacaagtaggaacaaaggcgcatggcacacagaggaagaaaataccacgatgggatgtgagcccaaacacgagagaccacaaacagataccagaaagcaccaggagacgacccaccttggcaaaagaaccactaggagaagacgcacaacaaagagacaagaggacaaatgaaaaccaacggaacagaggggaactcccaaagaacaagcgaataaaaatccaaagtcaaaaacagcgaacaacatagaagagaaaacaggaaacaacaaacatagtggatgtacaatataaacaactggtcaccaaacaggaggatacaagggcacaaaacactccccaaaacaacgccgaagacgataatcacgcgacacctcacaagtacaaacgacagacaggcagacacacttagcaacgccagaagtgaacaacacgagcacacgacacagagacaaaagaacagcgaaacagaagcagaagacagcacagacacaagagaagagcacacacgcaagagaacaacacgaattaagaaaacgaaagacaagagggagataacagcgaaaaagaaaaaacacacgacacaccgaacagagaaacaaaacaaa

SEQ ID NO: 310941 - DNA, 1600 bp, Homo sapiens
tgctggacgtcatcctcgggagcccacccggacgaagggggagagtagacagcagaaccagcggcggcggctaagcagagactgtagtagcggcgacagcgacgacggcagcgatggctggggcggggccagccccgggactcccgggtgcaggaggacccgtggtcccgggtcctggcgctggcatcccgggcaaaagcggcgaggaacgcttgaaggaaatggaggcggagatggccctgtttgagcaggaagttctgggggctccagtacctggaatcccaactgctgtgcctgcggtgcccactgtccccacggtccccacagtagaagcgatgcaggtcccagcggctcctgtgatccgcccaattatcgcgaccaacacataccagcaggtccagcagactctggaggcccgagcagctgctgcagccacagtagttcctcccatggtgggtggccctccttttgtaggccctgttggctttggccctggtgatcggagtcacctggacagcccagaggctcgagaagccatgttcctgcggcgggcagcagccgggccccgccctatggccctacggccccctcaccaggccctcgtgggcccccctctgcctgggccccctggaccacccatgatgctgccaccaatggctcgggctccagggcccccgctgggctccatggctgcactgaggccccctctggaagagccagcagcaccccgagagctgggcctaggcctggggttgggcctgaaagagaaggaagaggcagtggtggcggcggcggctgggctggaggaggctagcgcggctgtggccgtgggggcaggaggtgccccagctggccctgcagtcattgggcccagcctgccgctggccctggccatgccattgcccgagcctgagcccctgcccctcccgttggaggtcgtccgcggcctcctgcccccgctgcgcattcctgaactcctgtccctgcgtcctcggccccggccccctcggccagagccacccccaggcctcatggctcttgaggtcccagagcccctgggtgaagacaagaagaaggggaagccagagaaattgaaacggtgcattcgcacagcggcagggagcagctgggaggaccccagcctgctggagtgggatgcagatgacttccggatcttctgtggggatctgggcaatgaggtgaacgatgacatcttggcacgcgccttcagccgcttcccatccttccttaaggccaaggtgatccgtgacaagcgcacaggcaagaccaagggctacggcttcgtcagcttcaaggaccccagcgactacgtgcgcgccatgcgtgagatgaatgggaagtatgtgggctcgcgccccatcaagcttcgcaagagcatgtggaaggaccggaatctggacgtggtccgcaagaagcagaaggaaaagaagaagctgggcctgagatagggtctgtggccaggcacccgctcccacctggccgggcgctggctcctccctcagttctctttggaaaacccccagctgtccacccatcccctgccccaaaaccagtttcaataaatttacgttcatttcca

SEQ ID NO: 310942 - DNA, 1687 bp, Homo sapiens
tgctggacgtcatcctcgggagcccacccggacgaagggggagagtagacagcagaaccagcggcggcggctaagcagagactgtagtagcggcgacagcgacgacggcagcgatggctggggcggggccagccccgggactcccgggtgcaggaggacccgtggtcccgggtcctggcgctggcatcccgggcaaaagcggcgaggaacgcttgaaggaaatggaggcggagatggccctgtttgagcaggaagttctgggggctccagtacctggaatcccaactgctgtgcctgcggtgcccactgtccccacggtccccacagtagaagcgatgcaggtcccagcggctcctgtgatccgcccaattatcgcgaccaacacataccagcaggtccagcagactctggaggcccgagcagctgctgcagccacagtagttcctcccatggtgggtggccctccttttgtaggccctgttggctttggccctggtgatcggagtcacctggacagcccagaggctcgagaagccatgttcctgcggcgggcagctgtggccccccagagggcccctatcctgcgtccagccttcgtcccccacgtgctacagagagcagattccgctctctcctctgcagcagccgggccccgccctatggccctacggccccctcaccaggccctcgtgggcccccctctgcctgggccccctggaccacccatgatgctgccaccaatggctcgggctccagggcccccgctgggctccatggctgcactgaggccccctctggaagagccagcagcaccccgagagctgggcctaggcctggggttgggcctgaaagagaaggaagaggcagtggtggcggcggcggctgggctggaggaggctagcgcggctgtggccgtgggggcaggaggtgccccagctggccctgcagtcattgggcccagcctgccgctggccctggccatgccattgcccgagcctgagcccctgcccctcccgttggaggtcgtccgcggcctcctgcccccgctgcgcattcctgaactcctgtccctgcgtcctcggccccggccccctcggccagagccacccccaggcctcatggctcttgaggtcccagagcccctgggtgaagacaagaagaaggggaagccagagaaattgaaacggtgcattcgcacagcggcagggagcagctgggaggaccccagcctgctggagtgggatgcagatgacttccggatcttctgtggggatctgggcaatgaggtgaacgatgacatcttggcacgcgccttcagccgcttcccatccttccttaaggccaaggtgatccgtgacaagcgcacaggcaagaccaagggctacggcttcgtcagcttcaaggaccccagcgactacgtgcgcgccatgcgtgagatgaatgggaagtatgtgggctcgcgccccatcaagcttcgcaagagcatgtggaaggaccggaatctggacgtggtccgcaagaagcagaaggaaaagaagaagctgggcctgagatagggtctgtggccaggcacccgctcccacctggccgggcgctggctcctccctcagttctctttggaaaacccccagctgtccacccatcccctgccccaaaaccagtttcaataaatttacgttcatttcca

SEQ ID NO: 310943 - DNA, 1689 bp, Homo sapiens
  misc_feature (22)..(22): n is a, c, g, or t
caggctggtacggctcggagtnttgggatccggacgaagggggagagtagacagcagaaccagcggcggcggctaagcagagactgtagtagcggcgacagcgacgacggcagcgatggctggggcggggccagccccgggactcccgggtgcaggaggacccgtggtcccgggtcctggcgctggcatcccgggcaaaagcggcgaggaacgcttgaaggaaatggaggcggagatggccctgtttgagcaggaagttctgggggctccagtacctggaatcccaactgctgtgcctgcggtgcccactgtccccacggtccccacagtagaagcgatgcaggtcccagcggctcctgtgatccgcccaattatcgcgaccaacacataccagcaggtccagcagactctggaggcccgagcagctgctgcagccacagtagttcctcccatggtgggtggccctccttttgtaggccctgttggctttggccctggtgatcggagtcacctggacagcccagaggctcgagaagccatgttcctgcggcgggcagctgtggccccccagagggcccctatcctgcgtccagccttcgtcccccacgtgctacagagagcagattccgctctctcctctgcagcagccgggccccgccctatggccctacggccccctcaccaggccctcgtgggcccccctctgcctgggccccctggaccacccatgatgctgccaccaatggctcgggctccagggcccccgctgggctccatggctgcactgaggccccctctggaagagccagcagcaccccgagagctgggcctaggcctggggttgggcctgaaagagaaggaagaggcagtggtggcggcggcggctgggctggaggaggctagcgcggctgtggccgtgggggcaggaggtgccccagctggccctgcagtcattgggcccagcctgccgctggccctggccatgccattgcccgagcctgagcccctgcccctcccgttggaggtcgtccgcggcctcctgcccccgctgcgcattcctgaactcctgtccctgcgtcctcggccccggccccctcggccagagccacccccaggcctcatggctcttgaggtcccagagcccctgggtgaagacaagaagaaggggaagccagagaaattgaaacggtgcattcgcacagcggcagggagcagctgggaggaccccagcctgctggagtgggatgcagatgacttccggatcttctgtggggatctgggcaatgaggtgaacgatgacatcttggcacgcgccttcagccgcttcccatccttccttaaggccaaggtgatccgtgacaagcgcacaggcaagaccaagggctacggcttcgtcagcttcaaggaccccagcgactacgtgcgcgccatgcgtgagatgaatgggaagtatgtgggctcgcgccccatcaagcttcgcaagagcatgtggaaggaccggaatctggacgtggtccgcaagaagcagaaggaaaagaagaagctgggcctgagatagggtctgtggccaggcacccgctcccacctggccgggcgctggctcctccctcagttctctttggaaaacccccagctgtccacccatcccctgccccaaaaccagtttcaataaatttacgttcatttcca

SEQ ID NO: 310944 - DNA, 1989 bp, Homo sapiens
tgctggacgtcatcctcgggagcccacccggacgaagggggagagtagacagcagaaccagcggcggcggctaagcagagactgtagtagcggcgacagcgacgacggcagcgatggctggggcggggccagccccgggactcccgggtgcaggaggacccgtggtcccgggtcctggcgctggcatcccgggcaaaagcggcgaggaacgcttgaaggaaatggaggcggagatggccctgtttgagcaggaagttctgggggctccagtacctggaatcccaactgctgtgcctgcggtgcccactgtccccacggtccccacagtagaagcgatgcaggtcccagcggctcctgtgatccgcccaattatcgcgaccaacacataccagcaggtccagcagactctggaggcccgagcagctgctgcagccacagtagttcctcccatggtgggtggccctccttttgtaggccctgttggctttggccctggtgatcggagtcacctggacagcccagaggctcgagaagccatgttcctgcggcgggcagcagccgggccccgccctatggccctacggccccctcaccaggccctcgtgggcccccctctgcctgggccccctggaccacccatgatgctgccaccaatggctcgggctccagggcccccgctgggctccatggctgcactgaggccccctctggaagagccagcagcaccccgagagctgggcctaggcctggggttgggcctgaaagagaaggaagaggcagtggtggcggcggcggctgggctggaggaggctagcgcggctgtggccgtgggggcaggaggtgccccagctggccctgcagtcattgggcccagcctgccgctggccctggccatgccattgcccgagcctgagcccctgcccctcccgttggaggtcgtccgcggcctcctgcccccgctgcgcattcctgaactcctgtccctgcgtcctcggccccggccccctcggccagagccacccccaggcctcatggctcttgaggtcccagagcccctgggtgaagacaagaagaaggggaagccagagaaattgaaacggtgcattcgcacagcggcagggagcagctgggaggaccccagcctgctggagtgggatgcagatgacttccggatcttctgtggggatctgggcaatgaggtgaacgatgacatcttggcacgcgccttcagccgcttcccatccttccttaaggccaaggtgatccgtgacaagcgcacaggcaagaccaagggctacggcttcgtcagcttcaaggaccccagcgactacgtgcgcgccatgcgtgagatgaatgggaagtatgtgggctcgcgccccatcaagcttcgcaagagcatgtggaaggaccggaatctggacgtggtccgcaagaagcagaaggaaaagaagaagctgggcctgagatagggtctgtggccaggcacccgctcccacctggccgggcgctggctcctccctcagttctctttggaaaacccccagctgtccacccatcccctgccccaaaaccagtttcaataaatttacgttcatttccaaaaaaaaaaaaaaaaaaaaaaaaaaaaaaaaaaaaaaaaaaaaaaaaaaaaaaaaaaaaaaaaaaaaaaaaaaaaaaaaaaaaaaaaaagaaaaaaaaacacaagagcagacaaacaagcaacaaacaaaggggggggggggcgcatccatcgccccccgcggcgcgcccctgccacagcaccaccaccaacaaccgtgataatgaccgcggctgccactcagtaggggaggaagcgtacatacgacagagagtgaagcgggatggtcgcgacaatcacaacagaagagagagagaggacaactagagcggcgctgcgctgacgcttagagcgaggcgagaagcacaagacgagggcgggacgacaccgaatcagcagaaaaccgacac

SEQ ID NO: 310945 - DNA, 1621 bp, Homo sapiens
tgctggacgtcatcctcgggagcccacccggacgaagggggagagtagacagcagaaccagcggcggcggctaagcagagactgtagtagcggcgacagcgacgacggcagcgatggctggggcggggccagccccgggactcccgggtgcaggaggacccgtggtcccgggtcctggcgctggcatcccgggcaaaagcggcgaggaacgcttgaaggaaatggaggcggagatggccctgtttgagcaggaagttctgggggctccagtacctggaatcccaactgctgtgcctgcggtgcccactgtccccacggtccccacagtagaagcgatgcaggtcccagcggctcctgtgatccgcccaattatcgcgaccaacacataccagcaggtccagcagactctggaggcccgagcagctgctgcagccacagtagttcctcccatggtgggtggccctccttttgtaggccctgttggctttggccctggtgatcggagtcacctggacagcccagaggctcgagaagccatgttcctgcggcgggcagattccgctctctcctctgcagcagccgggccccgccctatggccctacggccccctcaccaggccctcgtgggcccccctctgcctgggccccctggaccacccatgatgctgccaccaatggctcgggctccagggcccccgctgggctccatggctgcactgaggccccctctggaagagccagcagcaccccgagagctgggcctaggcctggggttgggcctgaaagagaaggaagaggcagtggtggcggcggcggctgggctggaggaggctagcgcggctgtggccgtgggggcaggaggtgccccagctggccctgcagtcattgggcccagcctgccgctggccctggccatgccattgcccgagcctgagcccctgcccctcccgttggaggtcgtccgcggcctcctgcccccgctgcgcattcctgaactcctgtccctgcgtcctcggccccggccccctcggccagagccacccccaggcctcatggctcttgaggtcccagagcccctgggtgaagacaagaagaaggggaagccagagaaattgaaacggtgcattcgcacagcggcagggagcagctgggaggaccccagcctgctggagtgggatgcagatgacttccggatcttctgtggggatctgggcaatgaggtgaacgatgacatcttggcacgcgccttcagccgcttcccatccttccttaaggccaaggtgatccgtgacaagcgcacaggcaagaccaagggctacggcttcgtcagcttcaaggaccccagcgactacgtgcgcgccatgcgtgagatgaatgggaagtatgtgggctcgcgccccatcaagcttcgcaagagcatgtggaaggaccggaatctggacgtggtccgcaagaagcagaaggaaaagaagaagctgggcctgagatagggtctgtggccaggcacccgctcccacctggccgggcgctggctcctccctcagttctctttggaaaacccccagctgtccacccatcccctgccccaaaaccagtttcaataaatttacgttcatttcca

SEQ ID NO: 310946 - DNA, 1555 bp, Homo sapiens
  misc_feature (22)..(22): n is a, c, g, or t
caggctggtacggctcggagtnttgggatccggacgaagggggagagtagacagcagaaccagcggcggcggctaagcagagactgtagtagcggcgacagcgacgacggcagcgatggctggggcggggccagccccgggactcccgggtgcaggaggacccgtggtcccgggtcctggcgctggcatcccgggcgtttgagcaggaagttctgggggctccagtacctggaatcccaactgctgtgcctgcggtgcccactgtccccacggtccccacagtagaagcgatgcaggtcccagcggctcctgtgatccgcccaattatcgcgaccaacacataccagcaggtccagcagactctggaggcccgagcagctgctgcagccacagtagttcctcccatggtgggtggccctccttttgtaggccctgttggctttggccctggtgatcggagtcacctggacagcccagaggctcgagaagccatgttcctgcggcgggcagcagccgggccccgccctatggccctacggccccctcaccaggccctcgtgggcccccctctgcctgggccccctggaccacccatgatgctgccaccaatggctcgggctccagggcccccgctgggctccatggctgcactgaggccccctctggaagagccagcagcaccccgagagctgggcctaggcctggggttgggcctgaaagagaaggaagaggcagtggtggcggcggcggctgggctggaggaggctagcgcggctgtggccgtgggggcaggaggtgccccagctggccctgcagtcattgggcccagcctgccgctggccctggccatgccattgcccgagcctgagcccctgcccctcccgttggaggtcgtccgcggcctcctgcccccgctgcgcattcctgaactcctgtccctgcgtcctcggccccggccccctcggccagagccacccccaggcctcatggctcttgaggtcccagagcccctgggtgaagacaagaagaaggggaagccagagaaattgaaacggtgcattcgcacagcggcagggagcagctgggaggaccccagcctgctggagtgggatgcagatgacttccggatcttctgtggggatctgggcaatgaggtgaacgatgacatcttggcacgcgccttcagccgcttcccatccttccttaaggccaaggtgatccgtgacaagcgcacaggcaagaccaagggctacggcttcgtcagcttcaaggaccccagcgactacgtgcgcgccatgcgtgagatgaatgggaagtatgtgggctcgcgccccatcaagcttcgcaagagcatgtggaaggaccggaatctggacgtggtccgcaagaagcagaaggaaaagaagaagctgggcctgagatagggtctgtggccaggcacccgctcccacctggccgggcgctggctcctccctcagttctctttggaaaacccccagctgtccacccatcccctgccccaaaaccagtttcaataaatttacgttcatttcca

SEQ ID NO: 310947 - DNA, 1618 bp, Homo sapiens
tgctggacgtcatcctcgggagcccacccggacgaagggggagagtagacagcagaaccagcggcggcggctaagcagagactgtagtagcggcgacagcgacgacggcagcgatggctggggcggggccagccccgggactcccgggtgcaggaggacccgtggtcccgggtcctggcgctggcatcccgggcaaaagcggcgaggaacgcttgaaggaaatggaggcggagatggccctgtttgagcaggaagttctgggggctccagtacctggaatcccaactgctgtgcctgcggtgcccactgtccccacggtccccacagtccagcagactctggaggcccgagcagctgctgcagccacagtagttcctcccatggtgggtggccctccttttgtaggccctgttggctttggccctggtgatcggagtcacctggacagcccagaggctcgagaagccatgttcctgcggcgggcagctgtggccccccagagggcccctatcctgcgtccagccttcgtcccccacgtgctacagagagcagattccgctctctcctctgcagcagccgggccccgccctatggccctacggccccctcaccaggccctcgtgggcccccctctgcctgggccccctggaccacccatgatgctgccaccaatggctcgggctccagggcccccgctgggctccatggctgcactgaggccccctctggaagagccagcagcaccccgagagctgggcctaggcctggggttgggcctgaaagagaaggaagaggcagtggtggcggcggcggctgggctggaggaggctagcgcggctgtggccgtgggggcaggaggtgccccagctggccctgcagtcattgggcccagcctgccgctggccctggccatgccattgcccgagcctgagcccctgcccctcccgttggaggtcgtccgcggcctcctgcccccgctgcgcattcctgaactcctgtccctgcgtcctcggccccggccccctcggccagagccacccccaggcctcatggctcttgaggtcccagagcccctgggtgaagacaagaagaaggggaagccagagaaattgaaacggtgcattcgcacagcggcagggagcagctgggaggaccccagcctgctggagtgggatgcagatgacttccggatcttctgtggggatctgggcaatgaggtgaacgatgacatcttggcacgcgccttcagccgcttcccatccttccttaaggccaaggtgatccgtgacaagcgcacaggcaagaccaagggctacggcttcgtcagcttcaaggaccccagcgactacgtgcgcgccatgcgtgagatgaatgggaagtatgtgggctcgcgccccatcaagcttcgcaagagcatgtggaaggaccggaatctggacgtggtccgcaagaagcagaaggaaaagaagaagctgggcctgagatagggtctgtggccaggcacccgctcccacctggccgggcgctggctcctccctcagttctctttggaaaacccccagctgtccacccatcccctgccccaaaaccagtttcaataaatttacgttcatttcca

SEQ ID NO: 310948 - DNA, 1132 bp, Homo sapiens
  misc_feature (1090)..(1090): n is a, c, g, or t
tgctggacgtcatcctcgggagcccacccggacgaagggggagagtagacagcagaaccagcggcggcggctaagcagagactgtagtagcggcgacagcgacgacggcagcgatggctggggcggggccagccccgggactcccgggtgcaggaggacccgtggtcccgggtcctggcgctggcatcccgggcaaaagcggcgaggaacgcttgaaggaaatggaggcggagatggccctgtttgagcaggaagttctgggggctccagtacctggaatcccaactgctgtgcctgcggtgcccactgtccccacggtccccacagtagaagcgatgcaggtcccagcggctcctgtgatccgcccaattatcgcgaccaacacataccagcaggtccagcagactctggaggcccgagcagctgctgcagccacagtagttcctcccatggtgggtggccctccttttgtaggccctgttggctttggccctggtgatcggagtcacctggacagcccagaggctcgagaagccatgttcctgcggcgggcagctgtggccccccagagggcccctatcctgcgtccagccttcgtcccccacgtgctacagagagcagattccgctctctcctctgcagcagccgggccccgccctatggccctacggccccctcaccaggccctcgtgggcccccctctgcctgggccccctggaccacccatgatgctgccaccaatggctcgggctccagggcccccgctgggctccatggctgcactgaggccccctctggaagagccagcagcaccccgagagctgggcctaggcctggggttgggcctgaaagagaaggaagaggcagtggtggcggcggcggctgggctggaggaggctagcgcggctgtggccgtgggggcaggaggtgccccagctggccctgcagtcattgggcccagcctgccgctggccctggccatgccattgcccgagcctgagcccctgcccctcccgttggaggtcgtccgcggcctcctgcccccgctgcgcattcctgaactcctgtctggtctggccggccctcgcanacacccagctaaggtttgagtcaaacctggtgaaaaaagagg

SEQ ID NO: 310949 - DNA, 1227 bp, Homo sapiens
tgctggacgtcatcctcgggagcccacccggacgaagggggagagtagacagcagaaccagcggcggcggctaagcagagactgtagtagcggcgacagcgacgacggcagcgatggctggggcggggccagccccgggactcccgggtgcaggaggacccgtggtcccgggtcctggcgctggcatcccgggcaaaagcggcgaggaacgcttgaaggaaatggaggcggagatggccctctgcctgggccccctggaccacccatgatgctgccaccaatggctcgggctccagggcccccgctgggctccatggctgcactgaggccccctctggaagagccagcagcaccccgagagctgggcctaggcctggggttgggcctgaaagagaaggaagaggcagtggtggcggcggcggctgggctggaggaggctagcgcggctgtggccgtgggggcaggaggtgccccagctggccctgcagtcattgggcccagcctgccgctggccctggccatgccattgcccgagcctgagcccctgcccctcccgttggaggtcgtccgcggcctcctgcccccgctgcgcattcctgaactcctgtccctgcgtcctcggccccggccccctcggccagagccacccccaggcctcatggctcttgaggtcccagagcccctgggtgaagacaagaagaaggggaagccagagaaattgaaacggtgcattcgcacagcggcagggagcagctgggaggaccccagcctgctggagtgggatgcagatgacttccggatcttctgtggggatctgggcaatgaggtgaacgatgacatcttggcacgcgccttcagccgcttcccatccttccttaaggccaaggtgatccgtgacaagcgcacaggcaagaccaagggctacggcttcgtcagcttcaaggaccccagcgactacgtgcgcgccatgcgtgagatgaatgggaagtatgtgggctcgcgccccatcaagcttcgcaagagcatgtggaaggaccggaatctggacgtggtccgcaagaagcagaaggaaaagaagaagctgggcctgagatagggtctgtggccaggcacccgctcccacctggccgggcgctggctcctccctcagttctctttggaaaacccccagctgtccacccatcccctgccccaaaaccagtttcaataaatttacgttcatttcca

SEQ ID NO: 310950 - DNA, 752 bp, Homo sapiens
gagaagacgacagaaggggtggtcagtaggagagcacgttcagagggaagagccatctcaacagaatcgcaccaaactatactttcaggatgaatttcttctttctgccatcttttggaataaatattttcctcctttctatgtaaaaaaaaaaaaaaaaaaaaaaaaaaaaagtcgtatcgatgtcgagcgatcatgatgatgatggctgcgagaagacgacagaaggggaagccagagaaattgaaacggtgcattcgcacagcggcagggagcagctgggaggaccccagcctgctggagtgggatgcagatgacttccggatcttctgtggggatctgggcaatgaggtgaacgatgacatcttggcacgcgccttcagccgcttcccatccttccttaaggccaaggtgatccgtgacaagcgcacaggcaagaccaagggctacggcttcgtcagcttcaaggaccccagcgactacgtgcgcgccatgcgtgagatgaatgggaagtatgtgggctcgcgccccatcaagcttcgcaagagcatgtggaaggaccggaatctggacgtggtccgcaagaagcagaaggaaaagaagaagctgggcctgagatagggtctgtggccaggcacccgctcccacctggccgggcgctggctcctccctcagttctctttggaaaacccccagctgtccacccatcccctgccccaaaaccagtttcaataaatttacgttcatttcca

SEQ ID NO: 310951 - DNA, 414 bp, Homo sapiens
  misc_feature (22)..(22): n is a, c, g, or t
caggctggtacggctcggagtnttgggatccggacgaagggggagagtagacagcagaaccagcggcggcggctaagcagagactgtagtagcggcgacagcgacgacggcagcgatggctggggcggggccagccccgggactcccgggtgcaggaggacccgtggtcccgggtcctggcgctggcatcccgggcaaaagcggcgaggaacgcttgaaggaccggaatctggacgtggtccgcaagaagcagaaggaaaagaagaagctgggcctgagatagggtctgtggccaggcacccgctcccacctggccgggcgctggctcctccctcagttctctttggaaaacccccagctgtccacccatcccctgccccaaaaccagtttcaataaatttacgttcatttcca

SEQ ID NO: 310952 - DNA, 5179 bp, Homo sapiens
gaactggcccagaatcactctcgccctgctccggcgtctgcgccgggcggcggtggcggcggagacccgaacatggcgaccgcgcgcaccttcgggcccgagcgggaagccgagccggccaaggaagcgcgcgtcgtgggctcggagcttgtggacacttatacggtttacatcatccaggtcactgatggcagccatgagtggacagtaaagcaccgctacagcgacttccatgacctgcatgaaaagctcgttgcagagagaaagattgataaaaacctgcttccgcccaaaaagataattgggaaaaactcaagaagcttggtggagaagagggagaaggatctggaggtctacctccagaagctcctggctgccttccctggcgtgacccccagagtactggcccacttcttgcattttcacttctatgagataaatggcatcaccgcggcactggctgaagagctctttgagaaaggagaacagctcctgggggccggcgaggtctttgccattggacccctgcagctgtatgccgtcacggagcagctgcagcagggaaagcccacgtgcgccagtggggatgccaagaccgacctcgggcacatcctggacttcacctgtcgccttaagtaccttaaggtttctggcacagaaggaccttttgggaccagcaacattcaggagcagctcctgccgttcgacctatcaatattcaagtccctgcatcaggtggagataagtcactgtgatgctaagcacatcagagggctggtcgcatcgaagcccaccttagccacgctgagtgtccgcttctcagcaacctcgatgaaggaagtccttgttcctgaagcctcagaatttgatgagtgggagcctgaaggcacaaccctagaaggccctgtgactgccgtcatccccacttggcaggcattgaccacgcttgacctgagccacaacagcatctccgagatcgacgagtctgtgaaactgatcccaaagattgagttcctggacctgagtcacaatggattgctggttgtggacaatctgcagcacctgtataaccttgtgcatctggacctgtcctacaacaagctctcctccttggaagggcttcacaccaagctggggaacatcaagaccttaaacctggcaggcaacctcctagagagtctgagtggcctgcacaagctctactcactggtcaacctggatctccgggacaacaggatcgaacagatggaggaggtccggagcataggcagcctcccgtgtctggagcacgtgtctctgctgaacaaccctctgagcatcatccccgactaccggaccaaggtgctggctcagttcggagagagggcctcagaggtctgtctggatgacacagtgaccacagagaaggagctggacactgtggaagtgctgaaagcaattcagaaagccaaggaggtcaagtccaaactgagcaacccagagaagaagggtggtgaagactcccggctctcagctgccccctgcatcagacccagcagctcccctcccactgtggctcccgcatctgcctccctgccccagcccatcctctctaaccaaggaatcatgttcgttcaggaggaggccctggccagcagcctctcgtccactgacagtctgactcccgagcaccagcccattgcccagggatgttctgattccttggagtccatccctgcgggacaggcagcttccgatgatttaagggacgtgccaggagctgttggtggtgcaagcccagaacatgccgagccggaggtccaggtggtgccggggtctggccagatcatcttcctgcccttcacctgcattggctacacggccaccaatcaggacttcatccagcgcctgagcacactgatccggcaggccatcgagcggcagctgcctgcctggatcgaggctgccaaccagcgggaggagggccagggtgaacagggcgaggaggaggatgaggaggaggaagaagaggaggacgtggctgagaaccgctactttgaaatggggcccccagacgtggaggaggaggagggaggaggccagggggaggaagaggaggaggaagaggaggatgaagaggccgaggaggagcgcctggctctggaatgggccctgggcgcggacgaggacttcctgctggagcacatccgcatcctcaaggtgctgtggtgcttcctgatccatgtgcagggcagtatccgccagttcgccgcctgccttgtgctcaccgacttcggcatcgcagtcttcgagatcccgcaccaggagtctcggggcagcagccagcacatcctctcctccctgcgctttgtcttttgcttcccgcatggcgacctcaccgagtttggcttcctcatgccggagctgtgtctggtgctcaaggtacggcacagtgagaacacgctcttcattatctcggacgccgccaacctgcacgagttccacgcggacctgcgctcatgctttgcaccccagcacatggccatgctgtgtagccccatcctctacggcagccacaccagcctgcaggagttcctgcgccagctgctcaccttctacaaggtggctggcggctgccaggagcgcagccagggctgcttccccgtctacctggtctacagtgacaagcgcatggtgcagacggccgccggggactactcaggcaacatcgagtgggccagctgcacactctgttcagccgtgcggcgctcctgctgcgcgccctctgaggccgtcaagtccgccgccatcccctactggctgttgctcacgccccagcacctcaacgtcatcaaggccgacttcaaccccatgcccaaccgtggcacccacaactgtcgcaaccgcaacagcttcaagctcagccgtgtgccgctctccaccgtgctgctggaccccacacgcagctgtacccagcctcggggcgcctttgctgatggccacgtgctagagctgctcgtggggtaccgctttgtcactgccatcttcgtgctgccccacgagaagttccacttcctgcgcgtctacaaccagctgcgggcctcgctgcaggacctgaagactgtggtcatcgccaagacccccgggacgggaggcagcccccagggctcctttgcggatggccagcctgccgagcgcagggccagcaatgaccagcgtccccaggaggtcccagcagaggctctggccccggccccagtggaagtcccagctccagcccctgcagcagcctcagcctcaggcccagcgaagactccggccccagcagaggcctcaacttcagctttggtcccagaggagacgccagtggaagctccagccccacccccagccgaggcccctgcccagtacccgagtgagcacctcatccaggccacctcggaggagaatcagatcccctcgcacttgcctgcctgcccgtcgctccggcacgtcgccagcctgcggggcagcgccatcatcgagctcttccacagcagcattgctgaggttgaaaacgaggagctgaggcacctcatgtggtcctcggtggtgttctaccagaccccagggctggaggtgactgcctgcgtgctgctctccaccaaggctgtgtactttgtgctccacgacggcctccgccgctacttctcagagccactgcaggatttctggcatcagaaaaacaccgactacaacaacagccctttccacatctcccagtgcttcgtgctaaagcttagtgacctgcagtcagtcaatgtggggcttttcgaccagcatttccggctgacgggttccaccccgatgcaggtggtcacgtgcttgacgcgggacagctacctgacgcactgcttcctccagcacctcatggtcgtgctgtcctctctggaacgcacgccctcgccggagcctgttgacaaggacttctactccgagtttgggaacaagaccacagggaagatggagaactacgagctgatccactctagtcgcgtcaagtttacctaccccagtgaggaggagattggggacctgacgttcactgtggcccaaaagatggctgagccagagaaggccccagccctcagcatcctgctgtacgtgcaggccttccaggtgggcatgccaccccctgggtgctgcaggggccccctgcgccccaagacactcctgctcaccagctccgagatcttcctcctggatgaggactgtgtccactacccactgcccgagtttgccaaagagccgccgcagagagacaggtaccggctggacgatggccgccgcgtccgggacctggaccgagtgctcatgggctaccagacctacccgcaggccctcaccctcgtcttcgatgacgtgcaaggtcatgacctcatgggcagtgtcaccctggaccactttggggaggtgccaggtggcccggctagagccagccagggccgtgaagtccagtggcaggtgtttgtccccagtgctgagagcagagagaagctcatctcgctgttggctcgccagtgggaggccctgtgtggccgtgagctgcctgtcgagctcaccggctagcccaggccacagccagcctgtcgtgtccagcctgacgcctactggggcagggcagcaggcttttgtgttctctaaaaatgttttatcctccctttggtaccttaatttgactgtcctcgcagagaatgtgaacatgtgtgtgtgttgtgttaattctttctcatgttgggagtgagaatgccgggcccctcagggctgtcggtgtgctgtcagcctcccacaggtggtacagccgtgcacaccagtgtcgtgtctgctgttgtgggaccgttgttaacacgtgacactgtgggtctgactttctcttctacacgtcctttcctgaagtgtcgagtccagtcctttgttgctgttgctgttgctgttgctgttgctgttggcatcttgctgctaatcctgaggctggtagcagaatgcacattggaagctcccaccccatattgttcttcaaagtggaggtctcccctgatccagacaagtgggagagcccgtgggggcaggggacctggagctgccagcaccaagcgtgattcctgctgcctgtattctctattccaataaagcagagtttgacaccgtcaaaaaaaaaaaa

SEQ ID NO: 310953 - DNA, 3895 bp, Homo sapiens
tctatcctggtttttaaaaaatgtgtctgtggaagtttaatttttatgtagtcacatctcagtttttttccattgcatttattctcagaatgcttctccctgccctgagattagataagcagtcatttgttctttcttgagttattttgagatttcagttttaacattttcttctataatccatgtggctgggttttgggatctggctaacccccgccatgccagtagcctgaggggcccagccccacttgttgaacagccgctctccccgccccacccaccctgcctgcctgcccacccgccctggtctctccaggaatcatgttcgttcaggaggaggccctggccagcagcctctcgtccactgacagtctgactcccgagcaccagcccattgcccagggatgttctgattccttggagtccatccctgcgggacaggcagcttccgatgatttaagggacgtgccaggagctgttggtggtgcaagcccagaacatgccgagccggaggtccaggtggtgccggggtctggccagatcatcttcctgcccttcacctgcattggctacacggccaccaatcaggacttcatccagcgcctgagcacactgatccggcaggccatcgagcggcagctgcctgcctggatcgaggctgccaaccagcgggaggagggccagggtgaacagggcgaggaggaggatgaggaggaggaagaagaggaggacgtggctgagaaccgctactttgaaatggggcccccagacgtggaggaggaggagggaggaggccagggggaggaagaggaggaggaagaggaggatgaagaggccgaggaggagcgcctggctctggaatgggccctgggcgcggacgaggacttcctgctggagcacatccgcatcctcaaggtgctgtggtgcttcctgatccatgtgcagggcagtatccgccagttcgccgcctgccttgtgctcaccgacttcggcatcgcagtcttcgagatcccgcaccaggagtctcggggcagcagccagcacatcctctcctccctgcgctttgtcttttgcttcccgcatggcgacctcaccgagtttggcttcctcatgccggagctgtgtctggtgctcaaggtacggcacagtgagaacacgctcttcattatctcggacgccgccaacctgcacgagttccacgcggacctgcgctcatgctttgcaccccagcacatggccatgctgtgtagccccatcctctacggcagccacaccagcctgcaggagttcctgcgccagctgctcaccttctacaaggtggctggcggctgccaggagcgcagccagggctgcttccccgtctacctggtctacagtgacaagcgcatggtgcagacggccgccggggactactcaggcaacatcgagtgggccagctgcacactctgttcagccgtgcggcgctcctgctgcgcgccctctgaggccgtcaagtccgccgccatcccctactggctgttgctcacgccccagcacctcaacgtcatcaaggccgacttcaaccccatgcccaaccgtggcacccacaactgtcgcaaccgcaacagcttcaagctcagccgtgtgccgctctccaccgtgctgctggaccccacacgcagctgtacccagcctcggggcgcctttgctgatggccacgtgctagagctgctcgtggggtaccgctttgtcactgccatcttcgtgctgccccacgagaagttccacttcctgcgcgtctacaaccagctgcgggcctcgctgcaggacctgaagactgtggtcatcgccaagacccccgggacgggaggcagcccccagggctcctttgcggatggccagcctgccgagcgcagggccagcaatgaccagcgtccccaggaggtcccagcagaggctctggccccggccccagtggaagtcccagctccagcccctgcagcagcctcagcctcaggcccagcgaagactccggccccagcagaggcctcaacttcagctttggtcccagaggagacgccagtggaagctccagccccacccccagccgaggcccctgcccagtacccgagtgagcacctcatccaggccacctcggaggagaatcagatcccctcgcacttgcctgcctgcccgtcgctccggcacgtcgccagcctgcggggcagcgccatcatcgagctcttccacagcagcattgctgaggttgaaaacgaggagctgaggcacctcatgtggtcctcggtggtgttctaccagaccccagggctggaggtgactgcctgcgtgctgctctccaccaaggctgtgtactttgtgctccacgacggcctccgccgctacttctcagagccactgcaggatttctggcatcagaaaaacaccgactacaacaacagccctttccacatctcccagtgcttcgtgctaaagcttagtgacctgcagtcagtcaatgtggggcttttcgaccagcatttccggctgacgggttccaccccgatgcaggtggtcacgtgcttgacgcgggacagctacctgacgcactgcttcctccagcacctcatggtcgtgctgtcctctctggaacgcacgccctcgccggagcctgttgacaaggacttctactccgagtttgggaacaagaccacagggaagatggagaactacgagctgatccactctagtcgcgtcaagtttacctaccccagtgaggaggagattggggacctgacgttcactgtggcccaaaagatggctgagccagagaaggccccagccctcagcatcctgctgtacgtgcaggccttccaggtgggcatgccaccccctgggtgctgcaggggccccctgcgccccaagacactcctgctcaccagctccgagatcttcctcctggatgaggactgtgtccactacccactgcccgagtttgccaaagagccgccgcagagagacaggtaccggctggacgatggccgccgcgtccgggacctggaccgagtgctcatgggctaccagacctacccgcaggccctcaccctcgtcttcgatgacgtgcaaggtcatgacctcatgggcagtgtcaccctggaccactttggggaggtgccaggtggcccggctagagccagccagggccgtgaagtccagtggcaggtgtttgtccccagtgctgagagcagagagaagctcatctcgctgttggctcgccagtgggaggccctgtgtggccgtgagctgcctgtcgagctcaccggctagcccaggccacagccagcctgtcgtgtccagcctgacgcctactggggcagggcagcaggcttttgtgttctctaaaaatgttttatcctccctttggtaccttaatttgactgtcctcgcagagaatgtgaacatgtgtgtgtgttgtgttaattctttctcatgttgggagtgagaatgccgggcccctcagggctgtcggtgtgctgtcagcctcccacaggtggtacagccgtgcacaccagtgtcgtgtctgctgttgtgggaccgttgttaacacgtgacactgtgggtctgactttctcttctacacgtcctttcctgaagtgtcgagtccagtcctttgttgctgttgctgttgctgttgctgttgctgttggcatcttgctgctaatcctgaggctggtagcagaatgcacattggaagctcccaccccatattgttcttcaaagtggaggtctcccctgatccagacaagtgggagagcccgtgggggcaggggacctggagctgccagcaccaagcgtgattcctgctgcctgtattctctattccaataaagcagagtttgacaccgtcaaaaaaaaaaaa

SEQ ID NO: 310954 - DNA, 551 bp, Homo sapiens
gactgtcctcgcagagaatgtgaacatgtgtgtgtgttgttttatcctccctttggtaccttaatttgactgtcctcgcagagaatgtgaacatgtgtgtgtgttgtgttaattctttctcatgttgggagtgagaatgccgggcccctcagggctgtcggtgtgctgtcagcctcccacaggtggtacagccgtgcacaccagtgtcgtgtctgctgttgtgggaccgttgttaacacgtgacactgtgggtctgactttctcttctacacgtcctttcctgaagtgtcgagtccagtcctttgttgctgttgctgttgctgttgctgttgctgttggcatcttgctgctaatcctgaggctggtagcagaatgcacattggaagctcccaccccatattgttcttcaaagtggaggtctcccctgatccagacaagtgggagagcccgtgggggcaggggacctggagctgccagcaccaagcgtgattcctgctgcctgtattctctattccaataaagcagagtttgacaccgtcaaaaaaaaaaaa

SEQ ID NO: 310955 - DNA, 575 bp, Homo sapiens
agagagcagaactcacgctccagggctcagagcaggaggtagggtgtgcggcaagcgctggcccggacagaagcagagtgggccctggtctcgggcaggatgtttctgactcacatttcctgaggagagaaagctaagctctttgcctaatgtctctgtctccccttccagaaaaatgcctcagctcttccggcctgaaggaatggcctcctcccgggccccatgattctttcctgtgtgggccctcctggccctggcctctgggctgaggcttgctagggactcggggtggctctaaggggcagggatagggctggggagcgccggcctgtggccctgaccagccccttctcgtgcaggttccaccccgatgcaggtggtcacgtgcttgacgcgggacagctacctgacgcactgcttcctccagcacctcatggtcgtgctgtcctctctggaacgcacgccctcgccggagcctgttgacaaggacttctactccgagtttgggaacaagaccacagggaagatggagaactacgagctgatccacccggacctcaattaaagatcctata

SEQ ID NO: 310956 - DNA, 5193 bp, Homo sapiens
cgggggccggggggcggtgggacgttgaccccgccccctgctgctgctagtctgcgccgggcggcggtggcggcggagacccgaacatggcgaccgcgcgcaccttcgggcccgagcgggaagccgagccggccaaggaagcgcgcgtcgtgggctcggagcttgtggacacttatacggtttacatcatccaggtcactgatggcagccatgagtggacagtaaagcaccgctacagcgacttccatgacctgcatgaaaagctcgttgcagagagaaagattgataaaaacctgcttccgcccaaaaagataattgggaaaaactcaagaagcttggtggagaagagggagaaggatctggaggtctacctccagaagctcctggctgccttccctggcgtgacccccagagtactggcccacttcttgcattttcacttctatgagataaatggcatcaccgcggcactggctgaagagctctttgagaaaggagaacagctcctgggggccggcgaggtctttgccattggacccctgcagctgtatgccgtcacggagcagctgcagcagggaaagcccacgtgcgccagtggggatgccaagaccgacctcgggcacatcctggacttcacctgtcgccttaagtaccttaaggtttctggcacagaaggaccttttgggaccagcaacattcaggagcagctcctgccgttcgacctatcaatattcaagtccctgcatcaggtggagataagtcactgtgatgctaagcacatcagagggctggtcgcatcgaagcccaccttagccacgctgagtgtccgcttctcagcaacctcgatgaaggaagtccttgttcctgaagcctcagaatttgatgagtgggagcctgaaggcacaaccctagaaggccctgtgactgccgtcatccccacttggcaggcattgaccacgcttgacctgagccacaacagcatctccgagatcgacgagtctgtgaaactgatcccaaagattgagttcctggacctgagtcacaatggattgctggttgtggacaatctgcagcacctgtataaccttgtgcatctggacctgtcctacaacaagctctcctccttggaagggcttcacaccaagctggggaacatcaagaccttaaacctggcaggcaacctcctagagagtctgagtggcctgcacaagctctactcactggtcaacctggatctccgggacaacaggatcgaacagatggaggaggtccggagcataggcagcctcccgtgtctggagcacgtgtctctgctgaacaaccctctgagcatcatccccgactaccggaccaaggtgctggctcagttcggagagagggcctcagaggtctgtctggatgacacagtgaccacagagaaggagctggacactgtggaagtgctgaaagcaattcagaaagccaaggaggtcaagtccaaactgagcaacccagagaagaagggtggtgaagactcccggctctcagctgccccctgcatcagacccagcagctcccctcccactgtggctcccgcatctgcctccctgccccagcccatcctctctaaccaaggaatcatgttcgttcaggaggaggccctggccagcagcctctcgtccactgacagtctgactcccgagcaccagcccattgcccagggatgttctgattccttggagtccatccctgcgggacaggcagcttccgatgatttaagggacgtgccaggagctgttggtggtgcaagcccagaacatgccgagccggaggtccaggtggtgccggggtctggccagatcatcttcctgcccttcacctgcattggctacacggccaccaatcaggacttcatccagcgcctgagcacactgatccggcaggccatcgagcggcagctgcctgcctggatcgaggctgccaaccagcgggaggagggccagggtgaacagggcgaggaggaggatgaggaggaggaagaagaggaggacgtggctgagaaccgctactttgaaatggggcccccagacgtggaggaggaggagggaggaggccagggggaggaagaggaggaggaagaggaggatgaagaggccgaggaggagcgcctggctctggaatgggccctgggcgcggacgaggacttcctgctggagcacatccgcatcctcaaggtgctgtggtgcttcctgatccatgtgcagggcagtatccgccagttcgccgcctgccttgtgctcaccgacttcggcatcgcagtcttcgagatcccgcaccaggagtctcggggcagcagccagcacatcctctcctccctgcgctttgtcttttgcttcccgcatggcgacctcaccgagtttggcttcctcatgccggagctgtgtctggtgctcaaggtacggcacagtgagaacacgctcttcattatctcggacgccgccaacctgcacgagttccacgcggacctgcgctcatgctttgcaccccagcacatggccatgctgtgtagccccatcctctacggcagccacaccagcctgcaggagttcctgcgccagctgctcaccttctacaaggtggctggcggctgccaggagcgcagccagggctgcttccccgtctacctggtctacagtgacaagcgcatggtgcagacggccgccggggactactcaggcaacatcgagtgggccagctgcacactctgttcagccgtgcggcgctcctgctgcgcgccctctgaggccgtcaagtccgccgccatcccctactggctgttgctcacgccccagcacctcaacgtcatcaaggccgacttcaaccccatgcccaaccgtggcacccacaactgtcgcaaccgcaacagcttcaagctcagccgtgtgccgctctccaccgtgctgctggaccccacacgcagctgtacccagcctcggggcgcctttgctgatggccacgtgctagagctgctcgtggggtaccgctttgtcactgccatcttcgtgctgccccacgagaagttccacttcctgcgcgtctacaaccagctgcgggcctcgctgcaggacctgaagactgtggtcatcgccaagacccccgggacgggaggcagcccccagggctcctttgcggatggccagcctgccgagcgcagggccagcaatgaccagcgtccccaggaggtcccagcagaggctctggccccggccccagtggaagtcccagctccagcccctgcagcagcctcagcctcaggcccagcgaagactccggccccagcagaggcctcaacttcagctttggtcccagaggagacgccagtggaagctccagccccacccccagccgaggcccctgcccagtacccgagtgagcacctcatccaggccacctcggaggagaatcagatcccctcgcacttgcctgcctgcccgtcgctccggcacgtcgccagcctgcggggcagcgccatcatcgagctcttccacagcagcattgctgaggttgaaaacgaggagctgaggcacctcatgtggtcctcggtggtgttctaccagaccccagggctggaggtgactgcctgcgtgctgctctccaccaaggctgtgtactttgtgctccacgacggcctccgccgctacttctcagagccactgcaggatttctggcatcagaaaaacaccgactacaacaacagccctttccacatctcccagtgcttcgtgctaaagcttagtgacctgcagtcagtcaatgtggggcttttcgaccagcatttccggctgacgggttccaccccgatgcaggtggtcacgtgcttgacgcgggacagctacctgacgcactgcttcctccagcacctcatggtcgtgctgtcctctctggaacgcacgccctcgccggagcctgttgacaaggacttctactccgagtttgggaacaagaccacagggaagatggagaactacgagctgatccactctagtcgcgtcaagtttacctaccccagtgaggaggagattggggacctgacgttcactgtggcccaaaagatggctgagccagagaaggccccagccctcagcatcctgctgtacgtgcaggccttccaggtgggcatgccaccccctgggtgctgcaggggccccctgcgccccaagacactcctgctcaccagctccgagatcttcctcctggatgaggactgtgtccactacccactgcccgagtttgccaaagagccgccgcagagagacaggtaccggctggacgatggccgccgcgtccgggacctggaccgagtgctcatgggctaccagacctacccgcaggccctcaccctcgtcttcgatgacgtgcaaggtcatgacctcatgggcagtgtcaccctggaccactttggggaggtgccaggtggcccggctagagccagccagggccgtgaagtccagtggcaggtgtttgtccccagtgctgagagcagagagaagctcatctcgctgttggctcgccagtgggaggccctgtgtggccgtgagctgcctgtcgagctcaccggctagcccaggccacagccagcctgtcgtgtccagcctgacgcctactggggcagggcagcaggcttttgtgttctctaaaaatgttttatcctccctttggtaccttaatttgactgtcctcgcagagaatgtgaacatgtgtgtgtgttgtgttaattctttctcatgttgggagtgagaatgccgggcccctcagggctgtcggtgtgctgtcagcctcccacaggtggtacagccgtgcacaccagtgtcgtgtctgctgttgtgggaccgttgttaacacgtgacactgtgggtctgactttctcttctacacgtcctttcctgaagtgtcgagtccagtcctttgttgctgttgctgttgctgttgctgttgctgttggcatcttgctgctaatcctgaggctggtagcagaatgcacattggaagctcccaccccatattgttcttcaaagtggaggtctcccctgatccagacaagtgggagagcccgtgggggcaggggacctggagctgccagcaccaagcgtgattcctgctgcctgtattctctattccaataaagcagagtttgacaccgtcaaaaaaaaaaaa

SEQ ID NO: 310957 - DNA, 5635 bp, Homo sapiens
gaactggcccagaatcactctcgccctgctccggcgtctgcgccgggcggcggtggcggcggagacccgaacatggcgaccgcgcgcaccttcgggcccgagcgggaagccgagccggccaaggaagcgcgcgtcgtgggctcggagcttgtggacacttatacggtttacatcatccaggtcactgatggcagccatgagtggacagtaaagcaccgctacagcgacttccatgacctgcatgaaaagctcgttgcagagagaaagattgataaaaacctgcttccgcccaaaaagataattgggaaaaactcaagaagcttggtggagaagagggagaaggatctggaggtctacctccagaagctcctggctgccttccctggcgtgacccccagagtactggcccacttcttgcattttcacttctatgagataaatggcatcaccgcggcactggctgaagagctctttgagaaaggagaacagctcctgggggccggcgaggtctttgccattggacccctgcagctgtatgccgtcacggagcagctgcagcagggaaagcccacgtgcgccagtggggatgccaagaccgacctcgggcacatcctggacttcacctgtcgccttaagtaccttaaggtttctggcacagaaggaccttttgggaccagcaacattcaggagcagctcctgccgttcgacctatcaatattcaagtccctgcatcaggtggagataagtcactgtgatgctaagcacatcagagggctggtcgcatcgaagcccaccttagccacgctgagtgtccgcttctcagcaacctcgatgaaggaagtccttgttcctgaagcctcagaatttgatgagtgggagcctgaaggcacaaccctagaaggccctgtgactgccgtcatccccacttggcaggcattgaccacgcttgacctgagccacaacagcatctccgagatcgacgagtctgtgaaactgatcccaaagattgagttcctggacctgagtcacaatggattgctggttgtggacaatctgcaggtagtgcctttggagaccagtgctgcccgcacacactcccaaggccccgccctgagatttcaggagactgacgcagccttgggaattggccaggggttgtaagggcaggggttgctgtcttcgctttaggatcccagcaatgcactgagtgattgttgctctagttccaaagaattaggaagcatgagtaaatacaaaccaggcatgatgatgcacctccgtcctgaaggtggacagccatgttttcaacgcccaccccaactgtctgcaggggtgccactgtgctgtggcatgtgcggcagagaagagggacttcccttcctaaaataactgtcagagtgacttgcagaactgggtagtttgggttggaaggcccatcctgccattagtgtcaggcccctatctttggagacttgacctgagccactttacgctgttctccacgccgctgcagcacctgtataaccttgtgcatctggacctgtcctacaacaagctctcctccttggaagggcttcacaccaagctggggaacatcaagaccttaaacctggcaggcaacctcctagagagtctgagtggcctgcacaagctctactcactggtcaacctggatctccgggacaacaggatcgaacagatggaggaggtccggagcataggcagcctcccgtgtctggagcacgtgtctctgctgaacaaccctctgagcatcatccccgactaccggaccaaggtgctggctcagttcggagagagggcctcagaggtctgtctggatgacacagtgaccacagagaaggagctggacactgtggaagtgctgaaagcaattcagaaagccaaggaggtcaagtccaaactgagcaacccagagaagaagggtggtgaagactcccggctctcagctgccccctgcatcagacccagcagctcccctcccactgtggctcccgcatctgcctccctgccccagcccatcctctctaaccaaggcatcctcggagatgagtgagtgaagcaggtctcatgagcgtgtctgctggcccggcccccacggaagaggggagggtgtgccgtcccgagtggagccgaggctcgggacacgcaggaaaggacgccgcctgcccgggctcctggagacgcagaacttggaatcatgttcgttcaggaggaggccctggccagcagcctctcgtccactgacagtctgactcccgagcaccagcccattgcccagggatgttctgattccttggagtccatccctgcgggacaggcagcttccgatgatttaagggacgtgccaggagctgttggtggtgcaagcccagaacatgccgagccggaggtccaggtggtgccggggtctggccagatcatcttcctgcccttcacctgcattggctacacggccaccaatcaggacttcatccagcgcctgagcacactgatccggcaggccatcgagcggcagctgcctgcctggatcgaggctgccaaccagcgggaggagggccagggtgaacagggcgaggaggaggatgaggaggaggaagaagaggaggacgtggctgagaaccgctactttgaaatggggcccccagacgtggaggaggaggagggaggaggccagggggaggaagaggaggaggaagaggaggatgaagaggccgaggaggagcgcctggctctggaatgggccctgggcgcggacgaggacttcctgctggagcacatccgcatcctcaaggtgctgtggtgcttcctgatccatgtgcagggcagtatccgccagttcgccgcctgccttgtgctcaccgacttcggcatcgcagtcttcgagatcccgcaccaggagtctcggggcagcagccagcacatcctctcctccctgcgctttgtcttttgcttcccgcatggcgacctcaccgagtttggcttcctcatgccggagctgtgtctggtgctcaaggtacggcacagtgagaacacgctcttcattatctcggacgccgccaacctgcacgagttccacgcggacctgcgctcatgctttgcaccccagcacatggccatgctgtgtagccccatcctctacggcagccacaccagcctgcaggagttcctgcgccagctgctcaccttctacaaggtggctggcggctgccaggagcgcagccagggctgcttccccgtctacctggtctacagtgacaagcgcatggtgcagacggccgccggggactactcaggcaacatcgagtgggccagctgcacactctgttcagccgtgcggcgctcctgctgcgcgccctctgaggccgtcaagtccgccgccatcccctactggctgttgctcacgccccagcacctcaacgtcatcaaggccgacttcaaccccatgcccaaccgtggcacccacaactgtcgcaaccgcaacagcttcaagctcagccgtgtgccgctctccaccgtgctgctggaccccacacgcagctgtacccagcctcggggcgcctttgctgatggccacgtgctagagctgctcgtggggtaccgctttgtcactgccatcttcgtgctgccccacgagaagttccacttcctgcgcgtctacaaccagctgcgggcctcgctgcaggacctgaagactgtggtcatcgccaagacccccgggacgggaggcagcccccagggctcctttgcggatggccagcctgccgagcgcagggccagcaatgaccagcgtccccaggaggtcccagcagaggctctggccccggccccagtggaagtcccagctccagcccctgcagcagcctcagcctcaggcccagcgaagactccggccccagcagaggcctcaacttcagctttggtcccagaggagacgccagtggaagctccagccccacccccagccgaggcccctgcccagtacccgagtgagcacctcatccaggccacctcggaggagaatcagatcccctcgcacttgcctgcctgcccgtcgctccggcacgtcgccagcctgcggggcagcgccatcatcgagctcttccacagcagcattgctgagatttctggcatcagaaaaacaccgactacaacaacagccctttccacatctcccagtgcttcgtgctaaagcttagtgacctgcagtcagtcaatgtggggcttttcgaccagcatttccggctgacgggttccaccccgatgcaggtggtcacgtgcttgacgcgggacagctacctgacgcactgcttcctccagcacctcatggtcgtgctgtcctctctggaacgcacgccctcgccggagcctgttgacaaggacttctactccgagtttgggaacaagaccacagggaagatggagaactacgagctgatccactctagtcgcgtcaagtttacctaccccagtgaggaggagattggggacctgacgttcactgtggcccaaaagatggctgagccagagaaggccccagccctcagcatcctgctgtacgtgcaggccttccaggtgggcatgccaccccctgggtgctgcaggggccccctgcgccccaagacactcctgctcaccagctccgagatcttcctcctggatgaggactgtgtccactacccactgcccgagtttgccaaagagccgccgcagagagacaggtaccggctggacgatggccgccgcgtccgggacctggaccgagtgctcatgggctaccagacctacccgcaggccctcaccctcgtcttcgatgacgtgcaaggtcatgacctcatgggcagtgtcaccctggaccactttggggaggtgccaggtggcccggctagagccagccagggccgtgaagtccagtggcaggtgtttgtccccagtgctgagagcagagagaagctcatctcgctgttggctcgccagtgggaggccctgtgtggccgtgagctgcctgtcgagctcaccggctagcccaggccacagccagcctgtcgtgtccagcctgacgcctactggggcagggcagcaggcttttgtgttctctaaaaatgttttatcctccctttggtaccttaatttgactgtcctcgcagagaatgtgaacatgtgtgtgtgttgtgttaattctttctcatgttgggagtgagaatgccgggcccctcagggctgtcggtgtgctgtcagcctcccacaggtggtacagccgtgcacaccagtgtcgtgtctgctgttgtgggaccgttgttaacacgtgacactgtgggtctgactttctcttctacacgtcctttcctgaagtgtcgagtccagtcctttgttgctgttgctgttgctgttgctgttgctgttggcatcttgctgctaatcctgaggctggtagcagaatgcacattggaagctcccaccccatattgttcttcaaagtggaggtctcccctgatccagacaagtgggagagcccgtgggggcaggggacctggagctgccagcaccaagcgtgattcctgctgcctgtattctctattccaataaagcagagtttgacaccgtcaaaaaaaaaaaa

SEQ ID NO: 310958 - DNA, 5255 bp, Homo sapiens
gaactggcccagaatcactctcgccctgctccggcgtctgcgccgggcggcggtggcggcggagacccgaacatggcgaccgcgcgcaccttcgggcccgagcgggaagccgagccggccaaggaagcgcgcgtcgtgggctcggagcttgtggacacttatacggtttacatcatccaggtcactgatggcagccatgagtggacagtaaagcaccgctacagcgacttccatgacctgcatgaaaagctcgttgcagagagaaagattgataaaaacctgcttccgcccaaaaagataattgggaaaaactcaagaagcttggtggagaagagggagaaggatctggaggtctacctccagaagctcctggctgccttccctggcgtgacccccagagtactggcccacttcttgcattttcacttctatgagataaatggcatcaccgcggcactggctgaagagctctttgagaaaggagaacagctcctgggggccggcgaggtctttgccattggacccctgcagctgtatgccgtcacggagcagctgcagcagggaaagcccacgtgcgccagtggggatgccaagaccgacctcgggcacatcctggacttcacctgtcgccttaagtaccttaaggtttctggcacagaaggaccttttgggaccagcaacattcaggagcagctcctgccgttcgacctatcaatattcaagtccctgcatcaggtggagataagtcactgtgatgctaagcacatcagagggctggtcgcatcgaagcccaccttagccacgctgagtgtccgcttctcagcaacctcgatgaaggaagtccttgttcctgaagcctcagaatttgatgagtgggagcctgaaggcacaaccctagaaggccctgtgactgccgtcatccccacttggcaggcattgaccacgcttgacctgagccacaacagcatctccgagatcgacgagtctgtgaaactgatcccaaagattgagttcctggacctgagtcacaatggattgctggttgtggacaatctgcagcacctgtataaccttgtgcatctggacctgtcctacaacaagctctcctccttggaagggcttcacaccaagctggggaacatcaagaccttaaacctggcaggcaacctcctagagagtctgagtggcctgcacaagctctactcactggtcaacctggatctccgggacaacaggatcgaacagagaccatgaaacgtgttggcgtgttgctgaagtgttaagagaagggaccaaaggggatggaactcataccttgcagatggaggaggtccggagcataggcagcctcccgtgtctggagcacgtgtctctgctgaacaaccctctgagcatcatccccgactaccggaccaaggtgctggctcagttcggagagagggcctcagaggtctgtctggatgacacagtgaccacagagaaggagctggacactgtggaagtgctgaaagcaattcagaaagccaaggaggtcaagtccaaactgagcaacccagagaagaagggtggtgaagactcccggctctcagctgccccctgcatcagacccagcagctcccctcccactgtggctcccgcatctgcctccctgccccagcccatcctctctaaccaaggaatcatgttcgttcaggaggaggccctggccagcagcctctcgtccactgacagtctgactcccgagcaccagcccattgcccagggatgttctgattccttggagtccatccctgcgggacaggcagcttccgatgatttaagggacgtgccaggagctgttggtggtgcaagcccagaacatgccgagccggaggtccaggtggtgccggggtctggccagatcatcttcctgcccttcacctgcattggctacacggccaccaatcaggacttcatccagcgcctgagcacactgatccggcaggccatcgagcggcagctgcctgcctggatcgaggctgccaaccagcgggaggagggccagggtgaacagggcgaggaggaggatgaggaggaggaagaagaggaggacgtggctgagaaccgctactttgaaatggggcccccagacgtggaggaggaggagggaggaggccagggggaggaagaggaggaggaagaggaggatgaagaggccgaggaggagcgcctggctctggaatgggccctgggcgcggacgaggacttcctgctggagcacatccgcatcctcaaggtgctgtggtgcttcctgatccatgtgcagggcagtatccgccagttcgccgcctgccttgtgctcaccgacttcggcatcgcagtcttcgagatcccgcaccaggagtctcggggcagcagccagcacatcctctcctccctgcgctttgtcttttgcttcccgcatggcgacctcaccgagtttggcttcctcatgccggagctgtgtctggtgctcaaggtacggcacagtgagaacacgctcttcattatctcggacgccgccaacctgcacgagttccacgcggacctgcgctcatgctttgcaccccagcacatggccatgctgtgtagccccatcctctacggcagccacaccagcctgcaggagttcctgcgccagctgctcaccttctacaaggtggctggcggctgccaggagcgcagccagggctgcttccccgtctacctggtctacagtgacaagcgcatggtgcagacggccgccggggactactcaggcaacatcgagtgggccagctgcacactctgttcagccgtgcggcgctcctgctgcgcgccctctgaggccgtcaagtccgccgccatcccctactggctgttgctcacgccccagcacctcaacgtcatcaaggccgacttcaaccccatgcccaaccgtggcacccacaactgtcgcaaccgcaacagcttcaagctcagccgtgtgccgctctccaccgtgctgctggaccccacacgcagctgtacccagcctcggggcgcctttgctgatggccacgtgctagagctgctcgtggggtaccgctttgtcactgccatcttcgtgctgccccacgagaagttccacttcctgcgcgtctacaaccagctgcgggcctcgctgcaggacctgaagactgtggtcatcgccaagacccccgggacgggaggcagcccccagggctcctttgcggatggccagcctgccgagcgcagggccagcaatgaccagcgtccccaggaggtcccagcagaggctctggccccggccccagtggaagtcccagctccagcccctgcagcagcctcagcctcaggcccagcgaagactccggccccagcagaggcctcaacttcagctttggtcccagaggagacgccagtggaagctccagccccacccccagccgaggcccctgcccagtacccgagtgagcacctcatccaggccacctcggaggagaatcagatcccctcgcacttgcctgcctgcccgtcgctccggcacgtcgccagcctgcggggcagcgccatcatcgagctcttccacagcagcattgctgaggttgaaaacgaggagctgaggcacctcatgtggtcctcggtggtgttctaccagaccccagggctggaggtgactgcctgcgtgctgctctccaccaaggctgtgtactttgtgctccacgacggcctccgccgctacttctcagagccactgcaggatttctggcatcagaaaaacaccgactacaacaacagccctttccacatctcccagtgcttcgtgctaaagcttagtgacctgcagtcagtcaatgtggggcttttcgaccagcatttccggctgacgggttccaccccgatgcaggtggtcacgtgcttgacgcgggacagctacctgacgcactgcttcctccagcacctcatggtcgtgctgtcctctctggaacgcacgccctcgccggagcctgttgacaaggacttctactccgagtttgggaacaagaccacagggaagatggagaactacgagctgatccactctagtcgcgtcaagtttacctaccccagtgaggaggagattggggacctgacgttcactgtggcccaaaagatggctgagccagagaaggccccagccctcagcatcctgctgtacgtgcaggccttccaggtgggcatgccaccccctgggtgctgcaggggccccctgcgccccaagacactcctgctcaccagctccgagatcttcctcctggatgaggactgtgtccactacccactgcccgagtttgccaaagagccgccgcagagagacaggtaccggctggacgatggccgccgcgtccgggacctggaccgagtgctcatgggctaccagacctacccgcaggccctcaccctcgtcttcgatgacgtgcaaggtcatgacctcatgggcagtgtcaccctggaccactttggggaggtgccaggtggcccggctagagccagccagggccgtgaagtccagtggcaggtgtttgtccccagtgctgagagcagagagaagctcatctcgctgttggctcgccagtgggaggccctgtgtggccgtgagctgcctgtcgagctcaccggctagcccaggccacagccagcctgtcgtgtccagcctgacgcctactggggcagggcagcaggcttttgtgttctctaaaaatgttttatcctccctttggtaccttaatttgactgtcctcgcagagaatgtgaacatgtgtgtgtgttgtgttaattctttctcatgttgggagtgagaatgccgggcccctcagggctgtcggtgtgctgtcagcctcccacaggtggtacagccgtgcacaccagtgtcgtgtctgctgttgtgggaccgttgttaacacgtgacactgtgggtctgactttctcttctacacgtcctttcctgaagtgtcgagtccagtcctttgttgctgttgctgttgctgttgctgttgctgttggcatcttgctgctaatcctgaggctggtagcagaatgcacattggaagctcccaccccatattgttcttcaaagtggaggtctcccctgatccagacaagtgggagagcccgtgggggcaggggacctggagctgccagcaccaagcgtgattcctgctgcctgtattctctattccaataaagcagagtttgacaccgtcaaaaaaaaaaaa

SEQ ID NO: 310959 - DNA, 4632 bp, Homo sapiens
gatcacttgagcccaggagtttgagaccagtctgggctatgtagggagacctcgtttctacagaaaaaaattttttaattagctgggcaaggtggtgtacgcctgtagtcccagctactcaagaggctgagatgggaggatttgcttgtgcctgcgagtttgaggctgcagtgagccatgatggcgccactgtactccagcctgggtgacagagtgagactgtgtctcaaagaaaaaacggctaggcgctgtggctcacgtctgtagtcccagcactttgggaggctgaggaagtccttgttcctgaagcctcagaatttgatgagtgggagcctgaaggcacaaccctagaaggccctgtgactgccgtcatccccacttggcaggcattgaccacgcttgacctgagccacaacagcatctccgagatcgacgagtctgtgaaactgatcccaaagattgagttcctggacctgagtcacaatggattgctggttgtggacaatctgcagcacctgtataaccttgtgcatctggacctgtcctacaacaagctctcctccttggaagggcttcacaccaagctggggaacatcaagaccttaaacctggcaggcaacctcctagagagtctgagtggcctgcacaagctctactcactggtcaacctggatctccgggacaacaggatcgaacagatggaggaggtccggagcataggcagcctcccgtgtctggagcacgtgtctctgctgaacaaccctctgagcatcatccccgactaccggaccaaggtgctggctcagttcggagagagggcctcagaggtctgtctggatgacacagtgaccacagagaaggagctggacactgtggaagtgctgaaagcaattcagaaagccaaggaggtcaagtccaaactgagcaacccagagaagaagggtggtgaagactcccggctctcagctgccccctgcatcagacccagcagctcccctcccactgtggctcccgcatctgcctccctgccccagcccatcctctctaaccaaggaatcatgttcgttcaggaggaggccctggccagcagcctctcgtccactgacagtctgactcccgagcaccagcccattgcccagggatgttctgattccttggagtccatccctgcgggacaggcagcttccgatgatttaagggacgtgccaggagctgttggtggtgcaagcccagaacatgccgagccggaggtccaggtggtgccggggtctggccagatcatcttcctgcccttcacctgcattggctacacggccaccaatcaggacttcatccagcgcctgagcacactgatccggcaggccatcgagcggcagctgcctgcctggatcgaggctgccaaccagcgggaggagggccagggtgaacagggcgaggaggaggatgaggaggaggaagaagaggaggacgtggctgagaaccgctactttgaaatggggcccccagacgtggaggaggaggagggaggaggccagggggaggaagaggaggaggaagaggaggatgaagaggccgaggaggagcgcctggctctggaatgggccctgggcgcggacgaggacttcctgctggagcacatccgcatcctcaaggtgctgtggtgcttcctgatccatgtgcagggcagtatccgccagttcgccgcctgccttgtgctcaccgacttcggcatcgcagtcttcgagatcccgcaccaggagtctcggggcagcagccagcacatcctctcctccctgcgctttgtcttttgcttcccgcatggcgacctcaccgagtttggcttcctcatgccggagctgtgtctggtgctcaaggtacggcacagtgagaacacgctcttcattatctcggacgccgccaacctgcacgagttccacgcggacctgcgctcatgctttgcaccccagcacatggccatgctgtgtagccccatcctctacggcagccacaccagcctgcaggagttcctgcgccagctgctcaccttctacaaggtggctggcggctgccaggagcgcagccagggctgcttccccgtctacctggtctacagtgacaagcgcatggtgcagacggccgccggggactactcaggcaacatcgagtgggccagctgcacactctgttcagccgtgcggcgctcctgctgcgcgccctctgaggccgtcaagtccgccgccatcccctactggctgttgctcacgccccagcacctcaacgtcatcaaggccgacttcaaccccatgcccaaccgtggcacccacaactgtcgcaaccgcaacagcttcaagctcagccgtgtgccgctctccaccgtgctgctggaccccacacgcagctgtacccagcctcggggcgcctttgctgatggccacgtgctagagctgctcgtggggtaccgctttgtcactgccatcttcgtgctgccccacgagaagttccacttcctgcgcgtctacaaccagctgcgggcctcgctgcaggacctgaagactgtggtcatcgccaagacccccgggacgggaggcagcccccagggctcctttgcggatggccagcctgccgagcgcagggccagcaatgaccagcgtccccaggaggtcccagcagaggctctggccccggccccagtggaagtcccagctccagcccctgcagcagcctcagcctcaggcccagcgaagactccggccccagcagaggcctcaacttcagctttggtcccagaggagacgccagtggaagctccagccccacccccagccgaggcccctgcccagtacccgagtgagcacctcatccaggccacctcggaggagaatcagatcccctcgcacttgcctgcctgcccgtcgctccggcacgtcgccagcctgcggggcagcgccatcatcgagctcttccacagcagcattgctgaggttgaaaacgaggagctgaggcacctcatgtggtcctcggtggtgttctaccagaccccagggctggaggtgactgcctgcgtgctgctctccaccaaggctgtgtactttgtgctccacgacggcctccgccgctacttctcagagccactgcaggatttctggcatcagaaaaacaccgactacaacaacagccctttccacatctcccagtgcttcgtgctaaagcttagtgacctgcagtcagtcaatgtggggcttttcgaccagcatttccggctgacgggttccaccccgatgcaggtggtcacgtgcttgacgcgggacagctacctgacgcactgcttcctccagcacctcatggtcgtgctgtcctctctggaacgcacgccctcgccggagcctgttgacaaggacttctactccgagtttgggaacaagaccacagggaagatggagaactacgagctgatccactctagtcgcgtcaagtttacctaccccagtgaggaggagattggggacctgacgttcactgtggcccaaaagatggctgagccagagaaggccccagccctcagcatcctgctgtacgtgcaggccttccaggtgggcatgccaccccctgggtgctgcaggggccccctgcgccccaagacactcctgctcaccagctccgagatcttcctcctggatgaggactgtgtccactacccactgcccgagtttgccaaagagccgccgcagagagacaggtaccggctggacgatggccgccgcgtccgggacctggaccgagtgctcatgggctaccagacctacccgcaggccctcaccctcgtcttcgatgacgtgcaaggtcatgacctcatgggcagtgtcaccctggaccactttggggaggtgccaggtggcccggctagagccagccagggccgtgaagtccagtggcaggtgtttgtccccagtgctgagagcagagagaagctcatctcgctgttggctcgccagtgggaggccctgtgtggccgtgagctgcctgtcgagctcaccggctagcccaggccacagccagcctgtcgtgtccagcctgacgcctactggggcagggcagcaggcttttgtgttctctaaaaatgttttatcctccctttggtaccttaatttgactgtcctcgcagagaatgtgaacatgtgtgtgtgttgtgttaattctttctcatgttgggagtgagaatgccgggcccctcagggctgtcggtgtgctgtcagcctcccacaggtggtacagccgtgcacaccagtgtcgtgtctgctgttgtgggaccgttgttaacacgtgacactgtgggtctgactttctcttctacacgtcctttcctgaagtgtcgagtccagtcctttgttgctgttgctgttgctgttgctgttgctgttggcatcttgctgctaatcctgaggctggtagcagaatgcacattggaagctcccaccccatattgttcttcaaagtggaggtctcccctgatccagacaagtgggagagcccgtgggggcaggggacctggagctgccagcaccaagcgtgattcctgctgcctgtattctctattccaataaagcagagtttgacaccgtcaaaaaaaaaaaa

SEQ ID NO: 310960 - DNA, 4440 bp, Homo sapiens
ggttactctaaggatcccctcttaccatcacagtgatgattgtcctcgcgacgaacttagccacgctgagtgtccgcttctcagcaacctcgatgaaggaagtccttgttcctgaagcctcagaatttgatgagtgggagcctgaaggcacaaccctagaaggccctgtgactgccgtcatccccacttggcaggcattgaccacgcttgacctgagccacaacagcatctccgagatcgacgagtctgtgaaactgatcccaaagattgagttcctggacctgagtcacaatggattgctggttgtggacaatctgcagcacctgtataaccttgtgcatctggacctgtcctacaacaagctctcctccttggaagggcttcacaccaagctggggaacatcaagaccttaaacctggcaggcaacctcctagagagtctgagtggcctgcacaagctctactcactggtcaacctggatctccgggacaacaggatcgaacagatggaggaggtccggagcataggcagcctcccgtgtctggagcacgtgtctctgctgaacaaccctctgagcatcatccccgactaccggaccaaggtgctggctcagttcggagagagggcctcagaggtctgtctggatgacacagtgaccacagagaaggagctggacactgtggaagtgctgaaagcaattcagaaagccaaggaggtcaagtccaaactgagcaacccagagaagaagggtggtgaagactcccggctctcagctgccccctgcatcagacccagcagctcccctcccactgtggctcccgcatctgcctccctgccccagcccatcctctctaaccaaggaatcatgttcgttcaggaggaggccctggccagcagcctctcgtccactgacagtctgactcccgagcaccagcccattgcccagggatgttctgattccttggagtccatccctgcgggacaggcagcttccgatgatttaagggacgtgccaggagctgttggtggtgcaagcccagaacatgccgagccggaggtccaggtggtgccggggtctggccagatcatcttcctgcccttcacctgcattggctacacggccaccaatcaggacttcatccagcgcctgagcacactgatccggcaggccatcgagcggcagctgcctgcctggatcgaggctgccaaccagcgggaggagggccagggtgaacagggcgaggaggaggatgaggaggaggaagaagaggaggacgtggctgagaaccgctactttgaaatggggcccccagacgtggaggaggaggagggaggaggccagggggaggaagaggaggaggaagaggaggatgaagaggccgaggaggagcgcctggctctggaatgggccctgggcgcggacgaggacttcctgctggagcacatccgcatcctcaaggtgctgtggtgcttcctgatccatgtgcagggcagtatccgccagttcgccgcctgccttgtgctcaccgacttcggcatcgcagtcttcgagatcccgcaccaggagtctcggggcagcagccagcacatcctctcctccctgcgctttgtcttttgcttcccgcatggcgacctcaccgagtttggcttcctcatgccggagctgtgtctggtgctcaaggtacggcacagtgagaacacgctcttcattatctcggacgccgccaacctgcacgagttccacgcggacctgcgctcatgctttgcaccccagcacatggccatgctgtgtagccccatcctctacggcagccacaccagcctgcaggagttcctgcgccagctgctcaccttctacaaggtggctggcggctgccaggagcgcagccagggctgcttccccgtctacctggtctacagtgacaagcgcatggtgcagacggccgccggggactactcaggcaacatcgagtgggccagctgcacactctgttcagccgtgcggcgctcctgctgcgcgccctctgaggccgtcaagtccgccgccatcccctactggctgttgctcacgccccagcacctcaacgtcatcaaggccgacttcaaccccatgcccaaccgtggcacccacaactgtcgcaaccgcaacagcttcaagctcagccgtgtgccgctctccaccgtgctgctggaccccacacgcagctgtacccagcctcggggcgcctttgctgatggccacgtgctagagctgctcgtggggtaccgctttgtcactgccatcttcgtgctgccccacgagaagttccacttcctgcgcgtctacaaccagctgcgggcctcgctgcaggacctgaagactgtggtcatcgccaagacccccgggacgggaggcagcccccagggctcctttgcggatggccagcctgccgagcgcagggccagcaatgaccagcgtccccaggaggtcccagcagaggctctggccccggccccagtggaagtcccagctccagcccctgcagcagcctcagcctcaggcccagcgaagactccggccccagcagaggcctcaacttcagctttggtcccagaggagacgccagtggaagctccagccccacccccagccgaggcccctgcccagtacccgagtgagcacctcatccaggccacctcggaggagaatcagatcccctcgcacttgcctgcctgcccgtcgctccggcacgtcgccagcctgcggggcagcgccatcatcgagctcttccacagcagcattgctgaggttgaaaacgaggagctgaggcacctcatgtggtcctcggtggtgttctaccagaccccagggctggaggtgactgcctgcgtgctgctctccaccaaggctgtgtactttgtgctccacgacggcctccgccgctacttctcagagccactgcaggatttctggcatcagaaaaacaccgactacaacaacagccctttccacatctcccagtgcttcgtgctaaagcttagtgacctgcagtcagtcaatgtggggcttttcgaccagcatttccggctgacgggttccaccccgatgcaggtggtcacgtgcttgacgcgggacagctacctgacgcactgcttcctccagcacctcatggtcgtgctgtcctctctggaacgcacgccctcgccggagcctgttgacaaggacttctactccgagtttgggaacaagaccacagggaagatggagaactacgagctgatccactctagtcgcgtcaagtttacctaccccagtgaggaggagattggggacctgacgttcactgtggcccaaaagatggctgagccagagaaggccccagccctcagcatcctgctgtacgtgcaggccttccaggtgggcatgccaccccctgggtgctgcaggggccccctgcgccccaagacactcctgctcaccagctccgagatcttcctcctggatgaggactgtgtccactacccactgcccgagtttgccaaagagccgccgcagagagacaggtaccggctggacgatggccgccgcgtccgggacctggaccgagtgctcatgggctaccagacctacccgcaggccctcaccctcgtcttcgatgacgtgcaaggtcatgacctcatgggcagtgtcaccctggaccactttggggaggtgccaggtggcccggctagagccagccagggccgtgaagtccagtggcaggtgtttgtccccagtgctgagagcagagagaagctcatctcgctgttggctcgccagtgggaggccctgtgtggccgtgagctgcctgtcgagctcaccggctagcccaggccacagccagcctgtcgtgtccagcctgacgcctactggggcagggcagcaggcttttgtgttctctaaaaatgttttatcctccctttggtaccttaatttgactgtcctcgcagagaatgtgaacatgtgtgtgtgttgtgttaattctttctcatgttgggagtgagaatgccgggcccctcagggctgtcggtgtgctgtcagcctcccacaggtggtacagccgtgcacaccagtgtcgtgtctgctgttgtgggaccgttgttaacacgtgacactgtgggtctgactttctcttctacacgtcctttcctgaagtgtcgagtccagtcctttgttgctgttgctgttgctgttgctgttgctgttggcatcttgctgctaatcctgaggctggtagcagaatgcacattggaagctcccaccccatattgttcttcaaagtggaggtctcccctgatccagacaagtgggagagcccgtgggggcaggggacctggagctgccagcaccaagcgtgattcctgctgcctgtattctctattccaataaagcagagtttgacaccgtcaaaaaaaaaaaa

SEQ ID NO: 310961 - DNA, 5090 bp, Homo sapiens
gaactggcccagaatcactctcgccctgctccggcgtctgcgccgggcggcggtggcggcggagacccgaacatggcgaccgcgcgcaccttcgggcccgagcgggaagccgagccggccaaggaagcgcgcgtcgtgggctcggagcttgtggacacttatacggtttacatcatccaggtcactgatggcagccatgagtggacagtaaagcaccgctacagcgacttccatgacctgcatgaaaagctcgttgcagagagaaagattgataaaaacctgcttccgcccaaaaagataattgggaaaaactcaagaagcttggtggagaagagggagaaggatctggaggtctacctccagaagctcctggctgccttccctggcgtgacccccagagtactggcccacttcttgcattttcacttctatgagataaatggcatcaccgcggcactggctgaagagctctttgagaaaggagaacagctcctgggggccggcgaggtctttgccattggacccctgcagctgtatgccgtcacggagcagctgcagcagggaaagcccacgtgcgccagtggggatgccaagaccgacctcgggcacatcctggacttcacctgtcgccttaagtaccttaaggtttctggcacagaaggaccttttgggaccagcaacattcaggagcagctcctgccgttcgacctatcaatattcaagtccctgcatcaggtggagataagtcactgtgatgctaagcacatcagagggctggtcgcatcgaagcccaccttagccacgctgagtgtccgcttctcagcaacctcgatgaaggaagtccttgttcctgaagcctcagaatttgatgagtgggagcctgaaggcacaaccctagaaggccctgtgactgccgtcatccccacttggcaggcattgaccacgcttgacctgagccacaacagcatctccgagatcgacgagtctgtgaaactgatcccaaagattgagttcctggacctgagtcacaatggattgctggttgtggacaatctgcagcacctgtataaccttgtgcatctggacctgtcctacaacaagctctcctccttggaagggcttcacaccaagctggggaacatcaagaccttaaacctggcaggcaacctcctagagagtctgagtggcctgcacaagctctactcactggtcaacctggatctccgggacaacaggatcgaacagatggaggaggtccggagcataggcagcctcccgtgtctggagcacgtgtctctgctgaacaaccctctgagcatcatccccgactaccggaccaaggtgctggctcagttcggagagagggcctcagaggtctgtctggatgacacagtgaccacagagaaggagctggacactgtggaagtgctgaaagcaattcagaaagccaaggaggtcaagtccaaactgagcaacccagagaagaagggtggtgaagactcccggctctcagctgccccctgcatcagacccagcagctcccctcccactgtggctcccgcatctgcctccctgccccagcccatcctctctaaccaaggaatcatgttcgttcaggaggaggccctggccagcagcctctcgtccactgacagtctgactcccgagcaccagcccattgcccagggatgttctgattccttggagtccatccctgcgggacaggcagcttccgatgatttaagggacgtgccaggagctgttggtggtgcaagcccagaacatgccgagccggaggtccaggtggtgccggggtctggccagatcatcttcctgcccttcacctgcattggctacacggccaccaatcaggacttcatccagcgcctgagcacactgatccggcaggccatcgagcggcagctgcctgcctggatcgaggctgccaaccagcgggaggagggccagggtgaacagggcgaggaggaggatgaggaggaggaagaagaggaggacgtggctgagaaccgctactttgaaatggggcccccagacgtggaggaggaggagggaggaggccagggggaggaagaggaggaggaagaggaggatgaagaggccgaggaggagcgcctggctctggaatgggccctgggcgcggacgaggacttcctgctggagcacatccgcatcctcaaggtgctgtggtgcttcctgatccatgtgcagggcagtatccgccagttcgccgcctgccttgtgctcaccgacttcggcatcgcagtcttcgagatcccgcaccaggagtctcggggcagcagccagcacatcctctcctccctgcgctttgtcttttgcttcccgcatggcgacctcaccgagtttggcttcctcatgccggagctgtgtctggtgctcaaggtacggcacagtgagaacacgctcttcattatctcggacgccgccaacctgcacgagttccacgcggacctgcgctcatgctttgcaccccagcacatggccatgctgtgtagccccatcctctacggcagccacaccagcctgcaggagttcctgcgccagctgctcaccttctacaaggtggctggcggctgccaggagcgcagccagggctgcttccccgtctacctggtctacagtgacaagcgcatggtgcagacggccgccggggactactcaggcaacatcgagtgggccagctgcacactctgttcagccgtgcggcgctcctgctgcgcgccctctgaggccgtcaagtccgccgccatcccctactggctgttgctcacgccccagcacctcaacgtcatcaaggccgacttcaaccccatgcccaaccgtggcacccacaactgtcgcaaccgcaacagcttcaagctcagccgtgtgccgctctccaccgtgctgctggaccccacacgcagctgtacccagcctcggggcgcctttgctgatggccacgtgctagagctgctcgtggggtaccgctttgtcactgccatcttcgtgctgccccacgagaagttccacttcctgcgcgtctacaaccagctgcgggcctcgctgcaggacctgaagactgtggtcatcgccaagacccccgggacgggaggcagcccccagggctcctttgcggatggccagcctgccgagcgcagggccagcaatgaccagcgtccccaggaggtcccagcagaggctctggccccggccccagtggaagtcccagctccagcccctgcagcagcctcagcctcaggcccagcgaagactccggccccagcagaggcctcaacttcagctttggtcccagaggagacgccagtggaagctccagccccacccccagccgaggcccctgcccagtacccgagtgagcacctcatccaggccacctcggaggagaatcagatcccctcgcacttgcctgcctgcccgtcgctccggcacgtcgccagcctgcggggcagcgccatcatcgagctcttccacagcagcattgctgaggttgaaaacgaggagctgaggcacctcatgtggtcctcggtggtgttctaccagaccccagggctggaggtgactgcctgcgtgctgctctccaccaaggctgtgtactttgtgctccacgacggcctccgccgctacttctcagagccactgcaggatttctggcatcagaaaaacaccgactacaacaacagccctttccacatctcccagtgcttcgtgctaaagcttagtgacctgcagtcagtcaatgtggggcttttcgaccagcatttccggctgacgggttccaccccgatgcaggtggtcacgtgcttgacgcgggacagctacctgacgcactgcttcctccagcacctcatggtcgtgctgtcctctctggaacgcacgccctcgccggagcctgttgacaaggacttctactccgagtttgggaacaagaccacagggaagatggagaactacgagctgatccactctagtcgcgtcaagtttacctaccccagtgaggaggagattggggacctgacgttcactgtggcccaaaagatggctgagccagagaaggccccagccctcagcatcctgctgtacgtgcaggccttccaggtgggcatgccaccccctgggtgctgcaggggccccctgcgccccaagacactcctgctcaccagctccgagatcttcctcctggatgaggactgtgtccactacccactgcccgagtttgccaaagagccgccgcagagagacaggtaccggctggacgatggccgccgcgtccgggacctggaccgagtgctcatgggctaccagacctacccgcaggccctcaccctcgtcttcgatgacgtgcaaggtcatgacctcatgggcagttgctgagagcagagagaagctcatctcgctgttggctcgccagtgggaggccctgtgtggccgtgagctgcctgtcgagctcaccggctagcccaggccacagccagcctgtcgtgtccagcctgacgcctactggggcagggcagcaggcttttgtgttctctaaaaatgttttatcctccctttggtaccttaatttgactgtcctcgcagagaatgtgaacatgtgtgtgtgttgtgttaattctttctcatgttgggagtgagaatgccgggcccctcagggctgtcggtgtgctgtcagcctcccacaggtggtacagccgtgcacaccagtgtcgtgtctgctgttgtgggaccgttgttaacacgtgacactgtgggtctgactttctcttctacacgtcctttcctgaagtgtcgagtccagtcctttgttgctgttgctgttgctgttgctgttgctgttggcatcttgctgctaatcctgaggctggtagcagaatgcacattggaagctcccaccccatattgttcttcaaagtggaggtctcccctgatccagacaagtgggagagcccgtgggggcaggggacctggagctgccagcaccaagcgtgattcctgctgcctgtattctctattccaataaagcagagtttgacaccgtcaaaaaaaaaaaa

SEQ ID NO: 310962 - DNA, 4182 bp, Homo sapiens
caacttacggctaggtacgaggcctgggtggtgatggattgctggttgtggacaatctgcagcacctgtataaccttgtgcatctggacctgtcctacaacaagctctcctccttggaagggcttcacaccaagctggggaacatcaagaccttaaacctggcaggcaacctcctagagagtctgagtggcctgcacaagctctactcactggtcaacctggatctccgggacaacaggatcgaacagatggaggaggtccggagcataggcagcctcccgtgtctggagcacgtgtctctgctgaacaaccctctgagcatcatccccgactaccggaccaaggtgctggctcagttcggagagagggcctcagaggtctgtctggatgacacagtgaccacagagaaggagctggacactgtggaagtgctgaaagcaattcagaaagccaaggaggtcaagtccaaactgagcaacccagagaagaagggtggtgaagactcccggctctcagctgccccctgcatcagacccagcagctcccctcccactgtggctcccgcatctgcctccctgccccagcccatcctctctaaccaaggaatcatgttcgttcaggaggaggccctggccagcagcctctcgtccactgacagtctgactcccgagcaccagcccattgcccagggatgttctgattccttggagtccatccctgcgggacaggcagcttccgatgatttaagggacgtgccaggagctgttggtggtgcaagcccagaacatgccgagccggaggtccaggtggtgccggggtctggccagatcatcttcctgcccttcacctgcattggctacacggccaccaatcaggacttcatccagcgcctgagcacactgatccggcaggccatcgagcggcagctgcctgcctggatcgaggctgccaaccagcgggaggagggccagggtgaacagggcgaggaggaggatgaggaggaggaagaagaggaggacgtggctgagaaccgctactttgaaatggggcccccagacgtggaggaggaggagggaggaggccagggggaggaagaggaggaggaagaggaggatgaagaggccgaggaggagcgcctggctctggaatgggccctgggcgcggacgaggacttcctgctggagcacatccgcatcctcaaggtgctgtggtgcttcctgatccatgtgcagggcagtatccgccagttcgccgcctgccttgtgctcaccgacttcggcatcgcagtcttcgagatcccgcaccaggagtctcggggcagcagccagcacatcctctcctccctgcgctttgtcttttgcttcccgcatggcgacctcaccgagtttggcttcctcatgccggagctgtgtctggtgctcaaggtacggcacagtgagaacacgctcttcattatctcggacgccgccaacctgcacgagttccacgcggacctgcgctcatgctttgcaccccagcacatggccatgctgtgtagccccatcctctacggcagccacaccagcctgcaggagttcctgcgccagctgctcaccttctacaaggtggctggcggctgccaggagcgcagccagggctgcttccccgtctacctggtctacagtgacaagcgcatggtgcagacggccgccggggactactcaggcaacatcgagtgggccagctgcacactctgttcagccgtgcggcgctcctgctgcgcgccctctgaggccgtcaagtccgccgccatcccctactggctgttgctcacgccccagcacctcaacgtcatcaaggccgacttcaaccccatgcccaaccgtggcacccacaactgtcgcaaccgcaacagcttcaagctcagccgtgtgccgctctccaccgtgctgctggaccccacacgcagctgtacccagcctcggggcgcctttgctgatggccacgtgctagagctgctcgtggggtaccgctttgtcactgccatcttcgtgctgccccacgagaagttccacttcctgcgcgtctacaaccagctgcgggcctcgctgcaggacctgaagactgtggtcatcgccaagacccccgggacgggaggcagcccccagggctcctttgcggatggccagcctgccgagcgcagggccagcaatgaccagcgtccccaggaggtcccagcagaggctctggccccggccccagtggaagtcccagctccagcccctgcagcagcctcagcctcaggcccagcgaagactccggccccagcagaggcctcaacttcagctttggtcccagaggagacgccagtggaagctccagccccacccccagccgaggcccctgcccagtacccgagtgagcacctcatccaggccacctcggaggagaatcagatcccctcgcacttgcctgcctgcccgtcgctccggcacgtcgccagcctgcggggcagcgccatcatcgagctcttccacagcagcattgctgaggttgaaaacgaggagctgaggcacctcatgtggtcctcggtggtgttctaccagaccccagggctggaggtgactgcctgcgtgctgctctccaccaaggctgtgtactttgtgctccacgacggcctccgccgctacttctcagagccactgcaggatttctggcatcagaaaaacaccgactacaacaacagccctttccacatctcccagtgcttcgtgctaaagcttagtgacctgcagtcagtcaatgtggggcttttcgaccagcatttccggctgacgggttccaccccgatgcaggtggtcacgtgcttgacgcgggacagctacctgacgcactgcttcctccagcacctcatggtcgtgctgtcctctctggaacgcacgccctcgccggagcctgttgacaaggacttctactccgagtttgggaacaagaccacagggaagatggagaactacgagctgatccactctagtcgcgtcaagtttacctaccccagtgaggaggagattggggacctgacgttcactgtggcccaaaagatggctgagccagagaaggccccagccctcagcatcctgctgtacgtgcaggccttccaggtgggcatgccaccccctgggtgctgcaggggccccctgcgccccaagacactcctgctcaccagctccgagatcttcctcctggatgaggactgtgtccactacccactgcccgagtttgccaaagagccgccgcagagagacaggtaccggctggacgatggccgccgcgtccgggacctggaccgagtgctcatgggctaccagacctacccgcaggccctcaccctcgtcttcgatgacgtgcaaggtcatgacctcatgggcagtgtcaccctggaccactttggggaggtgccaggtggcccggctagagccagccagggccgtgaagtccagtggcaggtgtttgtccccagtgctgagagcagagagaagctcatctcgctgttggctcgccagtgggaggccctgtgtggccgtgagctgcctgtcgagctcaccggctagcccaggccacagccagcctgtcgtgtccagcctgacgcctactggggcagggcagcaggcttttgtgttctctaaaaatgttttatcctccctttggtaccttaatttgactgtcctcgcagagaatgtgaacatgtgtgtgtgttgtgttaattctttctcatgttgggagtgagaatgccgggcccctcagggctgtcggtgtgctgtcagcctcccacaggtggtacagccgtgcacaccagtgtcgtgtctgctgttgtgggaccgttgttaacacgtgacactgtgggtctgactttctcttctacacgtcctttcctgaagtgtcgagtccagtcctttgttgctgttgctgttgctgttgctgttgctgttggcatcttgctgctaatcctgaggctggtagcagaatgcacattggaagctcccaccccatattgttcttcaaagtggaggtctcccctgatccagacaagtgggagagcccgtgggggcaggggacctggagctgccagcaccaagcgtgattcctgctgcctgtattctctattccaataaagcagagtttgacaccgtcaaaaaaaaaaaa

SEQ ID NO: 310963 - DNA, 5123 bp, Homo sapiens
gaactggcccagaatcactctcgccctgctccggcgtctgcgccgggcggcggtggcggcggagacccgaacatggcgaccgcgcgcaccttcgggcccgagcgggaagccgagccggccaaggaagcgcgcgtcgtgggctcggagcttgtggacacttatacggtttacatcatccaggtcactgatggcagccatgagtggacagtaaagcaccgctacagcgacttccatgacctgcatgaaaagctcgttgcagagagaaagattgataaaaacctgcttccgcccaaaaagataattgggaaaaactcaagaagcttggtggagaagagggagaaggatctggaggtctacctccagaagctcctggctgccttccctggcgtgacccccagagtactggcccacttcttgcattttcacttctatgagataaatggcatcaccgcggcactggctgaagagctctttgagaaaggagaacagctcctgggggccggcgaggtctttgccattggacccctgcagctgtatgccgtcacggagcagctgcagcagggaaagcccacgtgcgccagtggggatgccaagaccgacctcgggcacatcctggacttcacctgtcgccttaagtaccttaaggtttctggcacagaaggaccttttgggaccagcaacattcaggagcagctcctgccgttcgacctatcaatattcaagtccctgcatcaggtggagataagtcactgtgatgctaagcacatcagagggctggtcgcatcgaagcccaccttagccacgctgagtgtccgcttctcagcaacctcgatgaaggaagtccttgttcctgaagcctcagaatttgatgagtgggagcctgaaggcacaaccctagaaggccctgtgactgccgtcatccccacttggcaggcattgaccacgcttgacctgagccacaacagcatctccgagatcgacgagtctgtgaaactgatcccaaagattgagttcctggacctgagtcacaatggattgctggttgtggacaatctgcagcacctgtataaccttgtgcatctggacctgtcctacaacaagctctcctccttggaagggcttcacaccaagctggggaacatcaagaccttaaacctggcaggcaacctcctagagagtctgagtggcctgcacaagctctactcactggtcaacctggatctccgggacaacaggatcgaacagatggaggaggtccggagcataggcagcctcccgtgtctggagcacgtgtctctgctgaacaaccctctgagcatcatccccgactaccggaccaaggtgctggctcagttcggagagagggcctcagaggtctgtctggatgacacagtgaccacagagaaggagctggacactgtggaagtgctgaaagcaattcagaaagccaaggaggtcaagtccaaactgagcaacccagagaagaagggtggtgaagactcccggctctcagctgccccctgcatcagacccagcagctcccctcccactgtggctcccgcatctgcctccctgccccagcccatcctctctaaccaaggaatcatgttcgttcaggaggaggccctggccagcagcctctcgtccactgacagtctgactcccgagcaccagcccattgcccagggatgttctgattccttggagtccatccctgcgggacaggcagcttccgatgatttaagggacgtgccaggagctgttggtggtgcaagcccagaacatgccgagccggaggtccaggtggtgccggggtctggccagatcatcttcctgcccttcacctgcattggctacacggccaccaatcaggacttcatccagcgcctgagcacactgatccggcaggccatcgagcggcagctgcctgcctggatcgaggctgccaaccagcgggaggagggccagggtgaacagggcgaggaggaggatgaggaggaggaagaagaggaggacgtggctgagaaccgctactttgaaatggggcccccagacgtggaggaggaggagggaggaggccagggggaggaagaggaggaggaagaggaggatgaagaggccgaggaggagcgcctggctctggaatgggccctgggcgcggacgaggacttcctgctggagcacatccgcatcctcaaggtgctgtggtgcttcctgatccatgtgcagggcagtatccgccagttcgccgcctgccttgtgctcaccgacttcggcatcgcagtcttcgagatcccgcaccaggagtctcggggcagcagccagcacatcctctcctccctgcgctttgtcttttgcttcccgcatggcgacctcaccgagtttggcttcctcatgccggagctgtgtctggtgctcaaggtacggcacagtgagaacacgctcttcattatctcggacgccgccaacctgcacgagttccacgcggacctgcgctcatgctttgcaccccagcacatggccatgctgtgtagccccatcctctacggcagccacaccagcctgcaggagttcctgcgccagctgctcaccttctacaaggtggctggcggctgccaggagcgcagccagggctgcttccccgtctacctggtctacagtgacaagcgcatggtgcagacggccgccggggactactcaggcaacatcgagtgggccagctgcacactctgttcagccgtgcggcgctcctgctgcgcgccctctgaggccgtcaagtccgccgccatcccctactggctgttgctcacgccccagcacctcaacgtcatcaaggccgacttcaaccccatgcccaaccgtggcacccacaactgtcgcaaccgcaacagcttcaagctcagccgtgtgccgctctccaccgtgctgctggaccccacacgcagctgtacccagcctcggggcgcctttgctgatggccacgtgctagagctgctcgtggggtaccgctttgtcactgccatcttcgtgctgccccacgagaagttccacttcctgcgcgtctacaaccagctgcgggcctcgctgcaggacctgaagactgtggtcatcgccaagacccccgggacgggaggcagcccccagggctcctttgcggatggccagcctgccgagcgcagggccagcaatgaccagcgtccccaggaggtcccagcagaggctctggccccggccccagtggaagtcccagctccagcccctgcagcagcctcagcctcaggcccagcgaagactccggccccagcagaggcctcaacttcagctttggtcccagaggagacgccagtggaagctccagccccacccccagccgaggcccctgcccagtacccgagtgagcacctcatccaggccacctcggaggagaatcagatcccctcgcacttgcctgcctgcccgtcgctccggcacgtcgccagcctgcggggcagcgccatcatcgagctcttccacagcagcattgctgaggttgaaaacgaggagctgaggcacctcatgtggtcctcggtggtgttctaccagaccccagggctggaggtgactgcctgcgtgctgctctccaccaaggctgtgtactttgtgctccacgacggcctccgccgctacttctcagagccactgcaggtgcttcgtgctaaagcttagtgacctgcagtcagtcaatgtggggcttttcgaccagcatttccggctgacgggttccaccccgatgcaggtggtcacgtgcttgacgcgggacagctacctgacgcactgcttcctccagcacctcatggtcgtgctgtcctctctggaacgcacgccctcgccggagcctgttgacaaggacttctactccgagtttgggaacaagaccacagggaagatggagaactacgagctgatccactctagtcgcgtcaagtttacctaccccagtgaggaggagattggggacctgacgttcactgtggcccaaaagatggctgagccagagaaggccccagccctcagcatcctgctgtacgtgcaggccttccaggtgggcatgccaccccctgggtgctgcaggggccccctgcgccccaagacactcctgctcaccagctccgagatcttcctcctggatgaggactgtgtccactacccactgcccgagtttgccaaagagccgccgcagagagacaggtaccggctggacgatggccgccgcgtccgggacctggaccgagtgctcatgggctaccagacctacccgcaggccctcaccctcgtcttcgatgacgtgcaaggtcatgacctcatgggcagtgtcaccctggaccactttggggaggtgccaggtggcccggctagagccagccagggccgtgaagtccagtggcaggtgtttgtccccagtgctgagagcagagagaagctcatctcgctgttggctcgccagtgggaggccctgtgtggccgtgagctgcctgtcgagctcaccggctagcccaggccacagccagcctgtcgtgtccagcctgacgcctactggggcagggcagcaggcttttgtgttctctaaaaatgttttatcctccctttggtaccttaatttgactgtcctcgcagagaatgtgaacatgtgtgtgtgttgtgttaattctttctcatgttgggagtgagaatgccgggcccctcagggctgtcggtgtgctgtcagcctcccacaggtggtacagccgtgcacaccagtgtcgtgtctgctgttgtgggaccgttgttaacacgtgacactgtgggtctgactttctcttctacacgtcctttcctgaagtgtcgagtccagtcctttgttgctgttgctgttgctgttgctgttgctgttggcatcttgctgctaatcctgaggctggtagcagaatgcacattggaagctcccaccccatattgttcttcaaagtggaggtctcccctgatccagacaagtgggagagcccgtgggggcaggggacctggagctgccagcaccaagcgtgattcctgctgcctgtattctctattccaataaagcagagtttgacaccgtcaaaaaaaaaaaa

SEQ ID NO: 310964 - DNA, 4341 bp, Homo sapiens
caacttacggctaggtacgaggcctgggtggtgatggattgctggttgtggacaatctgcagcacctgtataaccttgtgcatctggacctgtcctacaacaagctctcctccttggaagggcttcacaccaagctggggaacatcaagaccttaaacctggcaggcaacctcctagagagtctgagtggcctgcacaagctctactcactggtcaacctggatctccgggacaacaggatcgaacagatggaggaggtccggagcataggcagcctcccgtgtctggagcacgtgtctctgctgaacaaccctctgagcatcatccccgactaccggaccaaggtgctggctcagttcggagagagggcctcagaggtctgtctggatgacacagtgaccacagagaaggagctggacactgtggaagtgctgaaagcaattcagaaagccaaggaggtcaagtccaaactgagcaacccagagaagaagggtggtgaagactcccggctctcagctgccccctgcatcagacccagcagctcccctcccactgtggctcccgcatctgcctccctgccccagcccatcctctctaaccaaggcatcctcggagatgagtgagtgaagcaggtctcatgagcgtgtctgctggcccggcccccacggaagaggggagggtgtgccgtcccgagtggagccgaggctcgggacacgcaggaaaggacgccgcctgcccgggctcctggagacgcagaacttggaatcatgttcgttcaggaggaggccctggccagcagcctctcgtccactgacagtctgactcccgagcaccagcccattgcccagggatgttctgattccttggagtccatccctgcgggacaggcagcttccgatgatttaagggacgtgccaggagctgttggtggtgcaagcccagaacatgccgagccggaggtccaggtggtgccggggtctggccagatcatcttcctgcccttcacctgcattggctacacggccaccaatcaggacttcatccagcgcctgagcacactgatccggcaggccatcgagcggcagctgcctgcctggatcgaggctgccaaccagcgggaggagggccagggtgaacagggcgaggaggaggatgaggaggaggaagaagaggaggacgtggctgagaaccgctactttgaaatggggcccccagacgtggaggaggaggagggaggaggccagggggaggaagaggaggaggaagaggaggatgaagaggccgaggaggagcgcctggctctggaatgggccctgggcgcggacgaggacttcctgctggagcacatccgcatcctcaaggtgctgtggtgcttcctgatccatgtgcagggcagtatccgccagttcgccgcctgccttgtgctcaccgacttcggcatcgcagtcttcgagatcccgcaccaggagtctcggggcagcagccagcacatcctctcctccctgcgctttgtcttttgcttcccgcatggcgacctcaccgagtttggcttcctcatgccggagctgtgtctggtgctcaaggtacggcacagtgagaacacgctcttcattatctcggacgccgccaacctgcacgagttccacgcggacctgcgctcatgctttgcaccccagcacatggccatgctgtgtagccccatcctctacggcagccacaccagcctgcaggagttcctgcgccagctgctcaccttctacaaggtggctggcggctgccaggagcgcagccagggctgcttccccgtctacctggtctacagtgacaagcgcatggtgcagacggccgccggggactactcaggcaacatcgagtgggccagctgcacactctgttcagccgtgcggcgctcctgctgcgcgccctctgaggccgtcaagtccgccgccatcccctactggctgttgctcacgccccagcacctcaacgtcatcaaggccgacttcaaccccatgcccaaccgtggcacccacaactgtcgcaaccgcaacagcttcaagctcagccgtgtgccgctctccaccgtgctgctggaccccacacgcagctgtacccagcctcggggcgcctttgctgatggccacgtgctagagctgctcgtggggtaccgctttgtcactgccatcttcgtgctgccccacgagaagttccacttcctgcgcgtctacaaccagctgcgggcctcgctgcaggacctgaagactgtggtcatcgccaagacccccgggacgggaggcagcccccagggctcctttgcggatggccagcctgccgagcgcagggccagcaatgaccagcgtccccaggaggtcccagcagaggctctggccccggccccagtggaagtcccagctccagcccctgcagcagcctcagcctcaggcccagcgaagactccggccccagcagaggcctcaacttcagctttggtcccagaggagacgccagtggaagctccagccccacccccagccgaggcccctgcccagtacccgagtgagcacctcatccaggccacctcggaggagaatcagatcccctcgcacttgcctgcctgcccgtcgctccggcacgtcgccagcctgcggggcagcgccatcatcgagctcttccacagcagcattgctgaggttgaaaacgaggagctgaggcacctcatgtggtcctcggtggtgttctaccagaccccagggctggaggtgactgcctgcgtgctgctctccaccaaggctgtgtactttgtgctccacgacggcctccgccgctacttctcagagccactgcaggatttctggcatcagaaaaacaccgactacaacaacagccctttccacatctcccagtgcttcgtgctaaagcttagtgacctgcagtcagtcaatgtggggcttttcgaccagcatttccggctgacgggttccaccccgatgcaggtggtcacgtgcttgacgcgggacagctacctgacgcactgcttcctccagcacctcatggtcgtgctgtcctctctggaacgcacgccctcgccggagcctgttgacaaggacttctactccgagtttgggaacaagaccacagggaagatggagaactacgagctgatccactctagtcgcgtcaagtttacctaccccagtgaggaggagattggggacctgacgttcactgtggcccaaaagatggctgagccagagaaggccccagccctcagcatcctgctgtacgtgcaggccttccaggtgggcatgccaccccctgggtgctgcaggggccccctgcgccccaagacactcctgctcaccagctccgagatcttcctcctggatgaggactgtgtccactacccactgcccgagtttgccaaagagccgccgcagagagacaggtaccggctggacgatggccgccgcgtccgggacctggaccgagtgctcatgggctaccagacctacccgcaggccctcaccctcgtcttcgatgacgtgcaaggtcatgacctcatgggcagtgtcaccctggaccactttggggaggtgccaggtggcccggctagagccagccagggccgtgaagtccagtggcaggtgtttgtccccagtgctgagagcagagagaagctcatctcgctgttggctcgccagtgggaggccctgtgtggccgtgagctgcctgtcgagctcaccggctagcccaggccacagccagcctgtcgtgtccagcctgacgcctactggggcagggcagcaggcttttgtgttctctaaaaatgttttatcctccctttggtaccttaatttgactgtcctcgcagagaatgtgaacatgtgtgtgtgttgtgttaattctttctcatgttgggagtgagaatgccgggcccctcagggctgtcggtgtgctgtcagcctcccacaggtggtacagccgtgcacaccagtgtcgtgtctgctgttgtgggaccgttgttaacacgtgacactgtgggtctgactttctcttctacacgtcctttcctgaagtgtcgagtccagtcctttgttgctgttgctgttgctgttgctgttgctgttggcatcttgctgctaatcctgaggctggtagcagaatgcacattggaagctcccaccccatattgttcttcaaagtggaggtctcccctgatccagacaagtgggagagcccgtgggggcaggggacctggagctgccagcaccaagcgtgattcctgctgcctgtattctctattccaataaagcagagtttgacaccgtcaaaaaaaaaaaa

SEQ ID NO: 310965 - DNA, 4061 bp, Homo sapiens
tctgacaggccctgaggctgccctctgaacaggctcggggctgttggctcatgggacccattccctcaccggcagcacaagcaggttggctcctggttacaggaagccgggcttgtgactttactgtctggagcccgaatccctgtgcagggaaaagcttgcttttatcactgcctcatctctgtggggtgacccagccccagaacaccatgtttgtggggccaagatgggccatctctgtccctgtggacccatggaagaccaggcccattcgtctgcccactatcttagcgttttcaaagggctttcacctctgaacccaggcatcctcggagatgagtgagtgaagcaggtctcatgagcgtgtctgctggcccggcccccacggaagaggggagggtgtgccgtcccgagtggagccgaggctcgggacacgcaggaaaggacgccgcctgcccgggctcctggagacgcagaacttggaatcatgttcgttcaggaggaggccctggccagcagcctctcgtccactgacagtctgactcccgagcaccagcccattgcccagggatgttctgattccttggagtccatccctgcgggacaggcagcttccgatgatttaagggacgtgccaggagctgttggtggtgcaagcccagaacatgccgagccggaggtccaggtggtgccggggtctggccagatcatcttcctgcccttcacctgcattggctacacggccaccaatcaggacttcatccagcgcctgagcacactgatccggcaggccatcgagcggcagctgcctgcctggatcgaggctgccaaccagcgggaggagggccagggtgaacagggcgaggaggaggatgaggaggaggaagaagaggaggacgtggctgagaaccgctactttgaaatggggcccccagacgtggaggaggaggagggaggaggccagggggaggaagaggaggaggaagaggaggatgaagaggccgaggaggagcgcctggctctggaatgggccctgggcgcggacgaggacttcctgctggagcacatccgcatcctcaaggtgctgtggtgcttcctgatccatgtgcagggcagtatccgccagttcgccgcctgccttgtgctcaccgacttcggcatcgcagtcttcgagatcccgcaccaggagtctcggggcagcagccagcacatcctctcctccctgcgctttgtcttttgcttcccgcatggcgacctcaccgagtttggcttcctcatgccggagctgtgtctggtgctcaaggtacggcacagtgagaacacgctcttcattatctcggacgccgccaacctgcacgagttccacgcggacctgcgctcatgctttgcaccccagcacatggccatgctgtgtagccccatcctctacggcagccacaccagcctgcaggagttcctgcgccagctgctcaccttctacaaggtggctggcggctgccaggagcgcagccagggctgcttccccgtctacctggtctacagtgacaagcgcatggtgcagacggccgccggggactactcaggcaacatcgagtgggccagctgcacactctgttcagccgtgcggcgctcctgctgcgcgccctctgaggccgtcaagtccgccgccatcccctactggctgttgctcacgccccagcacctcaacgtcatcaaggccgacttcaaccccatgcccaaccgtggcacccacaactgtcgcaaccgcaacagcttcaagctcagccgtgtgccgctctccaccgtgctgctggaccccacacgcagctgtacccagcctcggggcgcctttgctgatggccacgtgctagagctgctcgtggggtaccgctttgtcactgccatcttcgtgctgccccacgagaagttccacttcctgcgcgtctacaaccagctgcgggcctcgctgcaggacctgaagactgtggtcatcgccaagacccccgggacgggaggcagcccccagggctcctttgcggatggccagcctgccgagcgcagggccagcaatgaccagcgtccccaggaggtcccagcagaggctctggccccggccccagtggaagtcccagctccagcccctgcagcagcctcagcctcaggcccagcgaagactccggccccagcagaggcctcaacttcagctttggtcccagaggagacgccagtggaagctccagccccacccccagccgaggcccctgcccagtacccgagtgagcacctcatccaggccacctcggaggagaatcagatcccctcgcacttgcctgcctgcccgtcgctccggcacgtcgccagcctgcggggcagcgccatcatcgagctcttccacagcagcattgctgaggttgaaaacgaggagctgaggcacctcatgtggtcctcggtggtgttctaccagaccccagggctggaggtgactgcctgcgtgctgctctccaccaaggctgtgtactttgtgctccacgacggcctccgccgctacttctcagagccactgcaggatttctggcatcagaaaaacaccgactacaacaacagccctttccacatctcccagtgcttcgtgctaaagcttagtgacctgcagtcagtcaatgtggggcttttcgaccagcatttccggctgacgggttccaccccgatgcaggtggtcacgtgcttgacgcgggacagctacctgacgcactgcttcctccagcacctcatggtcgtgctgtcctctctggaacgcacgccctcgccggagcctgttgacaaggacttctactccgagtttgggaacaagaccacagggaagatggagaactacgagctgatccactctagtcgcgtcaagtttacctaccccagtgaggaggagattggggacctgacgttcactgtggcccaaaagatggctgagccagagaaggccccagccctcagcatcctgctgtacgtgcaggccttccaggtgggcatgccaccccctgggtgctgcaggggccccctgcgccccaagacactcctgctcaccagctccgagatcttcctcctggatgaggactgtgtccactacccactgcccgagtttgccaaagagccgccgcagagagacaggtaccggctggacgatggccgccgcgtccgggacctggaccgagtgctcatgggctaccagacctacccgcaggccctcaccctcgtcttcgatgacgtgcaaggtcatgacctcatgggcagtgtcaccctggaccactttggggaggtgccaggtggcccggctagagccagccagggccgtgaagtccagtggcaggtgtttgtccccagtgctgagagcagagagaagctcatctcgctgttggctcgccagtgggaggccctgtgtggccgtgagctgcctgtcgagctcaccggctagcccaggccacagccagcctgtcgtgtccagcctgacgcctactggggcagggcagcaggcttttgtgttctctaaaaatgttttatcctccctttggtaccttaatttgactgtcctcgcagagaatgtgaacatgtgtgtgtgttgtgttaattctttctcatgttgggagtgagaatgccgggcccctcagggctgtcggtgtgctgtcagcctcccacaggtggtacagccgtgcacaccagtgtcgtgtctgctgttgtgggaccgttgttaacacgtgacactgtgggtctgactttctcttctacacgtcctttcctgaagtgtcgagtccagtcctttgttgctgttgctgttgctgttgctgttgctgttggcatcttgctgctaatcctgaggctggtagcagaatgcacattggaagctcccaccccatattgttcttcaaagtggaggtctcccctgatccagacaagtgggagagcccgtgggggcaggggacctggagctgccagcaccaagcgtgattcctgctgcctgtattctctattccaataaagcagagtttgacaccgtcaaaaaaaaaaaa

SEQ ID NO: 310966 - DNA, 3752 bp, Homo sapiens
gaagcttctgaggacagagtaatgtctacgtcccggtaggctttgaatggatgcccttcttctgacttctatacagcttggatgacggacttgtagatcctgaagctgatggtgacagagagaagagccaggatgaggtaagaaaccacactgatgacactgaatgctgccatggtgcacatcaacagggccctgaaactcattattcgtctctttctggtagaagatctggttgactccttgaagctggctgtcttcatgtggcatcgataaacaccggtgtttatcgatgccaccagcagcttccgatgatttaagggacgtgccaggagctgttggtggtgcaagcccagaacatgccgagccggaggtccaggtggtgccggggtctggccagatcatcttcctgcccttcacctgcattggctacacggccaccaatcaggacttcatccagcgcctgagcacactgatccggcaggccatcgagcggcagctgcctgcctggatcgaggctgccaaccagcgggaggagggccagggtgaacagggcgaggaggaggatgaggaggaggaagaagaggaggacgtggctgagaaccgctactttgaaatggggcccccagacgtggaggaggaggagggaggaggccagggggaggaagaggaggaggaagaggaggatgaagaggccgaggaggagcgcctggctctggaatgggccctgggcgcggacgaggacttcctgctggagcacatccgcatcctcaaggtgctgtggtgcttcctgatccatgtgcagggcagtatccgccagttcgccgcctgccttgtgctcaccgacttcggcatcgcagtcttcgagatcccgcaccaggagtctcggggcagcagccagcacatcctctcctccctgcgctttgtcttttgcttcccgcatggcgacctcaccgagtttggcttcctcatgccggagctgtgtctggtgctcaaggtacggcacagtgagaacacgctcttcattatctcggacgccgccaacctgcacgagttccacgcggacctgcgctcatgctttgcaccccagcacatggccatgctgtgtagccccatcctctacggcagccacaccagcctgcaggagttcctgcgccagctgctcaccttctacaaggtggctggcggctgccaggagcgcagccagggctgcttccccgtctacctggtctacagtgacaagcgcatggtgcagacggccgccggggactactcaggcaacatcgagtgggccagctgcacactctgttcagccgtgcggcgctcctgctgcgcgccctctgaggccgtcaagtccgccgccatcccctactggctgttgctcacgccccagcacctcaacgtcatcaaggccgacttcaaccccatgcccaaccgtggcacccacaactgtcgcaaccgcaacagcttcaagctcagccgtgtgccgctctccaccgtgctgctggaccccacacgcagctgtacccagcctcggggcgcctttgctgatggccacgtgctagagctgctcgtggggtaccgctttgtcactgccatcttcgtgctgccccacgagaagttccacttcctgcgcgtctacaaccagctgcgggcctcgctgcaggacctgaagactgtggtcatcgccaagacccccgggacgggaggcagcccccagggctcctttgcggatggccagcctgccgagcgcagggccagcaatgaccagcgtccccaggaggtcccagcagaggctctggccccggccccagtggaagtcccagctccagcccctgcagcagcctcagcctcaggcccagcgaagactccggccccagcagaggcctcaacttcagctttggtcccagaggagacgccagtggaagctccagccccacccccagccgaggcccctgcccagtacccgagtgagcacctcatccaggccacctcggaggagaatcagatcccctcgcacttgcctgcctgcccgtcgctccggcacgtcgccagcctgcggggcagcgccatcatcgagctcttccacagcagcattgctgaggttgaaaacgaggagctgaggcacctcatgtggtcctcggtggtgttctaccagaccccagggctggaggtgactgcctgcgtgctgctctccaccaaggctgtgtactttgtgctccacgacggcctccgccgctacttctcagagccactgcaggatttctggcatcagaaaaacaccgactacaacaacagccctttccacatctcccagtgcttcgtgctaaagcttagtgacctgcagtcagtcaatgtggggcttttcgaccagcatttccggctgacgggttccaccccgatgcaggtggtcacgtgcttgacgcgggacagctacctgacgcactgcttcctccagcacctcatggtcgtgctgtcctctctggaacgcacgccctcgccggagcctgttgacaaggacttctactccgagtttgggaacaagaccacagggaagatggagaactacgagctgatccactctagtcgcgtcaagtttacctaccccagtgaggaggagattggggacctgacgttcactgtggcccaaaagatggctgagccagagaaggccccagccctcagcatcctgctgtacgtgcaggccttccaggtgggcatgccaccccctgggtgctgcaggggccccctgcgccccaagacactcctgctcaccagctccgagatcttcctcctggatgaggactgtgtccactacccactgcccgagtttgccaaagagccgccgcagagagacaggtaccggctggacgatggccgccgcgtccgggacctggaccgagtgctcatgggctaccagacctacccgcaggccctcaccctcgtcttcgatgacgtgcaaggtcatgacctcatgggcagtgtcaccctggaccactttggggaggtgccaggtggcccggctagagccagccagggccgtgaagtccagtggcaggtgtttgtccccagtgctgagagcagagagaagctcatctcgctgttggctcgccagtgggaggccctgtgtggccgtgagctgcctgtcgagctcaccggctagcccaggccacagccagcctgtcgtgtccagcctgacgcctactggggcagggcagcaggcttttgtgttctctaaaaatgttttatcctccctttggtaccttaatttgactgtcctcgcagagaatgtgaacatgtgtgtgtgttgtgttaattctttctcatgttgggagtgagaatgccgggcccctcagggctgtcggtgtgctgtcagcctcccacaggtggtacagccgtgcacaccagtgtcgtgtctgctgttgtgggaccgttgttaacacgtgacactgtgggtctgactttctcttctacacgtcctttcctgaagtgtcgagtccagtcctttgttgctgttgctgttgctgttgctgttgctgttggcatcttgctgctaatcctgaggctggtagcagaatgcacattggaagctcccaccccatattgttcttcaaagtggaggtctcccctgatccagacaagtgggagagcccgtgggggcaggggacctggagctgccagcaccaagcgtgattcctgctgcctgtattctctattccaataaagcagagtttgacaccgtcaaaaaaaaaaaa

SEQ ID NO: 310967 - DNA, 3895 bp, Homo sapiens
atgaggcgcgttctgctttgggccttttgccttaacttgaatgcttctcccctcttcctgcccagtcatctctgtccctgtggacccatggaagaccaggcccattcgtctgcccactatcttagcgttttcaaagggctttcacctctgaacccaggcatcctcggagatgagtgagtgaagcaggtctcatgagcgtgtctgctggcccggcccccacggaagaggggagggtgtgccgtcccgagtggagccgaggctcgggacacgcaggaaaggacgccgcctgcccgggctcctggagacgcagaacttggaatcatgttcgttcaggaggaggccctggccagcagcctctcgtccactgacagtctgactcccgagcaccagcccattgcccagggatgttctgattccttggagtccatccctgcgggacaggcagcttccgatgatttaagggacgtgccaggagctgttggtggtgcaagcccagaacatgccgagccggaggtccaggtggtgccggggtctggccagatcatcttcctgcccttcacctgcattggctacacggccaccaatcaggacttcatccagcgcctgagcacactgatccggcaggccatcgagcggcagctgcctgcctggatcgaggctgccaaccagcgggaggagggccagggtgaacagggcgaggaggaggatgaggaggaggaagaagaggaggacgtggctgagaaccgctactttgaaatggggcccccagacgtggaggaggaggagggaggaggccagggggaggaagaggaggaggaagaggaggatgaagaggccgaggaggagcgcctggctctggaatgggccctgggcgcggacgaggacttcctgctggagcacatccgcatcctcaaggtgctgtggtgcttcctgatccatgtgcagggcagtatccgccagttcgccgcctgccttgtgctcaccgacttcggcatcgcagtcttcgagatcccgcaccaggagtctcggggcagcagccagcacatcctctcctccctgcgctttgtcttttgcttcccgcatggcgacctcaccgagtttggcttcctcatgccggagctgtgtctggtgctcaaggtacggcacagtgagaacacgctcttcattatctcggacgccgccaacctgcacgagttccacgcggacctgcgctcatgctttgcaccccagcacatggccatgctgtgtagccccatcctctacggcagccacaccagcctgcaggagttcctgcgccagctgctcaccttctacaaggtggctggcggctgccaggagcgcagccagggctgcttccccgtctacctggtctacagtgacaagcgcatggtgcagacggccgccggggactactcaggcaacatcgagtgggccagctgcacactctgttcagccgtgcggcgctcctgctgcgcgccctctgaggccgtcaagtccgccgccatcccctactggctgttgctcacgccccagcacctcaacgtcatcaaggccgacttcaaccccatgcccaaccgtggcacccacaactgtcgcaaccgcaacagcttcaagctcagccgtgtgccgctctccaccgtgctgctggaccccacacgcagctgtacccagcctcggggcgcctttgctgatggccacgtgctagagctgctcgtggggtaccgctttgtcactgccatcttcgtgctgccccacgagaagttccacttcctgcgcgtctacaaccagctgcgggcctcgctgcaggacctgaagactgtggtcatcgccaagacccccgggacgggaggcagcccccagggctcctttgcggatggccagcctgccgagcgcagggccagcaatgaccagcgtccccaggaggtcccagcagaggctctggccccggccccagtggaagtcccagctccagcccctgcagcagcctcagcctcaggcccagcgaagactccggccccagcagaggcctcaacttcagctttggtcccagaggagacgccagtggaagctccagccccacccccagccgaggcccctgcccagtacccgagtgagcacctcatccaggccacctcggaggagaatcagatcccctcgcacttgcctgcctgcccgtcgctccggcacgtcgccagcctgcggggcagcgccatcatcgagctcttccacagcagcattgctgaggttgaaaacgaggagctgaggcacctcatgtggtcctcggtggtgttctaccagaccccagggctggaggtgactgcctgcgtgctgctctccaccaaggctgtgtactttgtgctccacgacggcctccgccgctacttctcagagccactgcaggatttctggcatcagaaaaacaccgactacaacaacagccctttccacatctcccagtgcttcgtgctaaagcttagtgacctgcagtcagtcaatgtggggcttttcgaccagcatttccggctgacgggttccaccccgatgcaggtggtcacgtgcttgacgcgggacagctacctgacgcactgcttcctccagcacctcatggtcgtgctgtcctctctggaacgcacgccctcgccggagcctgttgacaaggacttctactccgagtttgggaacaagaccacagggaagatggagaactacgagctgatccactctagtcgcgtcaagtttacctaccccagtgaggaggagattggggacctgacgttcactgtggcccaaaagatggctgagccagagaaggccccagccctcagcatcctgctgtacgtgcaggccttccaggtgggcatgccaccccctgggtgctgcaggggccccctgcgccccaagacactcctgctcaccagctccgagatcttcctcctggatgaggactgtgtccactacccactgcccgagtttgccaaagagccgccgcagagagacaggtaccggctggacgatggccgccgcgtccgggacctggaccgagtgctcatgggctaccagacctacccgcaggccctcaccctcgtcttcgatgacgtgcaaggtcatgacctcatgggcagtgtcaccctggaccactttggggaggtgccaggtggcccggctagagccagccagggccgtgaagtccagtggcaggtgtttgtccccagtgctgagagcagagagaagctcatctcgctgttggctcgccagtgggaggccctgtgtggccgtgagctgcctgtcgagctcaccggctagcccaggccacagccagcctgtcgtgtccagcctgacgcctactggggcagggcagcaggcttttgtgttctctaaaaatgttttatcctccctttggtaccttaatttgactgtcctcgcagagaatgtgaacatgtgtgtgtgttgtgttaattctttctcatgttgggagtgagaatgccgggcccctcagggctgtcggtgtgctgtcagcctcccacaggtggtacagccgtgcacaccagtgtcgtgtctgctgttgtgggaccgttgttaacacgtgacactgtgggtctgactttctcttctacacgtcctttcctgaagtgtcgagtccagtcctttgttgctgttgctgttgctgttgctgttgctgttggcatcttgctgctaatcctgaggctggtagcagaatgcacattggaagctcccaccccatattgttcttcaaagtggaggtctcccctgatccagacaagtgggagagcccgtgggggcaggggacctggagctgccagcaccaagcgtgattcctgctgcctgtattctctattccaataaagcagagtttgacaccgtcaaaaaaaaaaaa

SEQ ID NO: 310968 - DNA, 2686 bp, Homo sapiens
gcggccgctccaacacagaatggccatgtgctggggtgcaaagcatgagcgcaggtccgcgtggaactcctgcaggagttcctgcgccagctgctcaccttctacaaggtggctggcggctgccaggagcgcagccagggctgcttccccgtctacctggtctacagtgacaagcgcatggtgcagacggccgccggggactactcaggcaacatcgagtgggccagctgcacactctgttcagccgtgcggcgctcctgctgcgcgccctctgaggccgtcaagtccgccgccatcccctactggctgttgctcacgccccagcacctcaacgtcatcaaggccgacttcaaccccatgcccaaccgtggcacccacaactgtcgcaaccgcaacagcttcaagctcagccgtgtgccgctctccaccgtgctgctggaccccacacgcagctgtacccagcctcggggcgcctttgctgatggccacgtgctagagctgctcgtggggtaccgctttgtcactgccatcttcgtgctgccccacgagaagttccacttcctgcgcgtctacaaccagctgcgggcctcgctgcaggacctgaagactgtggtcatcgccaagacccccgggacgggaggcagcccccagggctcctttgcggatggccagcctgccgagcgcagggccagcaatgaccagcgtccccaggaggtcccagcagaggctctggccccggccccagtggaagtcccagctccagcccctgcagcagcctcagcctcaggcccagcgaagactccggccccagcagaggcctcaacttcagctttggtcccagaggagacgccagtggaagctccagccccacccccagccgaggcccctgcccagtacccgagtgagcacctcatccaggccacctcggaggagaatcagatcccctcgcacttgcctgcctgcccgtcgctccggcacgtcgccagcctgcggggcagcgccatcatcgagctcttccacagcagcattgctgaggttgaaaacgaggagctgaggcacctcatgtggtcctcggtggtgttctaccagaccccagggctggaggtgactgcctgcgtgctgctctccaccaaggctgtgtactttgtgctccacgacggcctccgccgctacttctcagagccactgcaggatttctggcatcagaaaaacaccgactacaacaacagccctttccacatctcccagtgcttcgtgctaaagcttagtgacctgcagtcagtcaatgtggggcttttcgaccagcatttccggctgacgggttccaccccgatgcaggtggtcacgtgcttgacgcgggacagctacctgacgcactgcttcctccagcacctcatggtcgtgctgtcctctctggaacgcacgccctcgccggagcctgttgacaaggacttctactccgagtttgggaacaagaccacagggaagatggagaactacgagctgatccactctagtcgcgtcaagtttacctaccccagtgaggaggagattggggacctgacgttcactgtggcccaaaagatggctgagccagagaaggccccagccctcagcatcctgctgtacgtgcaggccttccaggtgggcatgccaccccctgggtgctgcaggggccccctgcgccccaagacactcctgctcaccagctccgagatcttcctcctggatgaggactgtgtccactacccactgcccgagtttgccaaagagccgccgcagagagacaggtaccggctggacgatggccgccgcgtccgggacctggaccgagtgctcatgggctaccagacctacccgcaggccctcaccctcgtcttcgatgacgtgcaaggtcatgacctcatgggcagtgtcaccctggaccactttggggaggtgccaggtggcccggctagagccagccagggccgtgaagtccagtggcaggtgtttgtccccagtgctgagagcagagagaagctcatctcgctgttggctcgccagtgggaggccctgtgtggccgtgagctgcctgtcgagctcaccggctagcccaggccacagccagcctgtcgtgtccagcctgacgcctactggggcagggcagcaggcttttgtgttctctaaaaatgttttatcctccctttggtaccttaatttgactgtcctcgcagagaatgtgaacatgtgtgtgtgttgtgttaattctttctcatgttgggagtgagaatgccgggcccctcagggctgtcggtgtgctgtcagcctcccacaggtggtacagccgtgcacaccagtgtcgtgtctgctgttgtgggaccgttgttaacacgtgacactgtgggtctgactttctcttctacacgtcctttcctgaagtgtcgagtccagtcctttgttgctgttgctgttgctgttgctgttgctgttggcatcttgctgctaatcctgaggctggtagcagaatgcacattggaagctcccaccccatattgttcttcaaagtggaggtctcccctgatccagacaagtgggagagcccgtgggggcaggggacctggagctgccagcaccaagcgtgattcctgctgcctgtattctctattccaataaagcagagtttgacaccgtcaaaaaaaaaaaa

SEQ ID NO: 310969 - DNA, 5129 bp, Homo sapiens
gaactggcccagaatcactctcgccctgctccggcgtctgcgccgggcggcggtggcggcggagacccgaacatggcgaccgcgcgcaccttcgggcccgagcgggaagccgagccggccaaggaagcgcgcgtcgtgggctcggagcttgtggacacttatacggtttacatcatccaggtcactgatggcagccatgagtggacagtaaagcaccgctacagcgacttccatgacctgcatgaaaagctcgttgcagagagaaagattgataaaaacctgcttccgcccaaaaagataattgggaaaaactcaagaagcttggtggagaagagggagaaggatctggaggtctacctccagaagctcctggctgccttccctggcgtgacccccagagtactggcccacttcttgcattttcacttctatgagataaatggcatcaccgcggcactggctgaagagctctttgagaaaggagaacagctcctgggggccggcgaggtctttgccattggacccctgcagctgtatgccgtcacggagcagctgcagcagggaaagcccacgtgcgccagtggggatgccaagaccgacctcgggcacatcctggacttcacctgtcgccttaagtaccttaaggtttctggcacagaaggaccttttgggaccagcaacattcaggagcagctcctgccgttcgacctatcaatattcaagtccctgcatcaggtggagataagtcactgtgatgctaagcacatcagagggctggtcgcatcgaagcccaccttagccacgctgagtgtccgcttctcagcaacctcgatgaaggaagtccttgttcctgaagcctcagaatttgatgagtgggagcctgaaggcacaaccctagaaggccctgtgactgccgtcatccccacttggcaggcattgaccacgcttgacctgagccacaacagcatctccgagatcgacgagtctgtgaaactgatcccaaagattgagttcctggacctgagtcacaatggattgctggttgtggacaatctgcagcacctgtataaccttgtgcatctggacctgtcctacaacaagctctcctccttggaagggcttcacaccaagctggggaacatcaagaccttaaacctggcaggcaacctcctagagagtctgagtggcctgcacaagctctactcactggtcaacctggatctccgggacaacaggatcgaacagatggaggaggtccggagcataggcagcctcccgtgtctggagcacgtgtctctgctgaacaaccctctgagcatcatccccgactaccggaccaaggtgctggctcagttcggagagagggcctcagaggtctgtctggatgacacagtgaccacagagaaggagctggacactgtggaagtgctgaaagcaattcagaaagccaaggaggtcaagtccaaactgagcaacccagagaagaagggtggtgaagactcccggctctcagctgccccctgcatcagacccagcagctcccctcccactgtggctcccgcatctgcctccctgccccagcccatcctctctaaccaaggaatcatgttcgttcaggaggaggccctggccagcagcctctcgtccactgacagtctgactcccgagcaccagcccattgcccagggatgttctgattccttggagtccatccctgcgggacaggcagcttccgatgatttaagggacgtgccaggagctgttggtggtgcaagcccagaacatgccgagccggaggtccaggtggtgccggggtctggccagatcatcttcctgcccttcacctgcattggctacacggccaccaatcaggacttcatccagcgcctgagcacactgatccggcaggccatcgagcggcagctgcctgcctggatcgaggctgccaaccagcgggaggagggccagggtgaacagggcgaggaggaggatgaggaggaggaagaagaggaggacgtggctgagaaccgctactttgaaatggggcccccagacgtggaggaggaggagggaggaggccagggggaggaagaggaggaggaagaggaggatgaagaggccgaggaggagcgcctggctctggaatgggccctgggcgcggacgaggacttcctgctggagcacatccgcatcctcaaggtgctgtggtgcttcctgatccatgtgcagggcagtatccgccagttcgccgcctgccttgtgctcaccgacttcggcatcgcagtcttcgagatcccgcaccaggagtctcggggcagcagccagcacatcctctcctccctgcgctttgtcttttgcttcccgcatggcgacctcaccgagtttggcttcctcatgccggagctgtgtctggtgctcaaggtacggcacagtgagaacacgctcttcattatctcggacgccgccaacctgcacgagttccacgcggacctgcgctcatgctttgcaccccagcacatggccatgctgtgtagccccatcctctacggcagccacaccagcctgcaggagttcctgcgccagctgctcaccttctacaaggtggctggcggctgccaggagcgcagccagggctgcttccccgtctacctggtctacagtgacaagcgcatggtgcagacggccgccggggactactcaggcaacatcgagtgggccagctgcacactctgttcagccgtgcggcgctcctgctgcgcgccctctgaggccgtcaagtccgccgccatcccctactggctgttgctcacgccccagcacctcaacgtcatcaaggccgacttcaaccccatgcccaaccgtggcacccacaactgtcgcaaccgcaacagcttcaagctcagccgtgtgccgctctccaccgtgctgctggaccccacacgcagctgtacccagcctcggggcgcctttgctgatggccacgtgctagagctgctcgtggggtaccgctttgtcactgccatcttcgtgctgccccacgagaagttccacttcctgcgcgtctacaaccagctgcgggcctcgctgcaggacctgaagactgtggtcatcgccaagacccccgggacgggaggcagcccccagggctcctttgcggatggccagcctgccgagcgcagggccagcaatgaccagcgtccccaggaggtcccagcagaggctctggccccggccccagtggaagtcccagctccagcccctgcagcagcctcagcctcaggcccagcgaagactccggccccagcagaggcctcaacttcagctttggtcccagaggagacgccagtggaagctccagccccacccccagccgaggcccctgcccagtacccgagtgagcacctcatccaggccacctcggaggagaatcagatcccctcgcacttgcctgcctgcccgtcgctccggcacgtcgccagcctgcggggcagcgccatcatcgagctcttccacagcagcattgctgaggttgaaaacgaggagctgaggcacctcatgtggtcctcggtggtgttctaccagaccccagggctggaggtgactgcctgcgtgctgctctccaccaaggctgtgtactttgtgctccacgacggcctccgccgctacttctcagagccactgcaggatttctggcatcagaaaaacaccgactacaacaacagccctttccacatctcccagtgcttcgtgctaaagcttagtgacctgcagtcagtcaatgtggggcttttcgaccagcatttccggctgacgggttccaccccgatgcaggtggtcacgtgcttgacgcgggacagctacctgacgcactgcttcctccagcacctcatggtcgtgctgtcctctctggaacgcacgccctcgccggagcctgttgacaaggacttctactccgagtttgggaacaagaccacagggaagatggagaactacgagctgatccactctagtcgcgtcaagtttacctaccccagtgaggaggagattggggacctgacgttcactgtggcccaaaagatggctgagccagagaaggccccagccctcagcatcctgctgtacgtgcaggccttccaggtgggcatgccaccccctgggtgctgcaggggccccctgcgccccaagacactcctgctcaccagctccgagatcttcctcctggatgaggactgtgtccactacccactgcccgagtttgccaaagagccgccgcagagagacaggtaccggctggacgatggccgccgcgtccgggacctggaccgagtgctcatgggctaccagacctacccgcaggccctcaccctcgtcttcgatgacgtgcaaggtcatgacctcatgggcagtgtcaccctggaccactttggggaggtgccaggtggcccggctagagccagccagggccgtgaagtccagtggcaggtgtttgtccccagtgctgagagcagagagaagctcatctcgctgttggctcgccagtgggaggccctgtgtggccgtgagctgcctgtcgagctcaccggctagcccaggccacagccagcctgtcgtgtccagcctgacgcctactggggcagggcagcaggcttttgtgttctctaaaaatgaacatgtgtgtgtgttgtgttaattctttctcatgttgggagtgagaatgccgggcccctcagggctgtcggtgtgctgtcagcctcccacaggtggtacagccgtgcacaccagtgtcgtgtctgctgttgtgggaccgttgttaacacgtgacactgtgggtctgactttctcttctacacgtcctttcctgaagtgtcgagtccagtcctttgttgctgttgctgttgctgttgctgttgctgttggcatcttgctgctaatcctgaggctggtagcagaatgcacattggaagctcccaccccatattgttcttcaaagtggaggtctcccctgatccagacaagtgggagagcccgtgggggcaggggacctggagctgccagcaccaagcgtgattcctgctgcctgtattctctattccaataaagcagagtttgacaccgtcaaaaaaaaaaaa

SEQ ID NO: 310970 - DNA, 1712 bp, Homo sapiens
tgtccctggtatgtgcaggttgctagggtggtggagctgacaggaggccccccgtcttcaggttgaaaacgaggagctgaggcacctcatgtggtcctcggtggtgttctaccagaccccagggctggaggtgactgcctgcgtgctgctctccaccaaggctgtgtactttgtgctccacgacggcctccgccgctacttctcagagccactgcaggatttctggcatcagaaaaacaccgactacaacaacagccctttccacatctcccagtgcttcgtgctaaagcttagtgacctgcagtcagtcaatgtggggcttttcgaccagcatttccggctgacgggttccaccccgatgcaggtggtcacgtgcttgacgcgggacagctacctgacgcactgcttcctccagcacctcatggtcgtgctgtcctctctggaacgcacgccctcgccggagcctgttgacaaggacttctactccgagtttgggaacaagaccacagggaagatggagaactacgagctgatccactctagtcgcgtcaagtttacctaccccagtgaggaggagattggggacctgacgttcactgtggcccaaaagatggctgagccagagaaggccccagccctcagcatcctgctgtacgtgcaggccttccaggtgggcatgccaccccctgggtgctgcaggggccccctgcgccccaagacactcctgctcaccagctccgagatcttcctcctggatgaggactgtgtccactacccactgcccgagtttgccaaagagccgccgcagagagacaggtaccggctggacgatggccgccgcgtccgggacctggaccgagtgctcatgggctaccagacctacccgcaggccctcaccctcgtcttcgatgacgtgcaaggtcatgacctcatgggcagtgtcaccctggaccactttggggaggtgccaggtggcccggctagagccagccagggccgtgaagtccagtggcaggtgtttgtccccagtgctgagagcagagagaagctcatctcgctgttggctcgccagtgggaggccctgtgtggccgtgagctgcctgtcgagctcaccggctagcccaggccacagccagcctgtcgtgtccagcctgacgcctactggggcagggcagcaggcttttgtgttctctaaaaatgttttatcctccctttggtaccttaatttgactgtcctcgcagagaatgtgaacatgtgtgtgtgttgtgttaattctttctcatgttgggagtgagaatgccgggcccctcagggctgtcggtgtgctgtcagcctcccacaggtggtacagccgtgcacaccagtgtcgtgtctgctgttgtgggaccgttgttaacacgtgacactgtgggtctgactttctcttctacacgtcctttcctgaagtgtcgagtccagtcctttgttgctgttgctgttgctgttgctgttgctgttggcatcttgctgctaatcctgaggctggtagcagaatgcacattggaagctcccaccccatattgttcttcaaagtggaggtctcccctgatccagacaagtgggagagcccgtgggggcaggggacctggagctgccagcaccaagcgtgattcctgctgcctgtattctctattccaataaagcagagtttgacaccgtcaaaaaaaaaaaa

SEQ ID NO: 310971 - DNA, 1575 bp, Homo sapiens
ttacggtacgtcgaccgggcgcgctcgctgtgtactgggtgctccacgaggctccgccggggttctcagagccactgcaggatttctggcatcagaaaaacaccgactacaacaacagccctttccacatctcccagtgcttcgtgctaaagcttagtgacctgcagtcagtcaatgtggggcttttcgaccagcatttccggctgacgggttccaccccgatgcaggtggtcacgtgcttgacgcgggacagctacctgacgcactgcttcctccagcacctcatggtcgtgctgtcctctctggaacgcacgccctcgccggagcctgttgacaaggacttctactccgagtttgggaacaagaccacagggaagatggagaactacgagctgatccactctagtcgcgtcaagtttacctaccccagtgaggaggagattggggacctgacgttcactgtggcccaaaagatggctgagccagagaaggccccagccctcagcatcctgctgtacgtgcaggccttccaggtgggcatgccaccccctgggtgctgcaggggccccctgcgccccaagacactcctgctcaccagctccgagatcttcctcctggatgaggactgtgtccactacccactgcccgagtttgccaaagagccgccgcagagagacaggtaccggctggacgatggccgccgcgtccgggacctggaccgagtgctcatgggctaccagacctacccgcaggccctcaccctcgtcttcgatgacgtgcaaggtcatgacctcatgggcagtgtcaccctggaccactttggggaggtgccaggtggcccggctagagccagccagggccgtgaagtccagtggcaggtgtttgtccccagtgctgagagcagagagaagctcatctcgctgttggctcgccagtgggaggccctgtgtggccgtgagctgcctgtcgagctcaccggctagcccaggccacagccagcctgtcgtgtccagcctgacgcctactggggcagggcagcaggcttttgtgttctctaaaaatgttttatcctccctttggtaccttaatttgactgtcctcgcagagaatgtgaacatgtgtgtgtgttgtgttaattctttctcatgttgggagtgagaatgccgggcccctcagggctgtcggtgtgctgtcagcctcccacaggtggtacagccgtgcacaccagtgtcgtgtctgctgttgtgggaccgttgttaacacgtgacactgtgggtctgactttctcttctacacgtcctttcctgaagtgtcgagtccagtcctttgttgctgttgctgttgctgttgctgttgctgttggcatcttgctgctaatcctgaggctggtagcagaatgcacattggaagctcccaccccatattgttcttcaaagtggaggtctcccctgatccagacaagtgggagagcccgtgggggcaggggacctggagctgccagcaccaagcgtgattcctgctgcctgtattctctattccaataaagcagagtttgacaccgtcaaaaaaaaaaaa

SEQ ID NO: 310972 - DNA, 1724 bp, Homo sapiens
agagagcagaactcacgctccagggctcagagcaggaggtagggtgtgcggcaagcgctggcccggacagaagcagagtgggccctggtctcgggcaggatgtttctgactcacatttcctgaggagagaaagctaagctctttgcctaatgtctctgtctccccttccagaaaaatgcctcagctcttccggcctgaaggaatggcctcctcccgggccccatgattctttcctgtgtgggccctcctggccctggcctctgggctgaggcttgctagggactcggggtggctctaaggggcagggatagggctggggagcgccggcctgtggccctgaccagccccttctcgtgcaggttccaccccgatgcaggtggtcacgtgcttgacgcgggacagctacctgacgcactgcttcctccagcacctcatggtcgtgctgtcctctctggaacgcacgccctcgccggagcctgttgacaaggacttctactccgagtttgggaacaagaccacagggaagatggagaactacgagctgatccactctagtcgcgtcaagtttacctaccccagtgaggaggagattggggacctgacgttcactgtggcccaaaagatggctgagccagagaaggccccagccctcagcatcctgctgtacgtgcaggccttccaggtgggcatgccaccccctgggtgctgcaggggccccctgcgccccaagacactcctgctcaccagctccgagatcttcctcctggatgaggactgtgtccactacccactgcccgagtttgccaaagagccgccgcagagagacaggtaccggctggacgatggccgccgcgtccgggacctggaccgagtgctcatgggctaccagacctacccgcaggccctcaccctcgtcttcgatgacgtgcaaggtcatgacctcatgggcagtgtcaccctggaccactttggggaggtgccaggtggcccggctagagccagccagggccgtgaagtccagtggcaggtgtttgtccccagtgctgagagcagagagaagctcatctcgctgttggctcgccagtgggaggccctgtgtggccgtgagctgcctgtcgagctcaccggctagcccaggccacagccagcctgtcgtgtccagcctgacgcctactggggcagggcagcaggcttttgtgttctctaaaaatgttttatcctccctttggtaccttaatttgactgtcctcgcagagaatgtgaacatgtgtgtgtgttgtgttaattctttctcatgttgggagtgagaatgccgggcccctcagggctgtcggtgtgctgtcagcctcccacaggtggtacagccgtgcacaccagtgtcgtgtctgctgttgtgggaccgttgttaacacgtgacactgtgggtctgactttctcttctacacgtcctttcctgaagtgtcgagtccagtcctttgttgctgttgctgttgctgttgctgttgctgttggcatcttgctgctaatcctgaggctggtagcagaatgcacattggaagctcccaccccatattgttcttcaaagtggaggtctcccctgatccagacaagtgggagagcccgtgggggcaggggacctggagctgccagcaccaagcgtgattcctgctgcctgtattctctattccaataaagcagagtttgacaccgtcaaaaaaaaaaaa

SEQ ID NO: 310973 - DNA, 839 bp, Homo sapiens
  misc_feature (15)..(15): n is a, c, g, or t
  misc_feature (19)..(19): n is a, c, g, or t
  misc_feature (28)..(28): n is a, c, g, or t
acaactcgagctcgntacncctaattgnttcttcgatgacgtgcaaggtcatgacctcatgggcagtgtcaccctggaccactttggggaggtgccaggtggcccggctagagccagccagggccgtgaagtccagtggcaggtgtttgtccccagtgctgagagcagagagaagctcatctcgctgttggctcgccagtgggaggccctgtgtggccgtgagctgcctgtcgagctcaccggctagcccaggccacagccagcctgtcgtgtccagcctgacgcctactggggcagggcagcaggcttttgtgttctctaaaaatgttttatcctccctttggtaccttaatttgactgtcctcgcagagaatgtgaacatgtgtgtgtgttgtgttaattctttctcatgttgggagtgagaatgccgggcccctcagggctgtcggtgtgctgtcagcctcccacaggtggtacagccgtgcacaccagtgtcgtgtctgctgttgtgggaccgttgttaacacgtgacactgtgggtctgactttctcttctacacgtcctttcctgaagtgtcgagtccagtcctttgttgctgttgctgttgctgttgctgttgctgttggcatcttgctgctaatcctgaggctggtagcagaatgcacattggaagctcccaccccatattgttcttcaaagtggaggtctcccctgatccagacaagtgggagagcccgtgggggcaggggacctggagctgccagcaccaagcgtgattcctgctgcctgtattctctattccaataaagcagagtttgacaccgtcaaaaaaaaaaaa

SEQ ID NO: 310974 - DNA, 667 bp, Homo sapiens
  misc_feature (52)..(52): n is a, c, g, or t
  misc_feature (75)..(75): n is a, c, g, or t
  misc_feature (81)..(81): n is a, c, g, or t
atctcgactacgtcagtgagttggggcgcccgctgccaacaccaagattggnccccgccgcatccacacagtccntgtgcngggaggtaacaagaaataccgtgccctgacgcctactggggcagggcagcaggcttttgtgttctctaaaaatgttttatcctccctttggtaccttaatttgactgtcctcgcagagaatgtgaacatgtgtgtgtgttgtgttaattctttctcatgttgggagtgagaatgccgggcccctcagggctgtcggtgtgctgtcagcctcccacaggtggtacagccgtgcacaccagtgtcgtgtctgctgttgtgggaccgttgttaacacgtgacactgtgggtctgactttctcttctacacgtcctttcctgaagtgtcgagtccagtcctttgttgctgttgctgttgctgttgctgttgctgttggcatcttgctgctaatcctgaggctggtagcagaatgcacattggaagctcccaccccatattgttcttcaaagtggaggtctcccctgatccagacaagtgggagagcccgtgggggcaggggacctggagctgccagcaccaagcgtgattcctgctgcctgtattctctattccaataaagcagagtttgacaccgtcaaaaaaaaaaaa

SEQ ID NO: 310975 - DNA, 3696 bp, Homo sapiens
gaactggcccagaatcactctcgccctgctccggcgtctgcgccgggcggcggtggcggcggagacccgaacatggcgaccgcgcgcaccttcgggcccgagcgggaagccgagccggccaaggaagcgcgcgtcgtgggctcggagcttgtggacacttatacggtttacatcatccaggtcactgatggcagccatgagtggacagtaaagcaccgctacagcgacttccatgacctgcatgaaaagctcgttgcagagagaaagattgataaaaacctgcttccgcccaaaaagataattgggaaaaactcaagaagcttggtggagaagagggagaaggatctggaggtctacctccagaagctcctggctgccttccctggcgtgacccccagagtactggcccacttcttgcattttcacttctatgagataaatggcatcaccgcggcactggctgaagagctctttgagaaaggagaacagctcctgggggccggcgaggtctttgccattggacccctgcagctgtatgccgtcacggagcagctgcagcagggaaagcccacgtgcgccagtggggatgccaagaccgacctcgggcacatcctggacttcacctgtcgccttaagtaccttaaggtttctggcacagaaggaccttttgggaccagcaacattcaggagcagctcctgccgttcgacctatcaatattcaagtccctgcatcaggtggagataagtcactgtgatgctaagcacatcagagggctggtcgcatcgaagcccaccttagccacgctgagtgtccgcttctcagcaacctcgatgaaggaagtccttgttcctgaagcctcagaatttgatgagtgggagcctgaaggcacaaccctagaaggccctgtgactgccgtcatccccacttggcaggcattgaccacgcttgacctgagccacaacagcatctccgagatcgacgagtctgtgaaactgatcccaaagattgagttcctggacctgagtcacaatggattgctggttgtggacaatctgcagcacctgtataaccttgtgcatctggacctgtcctacaacaagctctcctccttggaagggcttcacaccaagctggggaacatcaagaccttaaacctggcaggcaacctcctagagagtctgagtggcctgcacaagctctactcactggtcaacctggatctccgggacaacaggatcgaacagatggaggaggtccggagcataggcagcctcccgtgtctggagcacgtgtctctgctgaacaaccctctgagcatcatccccgactaccggaccaaggtgctggctcagttcggagagagggcctcagaggtctgtctggatgacacagtgaccacagagaaggagctggacactgtggaagtgctgaaagcaattcagaaagccaaggaggtcaagtccaaactgagcaacccagagaagaagggtggtgaagactcccggctctcagctgccccctgcatcagacccagcagctcccctcccactgtggctcccgcatctgcctccctgccccagcccatcctctctaaccaaggaatcatgttcgttcaggaggaggccctggccagcagcctctcgtccactgacagtctgactcccgagcaccagcccattgcccagggatgttctgattccttggagtccatccctgcgggacaggcagcttccgatgatttaagggacgtgccaggagctgttggtggtgcaagcccagaacatgccgagccggaggtccaggtggtgccggggtctggccagatcatcttcctgcccttcacctgcattggctacacggccaccaatcaggacttcatccagcgcctgagcacactgatccggcaggccatcgagcggcagctgcctgcctggatcgaggctgccaaccagcgggaggagggccagggtgaacagggcgaggaggaggatgaggaggaggaagaagaggaggacgtggctgagaaccgctactttgaaatggggcccccagacgtggaggaggaggagggaggaggccagggggaggaagaggaggaggaagaggaggatgaagaggccgaggaggagcgcctggctctggaatgggccctgggcgcggacgaggacttcctgctggagcacatccgcatcctcaaggtgctgtggtgcttcctgatccatgtgcagggcagtatccgccagttcgccgcctgccttgtgctcaccgacttcggcatcgcagtcttcgagatcccgcaccaggagtctcggggcagcagccagcacatcctctcctccctgcgctttgtcttttgcttcccgcatggcgacctcaccgagtttggcttcctcatgccggagctgtgtctggtgctcaaggtacggcacagtgagaacacgctcttcattatctcggacgccgccaacctgcacgagttccacgcggacctgcgctcatgctttgcaccccagcacatggccatgctgtgtagccccatcctctacggcagccacaccagcctgcaggagttcctgcgccagctgctcaccttctacaaggtggctggcggctgccaggagcgcagccagggctgcttccccgtctacctggtctacagtgacaagcgcatggtgcagacggccgccggggactactcaggcaacatcgagtgggccagctgcacactctgttcagccgtgcggcgctcctgctgcgcgccctctgaggccgtcaagtccgccgccatcccctactggctgttgctcacgccccagcacctcaacgtcatcaaggccgacttcaaccccatgcccaaccgtggcacccacaactgtcgcaaccgcaacagcttcaagctcagccgtgtgccgctctccaccgtgctgctggaccccacacgcagctgtacccagcctcggggcgcctttgctgatggccacgtgctagagctgctcgtggggtaccgctttgtcactgccatcttcgtgctgccccacgagaagttccacttcctgcgcgtctacaaccagctgcgggcctcgctgcaggacctgaagactgtggtcatcgccaagacccccgggacgggaggcagcccccagggctcctttgcggatggccagcctgccgagcgcagggccagcaatgaccagcgtccccaggaggtcccagcagaggctctggccccggccccagtggaagtcccagctccagcccctgcagcagcctcagcctcaggcccagcgaagactccggccccagcagaggcctcaacttcagctttggtcccagaggagacgccagtggaagctccagccccacccccagccgaggcccctgcccagtacccgagtgagcacctcatccaggccacctcggaggagaatcagatcccctcgcacttgcctgcctgcccgtcgctccggcacgtcgccagcctgcggggcagcgccatcatcgagctcttccacagcagcattgctgaggtagcggcccgggtgtgggtgccagctatggcacggccagtcctgagggcgaggccaagcttggcttcaggtcagcctcaggtccctggacttccctgatgtcggagtcctcagctgagctgctcacagctttgaggacctgggcagtgaggtcctgagttgccctcc

SEQ ID NO: 310976 - DNA, 3274 bp, Homo sapiens
gaactggcccagaatcactctcgccctgctccggcgtctgcgccgggcggcggtggcggcggagacccgaacatggcgaccgcgcgcaccttcgggcccgagcgggaagccgagccggccaaggaagcgcgcgtcgtgggctcggagcttgtggacacttatacggtttacatcatccaggtcactgatggcagccatgagtggacagtaaagcaccgctacagcgacttccatgacctgcatgaaaagctcgttgcagagagaaagattgataaaaacctgcttccgcccaaaaagataattgggaaaaactcaagaagcttggtggagaagagggagaaggatctggaggtctacctccagaagctcctggctgccttccctggcgtgacccccagagtactggcccacttcttgcattttcacttctatgagataaatggcatcaccgcggcactggctgaagagctctttgagaaaggagaacagctcctgggggccggcgaggtctttgccattggacccctgcagctgtatgccgtcacggagcagctgcagcagggaaagcccacgtgcgccagtggggatgccaagaccgacctcgggcacatcctggacttcacctgtcgccttaagtaccttaaggtttctggcacagaaggaccttttgggaccagcaacattcaggagcagctcctgccgttcgacctatcaatattcaagtccctgcatcaggtggagataagtcactgtgatgctaagcacatcagagggctggtcgcatcgaagcccaccttagccacgctgagtgtccgcttctcagcaacctcgatgaaggaagtccttgttcctgaagcctcagaatttgatgagtgggagcctgaaggcacaaccctagaaggccctgtgactgccgtcatccccacttggcaggcattgaccacgcttgacctgagccacaacagcatctccgagatcgacgagtctgtgaaactgatcccaaagattgagttcctggacctgagtcacaatggattgctggttgtggacaatctgcagcacctgtataaccttgtgcatctggacctgtcctacaacaagctctcctccttggaagggcttcacaccaagctggggaacatcaagaccttaaacctggcaggcaacctcctagagagtctgagtggcctgcacaagctctactcactggtcaacctggatctccgggacaacaggatcgaacagatggaggaggtccggagcataggcagcctcccgtgtctggagcacgtgtctctgctgaacaaccctctgagcatcatccccgactaccggaccaaggtgctggctcagttcggagagagggcctcagaggtctgtctggatgacacagtgaccacagagaaggagctggacactgtggaagtgctgaaagcaattcagaaagccaaggaggtcaagtccaaactgagcaacccagagaagaagggtggtgaagactcccggctctcagctgccccctgcatcagacccagcagctcccctcccactgtggctcccgcatctgcctccctgccccagcccatcctctctaaccaaggcatcctcggagatgagtgagtgaagcaggtctcatgagcgtgtctgctggcccggcccccacggaagaggggagggtgtgccgtcccgagtggagccgaggctcgggacacgcaggaaaggacgccgcctgcccgggctcctggagacgcagaacttggaatcatgttcgttcaggaggaggccctggccagcagcctctcgtccactgacagtctgactcccgagcaccagcccattgcccagggatgttctgattccttggagtccatccctgcgggacaggcagcttccgatgatttaagggacgtgccaggagctgttggtggtgcaagcccagaacatgccgagccggaggtccaggtggtgccggggtctggccagatcatcttcctgcccttcacctgcattggctacacggccaccaatcaggacttcatccagcgcctgagcacactgatccggcaggccatcgagcggcagctgcctgcctggatcgaggctgccaaccagcgggaggagggccagggtgaacagggcgaggaggaggatgaggaggaggaagaagaggaggacgtggctgagaaccgctactttgaaatggggcccccagacgtggaggaggaggagggaggaggccagggggaggaagaggaggaggaagaggaggatgaagaggccgaggaggagcgcctggctctggaatgggccctgggcgcggacgaggacttcctgctggagcacatccgcatcctcaaggtgctgtggtgcttcctgatccatgtgcagggcagtatccgccagttcgccgcctgccttgtgctcaccgacttcggcatcgcagtcttcgagatcccgcaccaggagtctcggggcagcagccagcacatcctctcctccctgcgctttgtcttttgcttcccgcatggcgacctcaccgagtttggcttcctcatgccggagctgtgtctggtgctcaaggtacggcacagtgagaacacgctcttcattatctcggacgccgccaacctgcacgagttccacgcggacctgcgctcatgctttgcaccccagcacatggccatgctgtgtagccccatcctctacggcagccacaccagcctgcaggagttcctgcgccagctgctcaccttctacaaggtggctggcggctgccaggagcgcagccagggctgcttccccgtctacctggtctacagtgacaagcgcatggtgcagacggccgccggggactactcaggcaacatcgagtgggccagctgcacactctgttcagccgtgcggcgctcctgctgcgcgccctctgaggccgtcaagtccgccgccatcccctactggctgttgctcacgccccagcacctcaacgtcatcaaggccgacttcaaccccatgcccaaccgtggcacccacaatgttgctgttgctgttgctgttgctgttggcatcttgctgctaatcctgaggctggtagcagaatgcacattggaagctcccaccccatattgttcttcaaagtggaggtctcccctgatccagacaagtgggagagcccgtgggggcaggggacctggagctgccagcaccaagcgtgattcctgctgcctgtattctctattccaataaagcagagtttgacaccgtcaaaaaaaaaaaa

SEQ ID NO: 310977 - DNA, 2632 bp, Homo sapiens
gaactggcccagaatcactctcgccctgctccggcgtctgcgccgggcggcggtggcggcggagacccgaacatggcgaccgcgcgcaccttcgggcccgagcgggaagccgagccggccaaggaagcgcgcgtcgtgggctcggagcttgtggacacttatacggtttacatcatccaggtcactgatggcagccatgagtggacagtaaagcaccgctacagcgacttccatgacctgcatgaaaagctcgttgcagagagaaagattgataaaaacctgcttccgcccaaaaagataattgggaaaaactcaagaagcttggtggagaagagggagaaggatctggaggtctacctccagaagctcctggctgccttccctggcgtgacccccagagtactggcccacttcttgcattttcacttctatgagataaatggcatcaccgcggcactggctgaagagctctttgagaaaggagaacagctcctgggggccggcgaggtctttgccattggacccctgcagctgtatgccgtcacggagcagctgcagcagggaaagcccacgtgcgccagtggggatgccaagaccgacctcgggcacatcctggacttcacctgtcgccttaagtaccttaaggtttctggcacagaaggaccttttgggaccagcaacattcaggagcagctcctgccgttcgacctatcaatattcaagtccctgcatcaggtggagataagtcactgtgatgctaagcacatcagagggctggtcgcatcgaagcccaccttagccacgctgagtgtccgcttctcagcaacctcgatgaaggaagtccttgttcctgaagcctcagaatttgatgagtgggagcctgaaggcacaaccctagaaggccctgtgactgccgtcatccccacttggcaggcattgaccacgcttgacctgagccacaacagcatctccgagatcgacgagtctgtgaaactgatcccaaagattgagttcctggacctgagtcacaatggattgctggttgtggacaatctgcagcacctgtataaccttgtgcatctggacctgtcctacaacaagctctcctccttggaagggcttcacaccaagctggggaacatcaagaccttaaacctggcaggcaacctcctagagagtctgagtggcctgcacaagctctactcactggtcaacctggatctccgggacaacaggatcgaacagatggaggaggtccggagcataggcagcctcccgtgtctggagcacgtgtctctgctgaacaaccctctgagcatcatccccgactaccggaccaaggtgctggctcagttcggagagagggcctcagaggtctgtctggatgacacagtgaccacagagaaggagctggacactgtggaagtgctgaaagcaattcagaaagccaaggaggtcaagtccaaactgagcaacccagagaagaagggtggtgaagactcccggctctcagctgccccctgcatcagacccagcagctcccctcccactgtggctcccgcatctgcctccctgccccagcccatcctctctaaccaaggcatcctcggagatgagtgagtgaagcaggtctcatgagcgtgtctgctggcccggcccccacggaagaggggagggtgtgccgtcccgagtggagccgaggctcgggacacgcaggaaaggacgccgcctgcccgggctcctggagacgcagaacttggtgtgaggtcttgggaaaacagttcaacccgatgttttaagagccagaaaaacattcccaccccttgacctggtaaccccactggtggggattttctcttagagggataagataccgggaaggggaggtgaaatgctcaccactgccaaaacacgggctgcaactgcaacatcggaggatgagagggagagtcggctgtggtgcagaatgctcagcagccctcccagcagggacaggaagactgggcaggaagaggggagaagcattcaagttaaggcaaaaggcccaacgcagagcagcacactgaggtcacacctgtgagatgtggaagagaattcctgagcgtggagcgatggggttaggtgccaggatgattgcccattttgcttctgtcagactcttgactaaggatttctggttgcattttattacataaaagccagggaggttatatcacggtgagaaagcttccctgacgccgcctcctgtagcgcagccaagcgagcctgtggaggtaccatatgactgtaggcctctggggacagggagctgcatctgcttctcaaggccagggacacagccatttctgccagcatctgttgatcagtgagtgagtgagtgggcaggtagagcaggagccagtgaagagcaggccctggatgggtggggatgcaccatgtccccaggctgcagctgcaggcagccccccacattgtcggagaagcctctgcaccagctcagccccctcctcactccccttgtgccctggggacactctgcagaggggcactctgcagtctgtccccgccatcgctggacttctggacatggcctccagatttgcacctcttaaataaaactgcagtggatgtc

SEQ ID NO: 310978 - DNA, 1635 bp, Homo sapiens
caacttacggctaggtacgaggcctgggtggtgatggattgctggttgtggacaatctgcagcacctgtataaccttgtgcatctggacctgtcctacaacaagctctcctccttggaagggcttcacaccaagctggggaacatcaagaccttaaacctggcaggcaacctcctagagagtctgagtggcctgcacaagctctactcactggtcaacctggatctccgggacaacaggatcgaacagatggaggaggtccggagcataggcagcctcccgtgtctggagcacgtgtctctgctgaacaaccctctgagcatcatccccgactaccggaccaaggtgctggctcagttcggagagagggcctcagaggtctgtctggatgacacagtgaccacagagaaggagctggacactgtggaagtgctgaaagcaattcagaaagccaaggaggtcaagtccaaactgagcaacccagagaagaagggtggtgaagactcccggctctcagctgccccctgcatcagacccagcagctcccctcccactgtggctcccgcatctgcctccctgccccagcccatcctctctaaccaaggcatcctcggagatgagtgagtgaagcaggtctcatgagcgtgtctgctggcccggcccccacggaagaggggagggtgtgccgtcccgagtggagccgaggctcgggacacgcaggaaaggacgccgcctgcccgggctcctggagacgcagaacttggtgtgaggtcttgggaaaacagttcaacccgatgttttaagagccagaaaaacattcccaccccttgacctggtaaccccactggtggggattttctcttagagggataagataccgggaaggggaggtgaaatgctcaccactgccaaaacacgggctgcaactgcaacatcggaggatgagagggagagtcggctgtggtgcagaatgctcagcagccctcccagcagggacaggaagactgggcaggaagaggggagaagcattcaagttaaggcaaaaggcccaacgcagagcagcacactgaggtcacacctgtgagatgtggaagagaattcctgagcgtggagcgatggggttaggtgccaggatgattgcccattttgcttctgtcagactcttgactaaggatttctggttgcattttattacataaaagccagggaggttatatcacggtgagaaagcttccctgacgccgcctcctgtagcgcagccaagcgagcctgtggaggtaccatatgactgtaggcctctggggacagggagctgcatctgcttctcaaggccagggacacagccatttctgccagcatctgttgatcagtgagtgagtgagtgggcaggtagagcaggagccagtgaagagcaggccctggatgggtggggatgcaccatgtccccaggctgcagctgcaggcagccccccacattgtcggagaagcctctgcaccagctcagccccctcctcactccccttgtgccctggggacactctgcagaggggcactctgcagtctgtccccgccatcgctggacttctggacatggcctccagatttgcacctcttaaataaaactgcagtggatgtc

SEQ ID NO: 310979 - DNA, 631 bp, Homo sapiens
ggtacctgtagcacacaacatcataaaaacaactacctaattactaatgatattgagcatcttttcacgtgcttactggccattcgtgtattttctttggagaatgtctattcaatctctttgcccatttgtgaatcaggttatttgtttttatgttgttgagttgtagaagttatttgttctggatattaattctttctcatgttgggagtgagaatgccgggcccctcagggctgtcggtgtgctgtcagcctcccacaggtggtacagccgtgcacaccagtgtcgtgtctgctgttgtgggaccgttgttaacacgtgacactgtgggtctgactttctcttctacacgtcctttcctgaagtgtcgagtccagtcctttgttgctgttgctgttgctgttgctgttgctgttggcatcttgctgctaatcctgaggctggtagcagaatgcacattggaagctcccaccccatattgttcttcaaagtggaggtctcccctgatccagacaagtgggagagcccgtgggggcaggggacctggagctgccagcaccaagcgtgattcctgctgcctgtattctctattccaataaagcagagtttgacaccgtcaaaaaaaaaaaa

SEQ ID NO: 310980 - DNA, 1818 bp, Homo sapiens
gaactggcccagaatcactctcgccctgctccggcgtctgcgccgggcggcggtggcggcggagacccgaacatggcgaccgcgcgcaccttcgggcccgagcgggaagccgagccggccaaggaagcgcgcgtcgtgggctcggagcttgtggacacttatacggtttacatcatccaggtcactgatggcagccatgagtggacagtaaagcaccgctacagcgacttccatgacctgcatgaaaagctcgttgcagagagaaagattgataaaaacctgcttccgcccaaaaagataattgggaaaaactcaagaagcttggtggagaagagggagaaggatctggaggtctacctccagaagctcctggctgccttccctggcgtgacccccagagtactggcccacttcttgcattttcacttctatgagataaatggcatcaccgcggcactggctgaagagctctttgagaaaggagaacagctcctgggggccggcgaggtctttgccattggacccctgcagctgtatgccgtcacggagcagctgcagcagggaaagcccacgtgcgccagtggggatgccaagaccgacctcgggcacatcctggacttcacctgtcgccttaagtaccttaaggtttctggcacagaaggaccttttgggaccagcaacattcaggagcagctcctgccgttcgacctatcaatattcaagtccctgcatcaggtggagataagtcactgtgatgctaagcacatcagagggctggtcgcatcgaagcccaccttagccacgctgagtgtccgcttctcagcaacctcgatgaaggaagtccttgttcctgaagcctcagaatttgatgagtgggagcctgaaggcacaaccctagaaggccctgtgactgccgtcatccccacttggcaggcattgaccacgcttgacctgagccacaacagcatctccgagatcgacgagtctgtgaaactgatcccaaagattgagttcctggacctgagtcacaatggattgctggttgtggacaatctgcagcacctgtataaccttgtgcatctggacctgtcctacaacaagctctcctccttggaagggcttcacaccaagctggggaacatcaagaccttaaacctggcaggcaacctcctagagagtctgagtggcctgcacaagctctactcactggtcaacctggatctccgggacaacaggatcgaacagatggaggaggtccggagcataggcagcctcccgtgtctggagcacgtgtctctgctgaacaaccctctgagcatcatccccgactaccggaccaaggtgctggctcagttcggagagagggcctcagaggtctgtctggatgacacagtgaccacagagaaggagctggacactgtggaagtgctgaaagcaattcagaaagccaaggaggtcaagtccaaactgagcaacccagagaagaagggtggtgaagactcccggctctcagctgccccctgcatcagacccagcagctcccctcccactgtggctcccgcatctgcctccctgccccagcccatcctctctaaccaaggtaatcgtgtatgtatcttgcttctagtggagccacacagccctgcctgggccccctggctgggctggggttgggggagaggtgccagcacctgcttccaacagggtcagacacagggagggcagtgccttctgcaggctggtcctcgcggggggacacatggcaggggtgcctggcctgatgccagctgttgcttgcttggtgaggactcccaattg

SEQ ID NO: 310981 - DNA, 1135 bp, Homo sapiens
cgggggccggggggcggtgggacgttgaccccgccccctgctgctgctagtctgcgccgggcggcggtggcggcggagacccgaacatggcgaccgcgcgcaccttcgggcccgagcgggaagccgagccggccaaggaagcgcgcgtcgtgggctcggagcttgtggacacttatacggtttacatcatccaggtcactgatggcagccatgagtggacagtaaagcaccgctacagcgacttccatgacctgcatgaaaagctcgttgcagagagaaagattgataaaaacctgcttccgcccaaaaagataattgggaaaaactcaagaagcttggtggagaagagggagaaggatctggaggtctacctccagaagctcctggctgccttccctggcgtgacccccagagtactggcccacttcttgcattttcacttctatgagataaatggcatcaccgcggcactggctgaagagctctttgagaaaggagaacagctcctgggggccggcgaggtctttgccattggacccctgcagctgtatgccgtcacggagcagctgcagcagggaaagcccacgtgcgccagtggggatgccaagaccgacctcgggcacatcctggacttcacctgtcgccttaagtaccttaaggtttctggcacagaaggaccttttgggaccagcaacattcaggagcagctcctgccgttcgacctatcaatattcaagtccctgcatcaggtggagataagtcactgtgatgctaagcacatcagagggctggtcgcatcgaagcccaccttagccacgctgagtgtccgcttctcagcaacctcgatgaaggtaagcttcacctatatcctgcctggggcaatgtctgtggatcagggtcctgggctgtggtctccaccactaaggatgggtgaggacactgctatgtctatcagtattcagaggctggaccttctgtggggtaggcagacactcatggggggcctcccagcacttgacagcccctgggacactttagttcacatctgcataaaaagttcgtgttgttaacaggacattttaaggaacttggcttctttccccaaaaaataaaaaatgtcattggtgtttttgtg

SEQ ID NO: 310982 - DNA, 259 bp, Homo sapiens
cctctctggaacgcacgccctcgccggagcctgttgacaaggacttctactccgagtttgggaacaagaccacaggtacccctgtctagctcaggctgcagacaggctgcctggacagacgtcatgggccccagggtggctctctgtgccccagaaccctctctgcctctatgtctctcttttctcacttagctggccagggttttatgtggggcttttcgatggcagagtctccactccagcagtccctcaaccatct

SEQ ID NO: 310983 - DNA, 497 bp, Homo sapiens
gagcctgcgaggcagaggtggcagtgaactgagattgcgccactgcactccagcctgggtgacagagcgagactccatctcaaaaaagagaaaaggctagaaaaggcatcaccaggtcaccagggcaaaggccctttgggcttgaaaagcattgctcctaaagcagggccaggacttaattctaagtggctgttatgtggtaaattgttcagctttgaacgatttcacaatcgtttaaagacataggaaccaaaggcatgctttaatgcaagtttacttccacatgctaaatatgctccagcccttccttaaattctgcaacgactgtgttcccagtgagtgttgcgtgagggcccgagtgtggtgctccacacagatgtttttatgcaggaagtccttgttcctgaagcctcagaatttgatgagtgggagcctgaaggcacaaccctagaaggccctgtgactgccgtcatccccacttggcaggcattgaccac

SEQ ID NO: 310984 - DNA, 1298 bp, Homo sapiens
ggcggggccggcggaagcgtggagtgccgttgtcggctgcgccggaagtccctagccaggcctggcggtaaccttgggggcctcactgcagccgccgctgctgttggagtgggctttgcgagtctgaacgttggcggggctaggctcgttaactgccgagagcctccgggtttgcggtggaggacgctgaggcccgtggggggcaggcacccgggcgccgggcctcccagccgacatgtctctagtggcggaagccttcgtctcccagattgcagctgcagaaccttggcctgaaaatgctacattatatcagcaattgaaaggggagcaaattttactttctgacaatgcagcttctcttgcagtgcaggcctttttgcaaatgtgtaacttgcctatcaaagtagtttgtagggcaaatgcagaatatatgtctccatctggtaaagtaccttttattcatgtgggaaatcaagtagtatcagaacttggtccaatagtccaatttgttaaagccaagggccattctcttagtgatgggctggaggaagtccaaaaagcagaaatgaaagcttacatggaattagtcaacaatatgctgttgactgcagagctgtatcttcagtggtgtgatgaagctacagtaggggagatcactcatgctaggtatggatctccttacccttggcctctgaatcatattttggcctatcaaaaacagtgggaagtcaaacgtaagatgaaagctattggatggggaaagaagactctggaccaggtcttagaggatgtagaccagtgctgtcaagctctctctcaaagactgggaacacaaccgtatttcttcaataagcagcctactgaacttgacgcactggtatttggccatctatacaccattcttaccacacaattgacaaatgatgaactttctgagaaggtgaaaaactatagcaacctccttgctttctgtaggagaattgaacagcactattttgaagatcgtggtaaaggcaggctgtcatagagttatgtgttagtctcaggagtcttaacttttgaaatatgttttacttgaatgttacattagatattggtgtcagaattttaaaaccaaattactgctttttgaaacctcaaattatataatgtatcttatgtatgtgctttatattgttatttgtgtatacattaaaataattctgaattatttaatctgatatgttgtattctgtatcttgaaatttttgtttccttgaaacatgcatgcatttaaaaataaagcttaaacaactgta

SEQ ID NO: 310985 - DNA, 1387 bp, Homo sapiens
ggcggggccggcggaagcgtggagtgccgttgtcggctgcgccggaagtccctagccaggcctggcggtaaccttgggggcctcactgcagccgccgctgctgttggagtgggctttgcgagtctgaacgttggcggggctaggctcgttaactgccgagagcctccgggtttgcggtggaggacgctgaggcccgtggggggcaggcacccgggcgccgggcctcccagccgacatgtctctagtggcggaagccttcgtctcccagattgcagctgcagaaccttggcctgaaaatgctacattatatcagcaattgaaaggggagcaaattttactttctgacaatgcagcttctcttgcagtgcaggcctttttgcaaatgtgtaacttgcctatcaaagtagtttgtagggcaaatgcagaatatatgtctccatctggtaaagtaccttttattcatgtgggaaatcaagtagtatcagaacttggtccaatagtccaatttgttaaagccaagggccattctcttagtgatgggctggaggaagtccaaaaagcagaaatgaaagcttacatggaattagtcaacaatatgctgttgactgcagagctgtatcttcagtggtgtgatgaagctacagtaggggagatcactcatgctaggtatggatctccttacccttggcctctgaatcatattttggcctatcaaaaacagtgggaagtcaaacgtaagatgaaagctattggatggggaaagaagactctggaccaggtcttagaggatgtagaccagtgctgtcaagctctctctcaaagactgggaacacaaccgtatttcttcaataagcagcctactgaacttgacgcactggtatttggccatctatacaccattcttaccacacaattgacaaatgatgaactttctgagaaggtgaaaaactatagcaacctccttgctttctgtaggagaattgaacagcactattttgaagatcgtggtaaaggcaggctgtcatagagttatgtgttagtctcaggagtcttaacttttgaaatatgttttacttgaatgttacattagatattggtgtcagaattttaaaaccaaattactgctttttgaaacctcaaattatataatgtatcttatgtatgtgctttatattgttatttgtgtatacattaaaataattctgaattatttaatctgatatgttgtattctgtatcttgaaatttttgtttccttgaaacatgcatgcatttaaaaataaagcttaaacaactgtatggatgttacatttactttcttttgatttttctgaaagtcattcactgaattttacacatgtggaataaacagtgtcttttctaaggca

SEQ ID NO: 310986 - DNA, 1594 bp, Homo sapiens
ggcggggccggcggaagcgtggagtgccgttgtcggctgcgccggaagtccctagccaggcctggcggtaaccttgggggcctcactgcagccgccgctgctgttggagtgggctttgcgagtctgaacgttggcggggctaggctcgttaactgccgagagcctccgggtttgcggtggaggacgctgaggcccgtggggggcaggcacccgggcgccgggcctcccagccgacatgtctctagtggcggaagccttcgtctcccagattgcagctgcagaaccttggcctgaaaatgctacattatatcagcaattgaaaggggagcaaattttactttctgacaatgcagcttctcttgcagtgcaggcctttttgcaaatgtgtaacttgcctatcaaagtagtttgtagggcaaatgcagaatatatgtctccatctggtaaagtaccttttattcatgtgggaaatcaagtagtatcagaacttggtccaatagtccaatttgttaaagccaagggccattctcttagtgatgggctggaggaagtccaaaaagcagaaatgaaagcttacatggaattagtcaacaatatgctgttgactgcagagctgtatcttcagtggtgtgatgaagctacagtaggggagatcactcatgctaggtatggatctccttacccttggcctctgaatcatattttggcctatcaaaaacagtgggaagtcaaacgtaagatgaaagctattggatggggaaagaagactctggaccaggtcttagaggatgtagaccagtgctgtcaagctctctctcaaagactgggaacacaaccgtatttcttcaataagcagcctactgaacttgacgcactggtatttggccatctatacaccattcttaccacacaattgacaaatgatgaactttctgagaaggtgaaaaactatagcaacctccttgctttctgtaggagaattgaacagcactattttgaagatcgtggtaaaggcaggctgtcatagagttatgtgttagtctcaggagtcttaacttttgaaatatgttttacttgaatgttacattagatattggtgtcagaattttaaaaccaaattactgctttttgaaacctcaaattatataatgtatcttatgtatgtgctttatattgttatttgtgtatacattaaaataattctgaattatttaatctgatatgttgtattctgtatcttgaaatttttgtttccttgaaacatgcatgcatttaaaaataaagcttaaacaactgtaaaaaaaaaaaaaaagaaaaaaaaaagaaaaagaaacaaaaaaaaaaaaacaaaaagaaaaaaaaagagaaaaagaaaaaaagagagagagagagaaaaagaagaaaaaaacacccccccggggggggagcgcgcagcagaaaagagaggcggagctctaaccttacgggggagggcgggcgagaacaaaatgtgtgggcgccatataaaggggggggagaaactcgaacgcggcgggaacaaagagggagaaaaggaccacgggggaaaaaaagattcgcggcgaaacatcccaaa

SEQ ID NO: 310987 - DNA, 1502 bp, Homo sapiens
ggcggggccggcggaagcgtggagtgccgttgtcggctgcgccggaagtccctagccaggcctggcggtaaccttgggggcctcactgcagccgccgctgctgttggagtgggctttgcgagtctgaacgttggcggggctaggctcgttaactgccgagagcctccgggtttgcggtggaggacgctgaggcccgtggggggcaggcacccgggcgccgggcctcccagccgacatgtctctagtggcggaagccttcgtctcccagattgcaggctggagtgcagtggcacaacctgggctcactgcaacctccgcttcccgggttcaagcgattctcctgccttagcctcccgagtagttgggattacaggcgcccgccaccacgcccgcgcggattcatggaaaatttttaaatctgcatgtactttaaagaaatacttttgagtcggtggactgaacatgactgatgtatatagctgcagaaccttggcctgaaaatgctacattatatcagcaattgaaaggggagcaaattttactttctgacaatgcagcttctcttgcagtgcaggcctttttgcaaatgtgtaacttgcctatcaaagtagtttgtagggcaaatgcagaatatatgtctccatctggtaaagtaccttttattcatgtgggaaatcaagtagtatcagaacttggtccaatagtccaatttgttaaagccaagggccattctcttagtgatgggctggaggaagtccaaaaagcagaaatgaaagcttacatggaattagtcaacaatatgctgttgactgcagagctgtatcttcagtggtgtgatgaagctacagtaggggagatcactcatgctaggtatggatctccttacccttggcctctgaatcatattttggcctatcaaaaacagtgggaagtcaaacgtaagatgaaagctattggatggggaaagaagactctggaccaggtcttagaggatgtagaccagtgctgtcaagctctctctcaaagactgggaacacaaccgtatttcttcaataagcagcctactgaacttgacgcactggtatttggccatctatacaccattcttaccacacaattgacaaatgatgaactttctgagaaggtgaaaaactatagcaacctccttgctttctgtaggagaattgaacagcactattttgaagatcgtggtaaaggcaggctgtcatagagttatgtgttagtctcaggagtcttaacttttgaaatatgttttacttgaatgttacattagatattggtgtcagaattttaaaaccaaattactgctttttgaaacctcaaattatataatgtatcttatgtatgtgctttatattgttatttgtgtatacattaaaataattctgaattatttaatctgatatgttgtattctgtatcttgaaatttttgtttccttgaaacatgcatgcatttaaaaataaagcttaaacaactgta

SEQ ID NO: 310988 - DNA, 1423 bp, Homo sapiens
ggcggggccggcggaagcgtggagtgccgttgtcggctgcgccggaagtccctagccaggcctggcggtaaccttgggggcctcactgcagccgccgctgctgttggagtgggctttgcgagtctgaacgttggcggggctaggctcgttaactgccgagagcctccgggtttgcggtggaggacgctgaggcccgtggggggcaggcacccgggcgccgggcctcccagccgacatgtctctagtggcggaagccttcgtctcccagattgcagctgcagaaccttggcctgaaaatgctacattatatcagcaattgaaaggggagcaaattttactttctgacaatgcagcttctcttgcagtgcagtgaatctattctttgaacattctacaacaagaattacattatactgttataccagagtacttctgcagtgtgaaatagattggtttggaaaatgaacctggctttgctataaattacattcacaggcctttttgcaaatgtgtaacttgcctatcaaagtagtttgtagggcaaatgcagaatatatgtctccatctggtaaagtaccttttattcatgtgggaaatcaagtagtatcagaacttggtccaatagtccaatttgttaaagccaagggccattctcttagtgatgggctggaggaagtccaaaaagcagaaatgaaagcttacatggaattagtcaacaatatgctgttgactgcagagctgtatcttcagtggtgtgatgaagctacagtaggggagatcactcatgctaggtatggatctccttacccttggcctctgaatcatattttggcctatcaaaaacagtgggaagtcaaacgtaagatgaaagctattggatggggaaagaagactctggaccaggtcttagaggatgtagaccagtgctgtcaagctctctctcaaagactgggaacacaaccgtatttcttcaataagcagcctactgaacttgacgcactggtatttggccatctatacaccattcttaccacacaattgacaaatgatgaactttctgagaaggtgaaaaactatagcaacctccttgctttctgtaggagaattgaacagcactattttgaagatcgtggtaaaggcaggctgtcatagagttatgtgttagtctcaggagtcttaacttttgaaatatgttttacttgaatgttacattagatattggtgtcagaattttaaaaccaaattactgctttttgaaacctcaaattatataatgtatcttatgtatgtgctttatattgttatttgtgtatacattaaaataattctgaattatttaatctgatatgttgtattctgtatcttgaaatttttgtttccttgaaacatgcatgcatttaaaaataaagcttaaacaactgta

SEQ ID NO: 310989 - DNA, 1255 bp, Homo sapiens
ggcggggccggcggaagcgtggagtgccgttgtcggctgcgccggaagtccctagccaggcctggcggtaaccttgggggcctcactgcagccgccgctgctgttggagtgggctttgcgagtctgaacgttggcggggctaggctcgttaactgccgagagcctccgggtttgcggtggaggacgctgaggcccgtggggggcaggcacccgggcgccgggcctcccagccgacatgtctctagtggcggaagccttcgtctcccagattgcagctgcagaaccttggcctgaaaatgctacattatatcagcaattgaaaggggagcaaattttactttctgacaatgcagcttctcttgcagtgcaggcctttttgcaaatgtgtaacttgcctatcaaagtagtttgtagggcaaatgcagaatatatgtctccatctggtaaagtaccttttattcatgtgggaaatcaagtagtatcagaacttggtccaatagtccaatttgttaaagccaagggccattctcttagtgatgggctggaggaagtccaaaaagcagaaatgaaagcttacatggaattagtcaacaatatgctgttgactgcagagctgtatcttcagtggtgtgatgaagctacagtaggggagatcactcatgctaggtatggatctccttacccttggcctctgaatcatattttggcctatcaaaaacagtgggaagtcaaacgtaagatgaaagctattggatggggaaagaagactctggaccaggtcttagaggatgtagaccagtgctgtcaagctctctctcaaagactgggaacacaaccgtatttcttcaataagcagcctactgaacttgacgcactggtatttggccatctatacaccattcttaccacacaattgacaaatgatgaactttctgagaaggtgaaaaactatagcaacatcgtggtaaaggcaggctgtcatagagttatgtgttagtctcaggagtcttaacttttgaaatatgttttacttgaatgttacattagatattggtgtcagaattttaaaaccaaattactgctttttgaaacctcaaattatataatgtatcttatgtatgtgctttatattgttatttgtgtatacattaaaataattctgaattatttaatctgatatgttgtattctgtatcttgaaatttttgtttccttgaaacatgcatgcatttaaaaataaagcttaaacaactgta

SEQ ID NO: 310990 - DNA, 1225 bp, Homo sapiens
ggcggggccggcggaagcgtggagtgccgttgtcggctgcgccggaagtccctagccaggcctggcggtaaccttgggggcctcactgcagccgccgctgctgttggagtgggctttgcgagtctgaacgttggcggggctaggctcgttaactgccgagagcctccgggtttgcggtggaggacgctgaggcccgtggggggcaggcacccgggcgccgggcctcccagccgacatgtctctagtggcggaagccttcgtctcccagattgcagctgcagaaccttggcctgaaaatgctacattatatcagcaattgaaaggggagcaaattttactttctgacaatgcagcttctcttgcagtgcaggtaaagtaccttttattcatgtgggaaatcaagtagtatcagaacttggtccaatagtccaatttgttaaagccaagggccattctcttagtgatgggctggaggaagtccaaaaagcagaaatgaaagcttacatggaattagtcaacaatatgctgttgactgcagagctgtatcttcagtggtgtgatgaagctacagtaggggagatcactcatgctaggtatggatctccttacccttggcctctgaatcatattttggcctatcaaaaacagtgggaagtcaaacgtaagatgaaagctattggatggggaaagaagactctggaccaggtcttagaggatgtagaccagtgctgtcaagctctctctcaaagactgggaacacaaccgtatttcttcaataagcagcctactgaacttgacgcactggtatttggccatctatacaccattcttaccacacaattgacaaatgatgaactttctgagaaggtgaaaaactatagcaacctccttgctttctgtaggagaattgaacagcactattttgaagatcgtggtaaaggcaggctgtcatagagttatgtgttagtctcaggagtcttaacttttgaaatatgttttacttgaatgttacattagatattggtgtcagaattttaaaaccaaattactgctttttgaaacctcaaattatataatgtatcttatgtatgtgctttatattgttatttgtgtatacattaaaataattctgaattatttaatctgatatgttgtattctgtatcttgaaatttttgtttccttgaaacatgcatgcatttaaaaataaagcttaaacaactgta

SEQ ID NO: 310991 - DNA, 1299 bp, Homo sapiens
ggcggggccggcggaagcgtggagtgccgttgtcggctgcgccggaagtccctagccaggcctggcggtaaccttgggggcctcactgcagccgccgctgctgttggagtgggctttgcgagtctgaacgttggcggggctaggctcgttaactgccgagagcctccgggtttgcggtggaggacgctgaggcccgtggggggcaggcacccgggcgccgggcctcccagccgacatgtctctagtggcggaagccttcgtctcccagattgcaggctggagtgcagtggcacaacctgggctcactgcaacctccgcttcccgggttcaagcgattctcctgccttagcctcccgagtagttgggattacaggcgcccgccaccacgcccgcgcggattcatggaaaatttttaaatctgcatgtactttaaagaaatacttttgagtcggtggactgaacatgactgatgtatatagctgcagaaccttggcctgaaaatgctacattatatcagcaattgaaaggggagcaaattttactttctgacaatgcagcttctcttgcagtgcaggcctttttgcaaatgtgtaacttgcctatcaaagtagtttgtagggcaaatgcagaatatatgtctccatctggtaaagtaccttttattcatgtgggaaatcaagtagtatcagaacttggtccaatagtccaatttgttaaagccaagggccattctcttagtgatgggctggaggaagtccaaaaagcagaaatgaaagcttacatggaattagtcaacaatatgctgttgactgcagagctgtatcttcagtggtgtgatgaagctacagtaggggaggcctactgaacttgacgcactggtatttggccatctatacaccattcttaccacacaattgacaaatgatgaactttctgagaaggtgaaaaactatagcaacctccttgctttctgtaggagaattgaacagcactattttgaagatcgtggtaaaggcaggctgtcatagagttatgtgttagtctcaggagtcttaacttttgaaatatgttttacttgaatgttacattagatattggtgtcagaattttaaaaccaaattactgctttttgaaacctcaaattatataatgtatcttatgtatgtgctttatattgttatttgtgtatacattaaaataattctgaattatttaatctgatatgttgtattctgtatcttgaaatttttgtttccttgaaacatgcatgcatttaaaaataaagcttaaacaactgta

SEQ ID NO: 310992 - DNA, 2047 bp, Homo sapiens
gacagagccttgctctgttgcccaggctagagtgcagcctctgcctcccgggttcaagcgattctccttcctcagcctcccgagtagctgggattacagacatgctccaccacgtccagctaatttttttattttttggtagagacggggtttcaccatgttggccaggctggtctcgaactcctgatcttaagtgatccgcctgcctcggcctcctaaagtgctggattatagcccacccaatcctatttttttaaaatgctgtccattaatgcattctgacttcttgcttgaaaacccctggtttagtggataagcacctgtaactccaggaagattcaggattaagggcagaaataatgaagtaaattgaagtattagcattagtattttccattacattttggaatcgtctattttgatgtattcacgacggttaaaataatttaacatgctaatgtatggattaacttggcaattccattttaaaatattaaatggaataacgattctgactcgtaagtagacatgtgtaacagaattcaaccacatctgtaaaccatattgaaattatgagagtaagatttaccaaccacatttaggtttgacatattagatttgtgagtgaactatgtacttggattttgtcaagtaactcaatcgcttaacaaaataacaattaaatgtataaatgcagtttatagctatacattatttttaaaaatccccttcgaatgactctttaaaacataccaggggatacgctacttaagtataactaggttttggatttataacgttaatattaattattaaagcaaaactcatttctaaagagtcgcctgagtgcccaaaagacgccctcaaggacagggaagcagctgcgattcactcagcgatcaccagcgcccagaattcagggccgcccaagcggaggagcaacacgtggcccagcaaaaggagctgggtcccgtgcagcacagcaacaagaaactggcctaggaagacgctggagcgtctttctttcgcacgttactgcctgctacagtcatttaaaaaaaaaaaaccaaaaacaaaaaaaagaaataaattaatagtacgaagaaaactgcgcgagctacattcccagcagggtctgcgccagagcgcgccaggcaccgctcccgttacgggtgggaggaaaggatgcaccgcccacccggcgccggggaggctcgtccccgagtaggggacgggaacgcctgggtcccggggacgtggggcgcagggtctggggcccgaggccacggacgaagcgggaagccggctaggcagcggtctctgtctgggatggacgccgcgccccacgcggacctcccgccccgacttcacccagctctgctgcccgtaactcatatgacaagaacatcaggaaccggactattaccccgaaagggccttcccaagtcgtttcgccgcctgcagtgcccgaccgggggccgcgcgtccccggcaaccacgcccgcccgcgcagctgcagaggccggaaaaggcccgctcgcccgcgctcggcaccacccagcccgcgctccgggcgataccaccctgggcggcccctccaaaggccggagatggtgtcgtccccggcctccgattggtcgggggggcgggggcgtggcctctggagcctggttccgcgcgccggagcgcgctagccgcattgcgagccgaacccgggagctggcgccatggtgaggagtggttgcggggcgcgggcgacgcgacggtgggggtttcggcctgcgttcgggccgcagacagggcctgggcctgggcctgggcctgcgcctgcgcctgcgcctgccctgggaacgggttccggcagacgctgaggttgcgttgacgctcgcgccccggctcccgttccaggtgctgttgcacgtgctgtttgagcacgcggtcggctacgcgctgctggcgctgaaggaagtggaggagatcagtctgctgcagccgcagaggtgggtgagatccgtgggctcctttggcggccccgcagaccctcatc

SEQ ID NO: 310993 - DNA, 937 bp, Homo sapiens
  misc_feature (799)..(799): n is a, c, g, or t
  misc_feature (801)..(801): n is a, c, g, or t
  misc_feature (858)..(858): n is a, c, g, or t
aaggtcaggtacaggcctgggtggtgcggcagctggcgccatggtgctgttgcacgtgctgtttgagcacgcggtcggctacgcgctgctggcgctgaaggaagtggaggagatcagtctgctgcagccgcaggtggaggagtccgtgctcaacctgggcaaattccacagcatcgttcgtctggtggccttttgtccctttgcctcatcccaggttgccttggaaaatgccaacgccgtgtctgaaggggttgttcatgaggacctccgcctgctcttggagacccacctgccgtccaaaaagaagaaagtactcttgggagttggggatcccaagattggtgccgcaatacaggaggagttagggtacaactgccagactggaggagtcatagctgagatcctgcgaggagttcgtctgcacttccacaatctggtgaagggtctgaccgatctgtcagcttgtaaagcacagctggggctgggacacagctattcccgtgccaaagttaagtttaatgtgaaccgggtggacaatatgatcatccagtccattagcctcctggaccagctggataaggacatcaataccttctctatgcgtgtcagggagtggtacgggtatcactttccggagctggtgaagatcatcaacgacaatgccacatactgccgtcttgcccagtttattggaaaccgaagggaactgaatgaggacaagctggagaagctggaggagctgacaatggatggggccaaggctaaggctattctggatgcctcacggtcctccatggcntngacttatctggcattgactggttaacatcgagagcttcccgacggtggggcctaatngaacgccgactagcactactggcgccagataaccattgccgacgtactatgggaacgccgcgatcaaactcgggcacaa

SEQ ID NO: 310994 - DNA, 1923 bp, Homo sapiens
ggatccggcaacgaaggtaccatggcgggacgtggcgccatggtgctgttgcacgtgctgtttgagcacgcggtcggctacgcgctgctggcgctgaaggaagtggaggagatcagtctgctgcagccgcaggtggaggagtccgtgctcaacctgggcaaattccacagcatcgttcgtctggtggccttttgtccctttgcctcatcccaggttgccttggaaaatgccaacgccgtgtctgaaggggttgttcatgaggacctccgcctgctcttggagacccacctgccgtccaaaaagaagaaagtactcttgggagttggggatcccaagattggtgccgcaatacaggaggagttagggtacaactgccagactggaggagtcatagctgagatcctgcgaggagttcgtctgcacttccacaatctggtgaagggtctgaccgatctgtcagcttgtaaagcacagctggggctgggacacagctattcccgtgccaaagttaagtttaatgtgaaccgggtggacaatatgatcatccagtccattagcctcctggaccagctggataaggacatcaataccttctctatgcgtgtcagggagtggtacgggtatcactttccggagctggtgaagatcatcaacgacaatgccacatactgccgtcttgcccagtttattggaaaccgaagggaactgaatgaggacaagctggagaagctggaggagctgacaatggatggggccaaggctaaggctattctggatgcctcacggtcctccatgggcatggacatatctgccattgacttgataaacatcgagagcttctccagtcgtgtggtgtctttatctgaataccgccagagcctacacacttacctgcgctccaagatgagccaagtagcccccagcctgtcagccctaattggggaagcggtaggtgcacgtctcatcgcacatgctggcagcctcaccaacctggccaagtatccagcatccacagtgcagatccttggggctgaaaaggccctgttcagagccctgaagacaaggggtaacaccccaaaatatggactcattttccactccaccttcattggccgagcagctgccaagaacaaaggccgcatctcccgatacctggcaaacaaatgcagtattgcctcacgaatcgattgcttctctgaggtgcccacgagtgtattcggggagaagcttcgagaacaagttgaagagcgactgtccttctatgagactggagagataccacgaaagaatctggatgtcatgaaggaagcaatggttcaggcagaggaagcggctgctgagattactaggaagctggagaaacaggagaagaaacgcttaaagaaggaaaagaaacggctggctgcacttgccctcgcgtcttcagaaaacagcagtagtactccagaggagtgtgaggagatgagtgaaaaacccaaaaagaagaaaaagcaaaagccccaggaggttcctcaggagaatggaatggaagacccatctatctctttctccaaacccaagaaaaagaaatctttttccaaggaggagttgatgagtagcgatcttgaagagaccgctggcagcaccagtattcccaagaggaagaagtctacacccaaggaggaaacagttaatgaccctgaggaggcaggccacagaagtggctccaagaaaaagaggaaattctccaaagaggagccggtcagcagtgggcctgaagaggcggttggcaagagcagctccaagaagaagaaaaagttccataaagcatcccaggaagattagaatgcaaatggacattctctgggaggtggggcataccatagcccaaggtgacatttcccaccctgtgccgtgttccccaataaaaacaaattcacaaga

SEQ ID NO: 310995 - DNA, 2101 bp, Homo sapiens
  misc_feature (1)..(1): n is a, c, g, or t
  misc_feature (8)..(8): n is a, c, g, or t
nggccggngtgaatcggacgaggcgggagctggcgccatggtgctgttgcacgtgctgtttgagcacgcggtcggctacgcgctgctggcgctgaaggaagtggaggagatcagtctgctgcagccgcaggtggaggagtccgtgctcaacctgggcaaattccacagcatcgttcgtctggtggccttttgtccctttgcctcatcccaggttgccttggaaaatgccaacgccgtgtctgaaggggttgttcatgaggacctccgcctgctcttggagacccacctgccgtccaaaaagaagaaagtactcttgggagttggggatcccaagattggtgccgcaatacaggaggagttagggtacaactgccagactggaggagtcatagctgagatcctgcgaggagttcgtctgcacttccacaatctggtgaagggtctgaccgatctgtcagcttgtaaagcacagctggggctgggacacagctattcccgtgccaaagttaagtttaatgtgaaccgggtggacaatatgatcatccagtccattagcctcctggaccagctggataaggacatcaataccttctctatgcgtgtcagggagtggtacgggtatcactttccggagctggtgaagatcatcaacgacaatgccacatactgccgtcttgcccagtttattggaaaccgaagggaactgaatgaggacaagctggagaagctggaggagctgacaatggatggggccaaggctaaggctattctggatgcctcacggtcctccatgggcatggacatatctgccattgacttgataaacatcgagagcttctccagtcgtgtggtgtctttatctgaataccgccagagcctacacacttacctgcgctccaagatgagccaagtagcccccagcctgtcagccctaattggggaagcggtaggtgcacgtctcatcgcacatgctggcagcctcaccaacctggccaagtatccagcatccacagtgcagatccttggggctgaaaaggccctgttcaggtaccagtgagggcacctgcccacaatcaggtgccacttctggtgcccactgcttgttgggggatcacggtgatggctgaccagggctccctgacctatacaggcctctgctatgggggtgatggccagtcctggtgtctgagtgattcccagggcccagcaaagggaccaagtttccagagccctgaagacaaggggtaacaccccaaaatatggactcattttccactccaccttcattggccgagcagctgccaagaacaaaggccgcatctcccgatacctggcaaacaaatgcagtattgcctcacgaatcgattgcttctctgaggtgcccacgagtgtattcggggagaagcttcgagaacaagttgaagagcgactgtccttctatgagactggagagataccacgaaagaatctggatgtcatgaaggaagcaatggttcaggcagaggaagcggctgctgagattactaggaagctggagaaacaggagaagaaacgcttaaagaaggaaaagaaacggctggctgcacttgccctcgcgtcttcagaaaacagcagtagtactccagaggagtgtgaggagatgagtgaaaaacccaaaaagaagaaaaagcaaaagccccaggaggttcctcaggagaatggaatggaagacccatctatctctttctccaaacccaagaaaaagaaatctttttccaaggaggagttgatgagtagcgatcttgaagagaccgctggcagcaccagtattcccaagaggaagaagtctacacccaaggaggaaacagttaatgaccctgaggaggcaggccacagaagtggctccaagaaaaagaggaaattctccaaagaggagccggtcagcagtgggcctgaagaggcggttggcaagagcagctccaagaagaagaaaaagttccataaagcatcccaggaagattagaatgcaaatggacattctctgggaggtggggcataccatagcccaaggtgacatttcccaccctgtgccgtgttccccaataaaaacaaattcacaaga

SEQ ID NO: 310996 - DNA, 1921 bp, Homo sapiens
  misc_feature (1)..(1): n is a, c, g, or t
  misc_feature (8)..(8): n is a, c, g, or t
nggccggngtgaatcggacgaggcgggagctggcgccatggtgctgttgcacgtgctgtttgagcacgcggtcggctacgcgctgctggcgctgaaggaagtggaggagatcagtctgctgcagccgcaggtggaggagtccgtgctcaacctgggcaaattccacagcatcgttcgtctggtggccttttgtccctttgcctcatcccaggttgccttggaaaatgccaacgccgtgtctgaaggggttgttcatgaggacctccgcctgctcttggagacccacctgccgtccaaaaagaagaaagtactcttgggagttggggatcccaagattggtgccgcaatacaggaggagttagggtacaactgccagactggaggagtcatagctgagatcctgcgaggagttcgtctgcacttccacaatctggtgaagggtctgaccgatctgtcagcttgtaaagcacagctggggctgggacacagctattcccgtgccaaagttaagtttaatgtgaaccgggtggacaatatgatcatccagtccattagcctcctggaccagctggataaggacatcaataccttctctatgcgtgtcagggagtggtacgggtatcactttccggagctggtgaagatcatcaacgacaatgccacatactgccgtcttgcccagtttattggaaaccgaagggaactgaatgaggacaagctggagaagctggaggagctgacaatggatggggccaaggctaaggctattctggatgcctcacggtcctccatgggcatggacatatctgccattgacttgataaacatcgagagcttctccagtcgtgtggtgtctttatctgaataccgccagagcctacacacttacctgcgctccaagatgagccaagtagcccccagcctgtcagccctaattggggaagcggtaggtgcacgtctcatcgcacatgctggcagcctcaccaacctggccaagtatccagcatccacagtgcagatccttggggctgaaaaggccctgttcagagccctgaagacaaggggtaacaccccaaaatatggactcattttccactccaccttcattggccgagcagctgccaagaacaaaggccgcatctcccgatacctggcaaacaaatgcagtattgcctcacgaatcgattgcttctctgaggtgcccacgagtgtattcggggagaagcttcgagaacaagttgaagagcgactgtccttctatgagactggagagataccacgaaagaatctggatgtcatgaaggaagcaatggttcaggcagaggaagcggctgctgagattactaggaagctggagaaacaggagaagaaacgcttaaagaaggaaaagaaacggctggctgcacttgccctcgcgtcttcagaaaacagcagtagtactccagaggagtgtgaggagatgagtgaaaaacccaaaaagaagaaaaagcaaaagccccaggaggttcctcaggagaatggaatggaagacccatctatctctttctccaaacccaagaaaaagaaatctttttccaaggaggagttgatgagtagcgatcttgaagagaccgctggcagcaccagtattcccaagaggaagaagtctacacccaaggaggaaacagttaatgaccctgaggaggcaggccacagaagtggctccaagaaaaagaggaaattctccaaagaggagccggtcagcagtgggcctgaagaggcggttggcaagagcagctccaagaagaagaaaaagttccataaagcatcccaggaagattagaatgcaaatggacattctctgggaggtggggcataccatagcccaaggtgacatttcccaccctgtgccgtgttccccaataaaaacaaattcacaaga

SEQ ID NO: 310997 - DNA, 2097 bp, Homo sapiens
  misc_feature (6)..(7): n is a, c, g, or t
  misc_feature (23)..(23): n is a, c, g, or t
  misc_feature (32)..(32): n is a, c, g, or t
gtggcnngtcgaggctgggtttnaattcggcngagggtgctgttgcacgtgctgtttgagcacgcggtcggctacgcgctgctggcgctgaaggaagtggaggagatcagtctgctgcagccgcaggtggaggagtccgtgctcaacctgggcaaattccacagcatcgttcgtctggtggccttttgtccctttgcctcatcccaggttgccttggaaaatgccaacgccgtgtctgaaggggttgttcatgaggacctccgcctgctcttggagacccacctgccgtccaaaaagaagaaagtactcttgggagttggggatcccaagattggtgccgcaatacaggaggagttagggtacaactgccagactggaggagtcatagctgagatcctgcgaggagttcgtctgcacttccacaatctggtgaagggtctgaccgatctgtcagcttgtaaagcacagctggggctgggacacagctattcccgtgccaaagttaagtttaatgtgaaccgggtggacaatatgatcatccagtccattagcctcctggaccagctggataaggacatcaataccttctctatgcgtgtcagggagtggtacgggtatcactttccggagctggtgaagatcatcaacgacaatgccacatactgccgtcttgcccagtttattggaaaccgaagggaactgaatgaggacaagctggagaagctggaggagctgacaatggatggggccaaggctaaggctattctggatgcctcacggtcctccatgggcatggacatatctgccattgacttgataaacatcgagagcttctccagtcgtgtggtgtctttatctgaataccgccagagcctacacacttacctgcgctccaagatgagccaagtagcccccagcctgtcagccctaattggggaagcggtaggtgcacgtctcatcgcacatgctggcagcctcaccaacctggccaagtatccagcatccacagtgcagatccttggggctgaaaaggccctgttcaggtaccagtgagggcacctgcccacaatcaggtgccacttctggtgcccactgcttgttgggggatcacggtgatggctgaccagggctccctgacctatacaggcctctgctatgggggtgatggccagtcctggtgtctgagtgattcccagggcccagcaaagggaccaagtttccagagccctgaagacaaggggtaacaccccaaaatatggactcattttccactccaccttcattggccgagcagctgccaagaacaaaggccgcatctcccgatacctggcaaacaaatgcagtattgcctcacgaatcgattgcttctctgaggtgcccacgagtgtattcggggagaagcttcgagaacaagttgaagagcgactgtccttctatgagactggagagataccacgaaagaatctggatgtcatgaaggaagcaatggttcaggcagaggaagcggctgctgagattactaggaagctggagaaacaggagaagaaacgcttaaagaaggaaaagaaacggctggctgcacttgccctcgcgtcttcagaaaacagcagtagtactccagaggagtgtgaggagatgagtgaaaaacccaaaaagaagaaaaagcaaaagccccaggaggttcctcaggagaatggaatggaagacccatctatctctttctccaaacccaagaaaaagaaatctttttccaaggaggagttgatgagtagcgatcttgaagagaccgctggcagcaccagtattcccaagaggaagaagtctacacccaaggaggaaacagttaatgaccctgaggaggcaggccacagaagtggctccaagaaaaagaggaaattctccaaagaggagccggtcagcagtgggcctgaagaggcggttggcaagagcagctccaagaagaagaaaaagttccataaagcatcccaggaagattagaatgcaaatggacattctctgggaggtggggcataccatagcccaaggtgacatttcccaccctgtgccgtgttccccaataaaaacaaattcacaaga

SEQ ID NO: 310998 - DNA, 2287 bp, Homo sapiens
  misc_feature (1)..(1): n is a, c, g, or t
  misc_feature (8)..(8): n is a, c, g, or t
nggccggngtgaatcggacgaggcgggagctggcgccatggtgctgttgcacgtgctgtttgagcacgcggtcggctacgcgctgctggcgctgaaggaagtggaggagatcagtctgctgcagccgcaggtggaggagtccgtgctcaacctgggcaaattccacagcatcgttcgtctggtggccttttgtccctttgcctcatcccaggttgccttggaaaatgccaacgccgtgtctgaaggggttgttcatgaggacctccgcctgctcttggagacccacctgccgtccaaaaagaagaaagtactcttgggagttggggatcccaagattggtgccgcaatacaggaggagttagggtacaactgccagactggaggagtcatagctgagatcctgcgaggagttcgtctgcacttccacaatctggtgaagggtctgaccgatctgtcagcttgtaaagcacagctggggctgggacacagctattcccgtgccaaagttaagtttaatgtgaaccgggtggacaatatgatcatccagtccattagcctcctggaccagctggataaggacatcaataccttctctatgcgtgtcagggagtggtacgggtatcactttccggagctggtgaagatcatcaacgacaatgccacatactgccgtcttgcccagtttattggaaaccgaagggaactgaatgaggacaagctggagaagctggaggagctgacaatggatggggccaaggctaaggctattctggatgcctcacggtcctccatgggcatggacatatctgccattgacttgataaacatcgagagcttctccagtcgtgtggtgtctttatctgaataccgccagagcctacacacttacctgcgctccaagatgagccaagtagcccccagcctgtcagccctaattggggaagcggtaggtgcacgtctcatcgcacatgctggcagcctcaccaacctggccaagtatccagcatccacagtgcagatccttggggctgaaaaggccctgttcaggtaccagtgagggcacctgcccacaatcaggtgccacttctggtgcccactgcttgttgggggatcacggtgatggctgaccagggctccctgacctatacaggcctctgctatgggggtgatggccagtcctggtgtctgagtgattcccagggcccagcaaagggaccaagtttccaggtcagcgacattggatgccttccctctgcctctgggagctatgggttggcatgcattggggtagagatccaatctggcctgaggctcactcaggacttcggggtgagaggaggggaggagctgagctgccttggctaatggggttgaaatttctgatcttaaactctccactgaatattctctcagagccctgaagacaaggggtaacaccccaaaatatggactcattttccactccaccttcattggccgagcagctgccaagaacaaaggccgcatctcccgatacctggcaaacaaatgcagtattgcctcacgaatcgattgcttctctgaggtgcccacgagtgtattcggggagaagcttcgagaacaagttgaagagcgactgtccttctatgagactggagagataccacgaaagaatctggatgtcatgaaggaagcaatggttcaggcagaggaagcggctgctgagattactaggaagctggagaaacaggagaagaaacgcttaaagaaggaaaagaaacggctggctgcacttgccctcgcgtcttcagaaaacagcagtagtactccagaggagtgtgaggagatgagtgaaaaacccaaaaagaagaaaaagcaaaagccccaggaggttcctcaggagaatggaatggaagacccatctatctctttctccaaacccaagaaaaagaaatctttttccaaggaggagttgatgagtagcgatcttgaagagaccgctggcagcaccagtattcccaagaggaagaagtctacacccaaggaggaaacagttaatgaccctgaggaggcaggccacagaagtggctccaagaaaaagaggaaattctccaaagaggagccggtcagcagtgggcctgaagaggcggttggcaagagcagctccaagaagaagaaaaagttccataaagcatcccaggaagattagaatgcaaatggacattctctgggaggtggggcataccatagcccaaggtgacatttcccaccctgtgccgtgttccccaataaaaacaaattcacaaga

SEQ ID NO: 310999 - DNA, 2633 bp, Homo sapiens
  misc_feature (1)..(1): n is a, c, g, or t
  misc_feature (8)..(8): n is a, c, g, or t
nggccggngtgaatcggacgaggcgggagctggcgccatggtgctgttgcacgtgctgtttgagcacgcggtcggctacgcgctgctggcgctgaaggaagtggaggagatcagtctgctgcagccgcaggtggaggagtccgtgctcaacctgggcaaattccacagcatcgttcgtctggtggccttttgtccctttgcctcatcccaggttgccttggaaaatgccaacgccgtgtctgaaggggttgttcatgaggacctccgcctgctcttggagacccacctgccgtccaaaaagaagaaagtactcttgggagttggggatcccaagattggtgccgcaatacaggaggagttagggtacaactgccagactggaggagtcatagctgagatcctgcgaggagttcgtctgcacttccacaatctggtgaagggtctgaccgatctgtcagcttgtaaagcacagctggggctgggacacagctattcccgtgccaaagttaagtttaatgtgaaccgggtggacaatatgatcatccagtccattagcctcctggaccagctggataaggacatcaataccttctctatgcgtgtcagggagtggtacgggtatcactttccggagctggtgaagatcatcaacgacaatgccacatactgccgtcttgcccagtttattggaaaccgaagggaactgaatgaggacaagctggagaagctggaggagctgacaatggatggggccaaggctaaggctattctggatgcctcacggtcctccatgggcatggacatatctgccattgacttgataaacatcgagagcttctccagtcgtgtggtgtctttatctgaataccgccagagcctacacacttacctgcgctccaagatgagccaagtagcccccagcctgtcagccctaattggggaagcggtaggtgcacgtctcatcgcacatgctggcagcctcaccaacctggccaagtatccagcatccacagtgcagatccttggggctgaaaaggccctgttcagagccctgaagacaaggggtaacaccccaaaatatggactcattttccactccaccttcattggccgagcagctgccaagaacaaaggccgcatctcccgatacctggcaaacaaatgcagtattgcctcacgaatcgattgcttctctgaggtgcccacgagtgtattcggggagaagcttcgagaacaagttgaagagcgactgtccttctatgagactggagagataccacgaaagaatctggatgtcatgaaggaagcaatggttcaggcagaggaagcggctgctgagattactaggaagctggagaaacaggagaagaaacgcttaaagaaggaaaagaaacggctggctgcacttgccctcgcgtcttcagaaaacagcagtagtactccagaggagtgtgaggtcagtaggcagcacggccctggcagagatcctaggttgtaggattttcaacagcagaacaaaggatatgctgcatcaagctgtggtcttgagtccaggcttttggactgaaacaaggacctgaaacatctaaaactacctcttgattctataggaaggagataggtgctgaacttgctcaagagcccagagagctggttgtagctcacacccgttccctgggcatgtgtgttctgtcctcggctgcctcccaggagtcctcaacctggggtagtgtaaattcctgctctgcttattatcagacgtgtgtccggaggtggtcgtgtttcacagtggggatgggggcagggaggtccccaatgtgctaagctacaatcattctccctgagattttcatttagcacccagtttcttaaacagtgtttcagggccctgtctggaacttggcatgatggttctgttgcgaccagcatggtgggtgttttttaggtttttttttttaatgggctgaggtaatttctcatgacatgttttccttctaatttgggacagcctttggggtggatttctaaagttatacccacacaattaaactatcccagaaacactgggcaatgttaacgacacgcgttcccctgccttggctacttaattgctgaagatgtaatgagcactgttctcacagcctgttcccctgtccttccctttaggagagatgagtgaaaaacccaaaaagaagaaaaagcaaaagccccaggaggttcctcaggagaatggaatggaagacccatctatctctttctccaaacccaagaaaaagaaatctttttccaaggaggagttgatgagtagcgatcttgaagagaccgctggcagcaccagtattcccaagaggaagaagtctacacccaaggaggaaacagttaatgaccctgaggaggcaggccacagaagtggctccaagaaaaagaggaaattctccaaagaggagccggtcagcagtgggcctgaagaggcggttggcaagagcagctccaagaagaagaaaaagttccataaagcatcccaggaagattagaatgcaaatggacattctctgggaggtggggcataccatagcccaaggtgacatttcccaccctgtgccgtgttccccaataaaaacaaattcacaaga

SEQ ID NO: 311000 - DNA, 2479 bp, Homo sapiens
  misc_feature (1)..(1): n is a, c, g, or t
  misc_feature (8)..(8): n is a, c, g, or t
nggccggngtgaatcggacgaggcgggagctggcgccatggtgctgttgcacgtgctgtttgagcacgcggtcggctacgcgctgctggcgctgaaggaagtggaggagatcagtctgctgcagccgcaggtggaggagtccgtgctcaacctgggcaaattccacagcatcgttcgtctggtggccttttgtccctttgcctcatcccaggttgccttggaaaatgccaacgccgtgtctgaaggggttgttcatgaggacctccgcctgctcttggagacccacctgccgtccaaaaagaagaaagtactcttgggagttggggatcccaagattggtgccgcaatacaggaggagttagggtacaactgccagactggaggagtcatagctgagatcctgcgaggagttcgtctgcacttccacaatctggtgaagggtctgaccgatctgtcagcttgtaaagcacagctggggctgggacacagctattcccgtgccaaagttaagtttaatgtgaaccgggtggacaatatgatcatccagtccattagcctcctggaccagctggataaggacatcaataccttctctatgcgtgtcagggagtggtacgggtatcactttccggagctggtgaagatcatcaacgacaatgccacatactgccgtcttgcccagtttattggaaaccgaagggaactgaatgaggacaagctggagaagctggaggagctgacaatggatggggccaaggctaaggctattctggatgcctcacggtcctccatgggcatggacatatctgccattgacttgataaacatcgagagcttctccagtcgtgtggtgtctttatctgaataccgccagagcctacacacttacctgcgctccaagatgagccaagtagcccccagcctgtcagccctaattggggaagcggtaggtgcacgtctcatcgcacatgctggcagcctcaccaacctggccaagtatccagcatccacagtgcagatccttggggctgaaaaggccctgttcagagccctgaagacaaggggtaacaccccaaaatatggactcattttccactccaccttcattggccgagcagctgccaagaacaaaggccgcatctcccgatacctggcaaacaaatgcagtattgcctcacgaatcgattgcttctctgaggtgcccacgagtgtattcggggagaagcttcgagaacaagttgaagagcgactgtccttctatgagactggagagataccacgaaagaatctggatgtcatgaaggaagcaatggttcaggcagaggaagcggctgctgagattactaggaagctggagaaacaggagaagaaacgcttaaagaaggaaaagaaacggctggctgcacttgccctcgcgtcttcagaaaacagcagtagtactccagaggagtgtgaggaaggagataggtgctgaacttgctcaagagcccagagagctggttgtagctcacacccgttccctgggcatgtgtgttctgtcctcggctgcctcccaggagtcctcaacctggggtagtgtaaattcctgctctgcttattatcagacgtgtgtccggaggtggtcgtgtttcacagtggggatgggggcagggaggtccccaatgtgctaagctacaatcattctccctgagattttcatttagcacccagtttcttaaacagtgtttcagggccctgtctggaacttggcatgatggttctgttgcgaccagcatggtgggtgttttttaggtttttttttttaatgggctgaggtaatttctcatgacatgttttccttctaatttgggacagcctttggggtggatttctaaagttatacccacacaattaaactatcccagaaacactgggcaatgttaacgacacgcgttcccctgccttggctacttaattgctgaagatgtaatgagcactgttctcacagcctgttcccctgtccttccctttaggagagatgagtgaaaaacccaaaaagaagaaaaagcaaaagccccaggaggttcctcaggagaatggaatggaagacccatctatctctttctccaaacccaagaaaaagaaatctttttccaaggaggagttgatgagtagcgatcttgaagagaccgctggcagcaccagtattcccaagaggaagaagtctacacccaaggaggaaacagttaatgaccctgaggaggcaggccacagaagtggctccaagaaaaagaggaaattctccaaagaggagccggtcagcagtgggcctgaagaggcggttggcaagagcagctccaagaagaagaaaaagttccataaagcatcccaggaagattagaatgcaaatggacattctctgggaggtggggcataccatagcccaaggtgacatttcccaccctgtgccgtgttccccaataaaaacaaattcacaaga

SEQ ID NO: 311001 - DNA, 2106 bp, Homo sapiens
  misc_feature (1)..(1): n is a, c, g, or t
  misc_feature (8)..(8): n is a, c, g, or t
nggccggngtgaatcggacgaggcgggagctggcgccatggtgctgttgcacgtgctgtttgagcacgcggtcggctacgcgctgctggcgctgaaggaagtggaggagatcagtctgctgcagccgcaggtggaggagtccgtgctcaacctgggcaaattccacagcatcgttcgtctggtggccttttgtccctttgcctcatcccaggttgccttggaaaatgccaacgccgtgtctgaaggggttgttcatgaggacctccgcctgctcttggagacccacctgccgtccaaaaagaagaaagtactcttgggagttggggatcccaagattggtgccgcaatacaggaggagttagggtacaactgccagactggaggagtcatagctgagatcctgcgaggagttcgtctgcacttccacaatctggtgaagggtctgaccgatctgtcagcttgtaaagcacagctggggctgggacacagctattcccgtgccaaagttaagtttaatgtgaaccgggtggacaatatgatcatccagtccattagcctcctggaccagctggataaggacatcaataccttctctatgcgtgtcagggagtggtacgggtatcactttccggagctggtgaagatcatcaacgacaatgccacatactgccgtcttgcccagtttattggaaaccgaagggaactgaatgaggacaagctggagaagctggaggagctgacaatggatggggccaaggctaaggctattctggatgcctcacggtcctccatgggcatggacatatctgccattgacttgataaacatcgagagcttctccagtcgtgtggtgtctttatctgaataccgccagagcctacacacttacctgcgctccaagatgagccaagtagcccccagcctgtcagccctaattggggaagcggtaggtgcacgtctcatcgcacatgctggcagcctcaccaacctggccaagtatccagcatccacagtgcagatccttggggctgaaaaggccctgttcagagccctgaagacaaggggtaacaccccaaaatatggactcattttccactccaccttcattggccgagcagctgccaagaacaaaggccgcatctcccgatacctggcaaacaaatgcagtattgcctcacgaatcgattgcttctctgaggtgcccacgagtgtattcggggagaagcttcgagaacaagttgaagagcgactgtccttctatgagactggagagataccacgaaagaatctggatgtcatgaaggaagcaatggttcaggtcagttgggctttgctgggtgtggagtggcatagctagctgttggaggtgatgaactgtctgagcctgaccttgtagaatggaggcaaaaaaactgatttaatgagcctgatccaataaagccagaaaggagtcctcagagcaccagaagtcttcaggcccttttagcacttttctttgaccaggcagaggaagcggctgctgagattactaggaagctggagaaacaggagaagaaacgcttaaagaaggaaaagaaacggctggctgcacttgccctcgcgtcttcagaaaacagcagtagtactccagaggagtgtgaggagatgagtgaaaaacccaaaaagaagaaaaagcaaaagccccaggaggttcctcaggagaatggaatggaagacccatctatctctttctccaaacccaagaaaaagaaatctttttccaaggaggagttgatgagtagcgatcttgaagagaccgctggcagcaccagtattcccaagaggaagaagtctacacccaaggaggaaacagttaatgaccctgaggaggcaggccacagaagtggctccaagaaaaagaggaaattctccaaagaggagccggtcagcagtgggcctgaagaggcggttggcaagagcagctccaagaagaagaaaaagttccataaagcatcccaggaagattagaatgcaaatggacattctctgggaggtggggcataccatagcccaaggtgacatttcccaccctgtgccgtgttccccaataaaaacaaattcacaaga

SEQ ID NO: 311002 - DNA, 2818 bp, Homo sapiens
  misc_feature (1)..(1): n is a, c, g, or t
  misc_feature (8)..(8): n is a, c, g, or t
nggccggngtgaatcggacgaggcgggagctggcgccatggtgctgttgcacgtgctgtttgagcacgcggtcggctacgcgctgctggcgctgaaggaagtggaggagatcagtctgctgcagccgcaggtggaggagtccgtgctcaacctgggcaaattccacagcatcgttcgtctggtggccttttgtccctttgcctcatcccaggttgccttggaaaatgccaacgccgtgtctgaaggggttgttcatgaggacctccgcctgctcttggagacccacctgccgtccaaaaagaagaaagtactcttgggagttggggatcccaagattggtgccgcaatacaggaggagttagggtacaactgccagactggaggagtcatagctgagatcctgcgaggagttcgtctgcacttccacaatctggtgaagggtctgaccgatctgtcagcttgtaaagcacagctggggctgggacacagctattcccgtgccaaagttaagtttaatgtgaaccgggtggacaatatgatcatccagtccattagcctcctggaccagctggataaggacatcaataccttctctatgcgtgtcagggagtggtacgggtatcactttccggagctggtgaagatcatcaacgacaatgccacatactgccgtcttgcccagtttattggaaaccgaagggaactgaatgaggacaagctggagaagctggaggagctgacaatggatggggccaaggctaaggctattctggatgcctcacggtcctccatgggcatggacatatctgccattgacttgataaacatcgagagcttctccagtcgtgtggtgtctttatctgaataccgccagagcctacacacttacctgcgctccaagatgagccaagtagcccccagcctgtcagccctaattggggaagcggtaggtgcacgtctcatcgcacatgctggcagcctcaccaacctggccaagtatccagcatccacagtgcagatccttggggctgaaaaggccctgttcagagccctgaagacaaggggtaacaccccaaaatatggactcattttccactccaccttcattggccgagcagctgccaagaacaaaggccgcatctcccgatacctggcaaacaaatgcagtattgcctcacgaatcgattgcttctctgaggtgcccacgagtgtattcggggagaagcttcgagaacaagttgaagagcgactgtccttctatgagactggagagataccacgaaagaatctggatgtcatgaaggaagcaatggttcaggtcagttgggctttgctgggtgtggagtggcatagctagctgttggaggtgatgaactgtctgagcctgaccttgtagaatggaggcaaaaaaactgatttaatgagcctgatccaataaagccagaaaggagtcctcagagcaccagaagtcttcaggcccttttagcacttttctttgaccaggcagaggaagcggctgctgagattactaggaagctggagaaacaggagaagaaacgcttaaagaaggaaaagaaacggctggctgcacttgccctcgcgtcttcagaaaacagcagtagtactccagaggagtgtgaggtcagtaggcagcacggccctggcagagatcctaggttgtaggattttcaacagcagaacaaaggatatgctgcatcaagctgtggtcttgagtccaggcttttggactgaaacaaggacctgaaacatctaaaactacctcttgattctataggaaggagataggtgctgaacttgctcaagagcccagagagctggttgtagctcacacccgttccctgggcatgtgtgttctgtcctcggctgcctcccaggagtcctcaacctggggtagtgtaaattcctgctctgcttattatcagacgtgtgtccggaggtggtcgtgtttcacagtggggatgggggcagggaggtccccaatgtgctaagctacaatcattctccctgagattttcatttagcacccagtttcttaaacagtgtttcagggccctgtctggaacttggcatgatggttctgttgcgaccagcatggtgggtgttttttaggtttttttttttaatgggctgaggtaatttctcatgacatgttttccttctaatttgggacagcctttggggtggatttctaaagttatacccacacaattaaactatcccagaaacactgggcaatgttaacgacacgcgttcccctgccttggctacttaattgctgaagatgtaatgagcactgttctcacagcctgttcccctgtccttccctttaggagagatgagtgaaaaacccaaaaagaagaaaaagcaaaagccccaggaggttcctcaggagaatggaatggaagacccatctatctctttctccaaacccaagaaaaagaaatctttttccaaggaggagttgatgagtagcgatcttgaagagaccgctggcagcaccagtattcccaagaggaagaagtctacacccaaggaggaaacagttaatgaccctgaggaggcaggccacagaagtggctccaagaaaaagaggaaattctccaaagaggagccggtcagcagtgggcctgaagaggcggttggcaagagcagctccaagaagaagaaaaagttccataaagcatcccaggaagattagaatgcaaatggacattctctgggaggtggggcataccatagcccaaggtgacatttcccaccctgtgccgtgttccccaataaaaacaaattcacaaga

SEQ ID NO: 311003 - DNA, 2268 bp, Homo sapiens
  misc_feature (1)..(1): n is a, c, g, or t
  misc_feature (8)..(8): n is a, c, g, or t
  misc_feature (1948)..(1948): n is a, c, g, or t
nggccggngtgaatcggacgaggcgggagctggcgccatggtgctgttgcacgtgctgtttgagcacgcggtcggctacgcgctgctggcgctgaaggaagtggaggagatcagtctgctgcagccgcaggtggaggagtccgtgctcaacctgggcaaattccacagcatcgttcgtctggtggccttttgtccctttgcctcatcccaggttgccttggaaaatgccaacgccgtgtctgaaggggttgttcatgaggacctccgcctgctcttggagacccacctgccgtccaaaaagaagaaagtactcttgggagttggggatcccaagattggtgccgcaatacaggaggagttagggtacaactgccagactggaggagtcatagctgagatcctgcgaggagttcgtctgcacttccacaatctggtgaagggtctgaccgatctgtcagcttgtaaagcacagctggggctgggacacagctattcccgtgccaaagttaagtttaatgtgaaccgggtggacaatatgatcatccagtccattagcctcctggaccagctggataaggacatcaataccttctctatgcgtgtcagggagtggtacgggtatcactttccggagctggtgaagatcatcaacgacaatgccacatactgccgtcttgcccagtttattggaaaccgaagggaactgaatgaggacaagctggagaagctggaggagctgacaatggatggggccaaggctaaggctattctggatgcctcacggtcctccatgggcatggacatatctgccattgacttgataaacatcgagagcttctccagtcgtgtggtgtctttatctgaataccgccagagcctacacacttacctgcgctccaagatgagccaagtagcccccagcctgtcagccctaattggggaagcggtaggtgcacgtctcatcgcacatgctggcagcctcaccaacctggccaagtatccagcatccacagtgcagatccttggggctgaaaaggccctgttcagagccctgaagacaaggggtaacaccccaaaatatggactcattttccactccaccttcattggccgagcagctgccaagaacaaaggccgcatctcccgatacctggcaaacaaatgcagtattgcctcacgaatcgattgcttctctgaggtgcccacgagtgtattcggggagaagcttcgagaacaagttgaagagcgactgtccttctatgagactggagagataccacgaaagaatctggatgtcatgaaggaagcaatggttcaggcagaggaagcggctgctgagattactaggaagctggagaaacaggagaagaaacgcttaaagaaggaaaagaaacggctggctgcacttgccctcgcgtcttcagaaaacagcagtagtactccagaggagtgtgaggagatgagtgaaaaacccaaaaagaagaaaaagcaaaagccccaggaggttcctcaggagaatggaatggaagacccatctatctctttctccaaacccaagaaaaagaaatctttttccaaggaggagttgatgagtagcgatcttgaagagaccgctggcagcaccagtattcccaagaggaagaagtctacacccaaggaggaaacagttaatgaccctgaggaggcaggccacagaagtggctccaagaaaaagaggaaattctccaaagaggagccggtcagcagtgggcctgaagaggcggttggcaagagcagctccaagaagaagaaaaagttccataaagcatcccaggaagattagaatgcaaatggacattctctgggaggtggggcataccatagcccaaggtgacatttcccaccctgtgccgtgttccccaataaaaacaaattcacaagacagaaaacaaaaaaggggggcgcaaanatcccgggggccaaataagggaccacgtctgcaaagggccaaagaacggataaaacgcggacacggacgcggcattaaacacgctggcacgggcaaacagctggcaggggacccggctaagaagccctcaactgtggcgggagcaagtgcggagacccacgcaacaaaccccggaagagaaacacggacagcgcacacgcactagtgccggaaggcagcatacaacaacaacagcagacaacacagacgagagacagcacgcaggacaacgacacgtacacgaagacagatcgagacaacagtcaccacgtagcatagct

SEQ ID NO: 311004 - DNA, 1807 bp, Homo sapiens
  misc_feature (1)..(1): n is a, c, g, or t
  misc_feature (8)..(8): n is a, c, g, or t
nggccggngtgaatcggacgaggcgggagctggcgccatggtgctgttgcacgtgctgtttgagcacgcggtcggctacgcgctgctggcgctgaaggaagtggaggagatcagtctgctgcagccgcaggtggaggagtccgtgctcaacctgggcaaattccacagcatcgttcgtctggtggccttttgtccctttgcctcatcccaggttgccttggaaaatgccaacgccgtgtctgaaggggttgttcatgaggacctccgcctgctcttggagacccacctgccgtccaaaaagaagaaagtactcttgggagttggggatcccaagattggtgccgcaatacaggaggagttagggtacaactgccagactggaggagtcatagctgagatcctgcgaggagttcgtctgcacttccacaatctggtgaagggtctgaccgatctgtcagcttgtaaagcacagctggggctgggacacagctattcccgtgccaaagttaagtttaatgtgaaccgggtggacaatatgatcatccagtccattagcctcctggaccagctggataaggacatcaataccttctctatgcgtgtcagggagtggtacgggtatcactttccggagctggtgaagatcatcaacgacaatgccacatactgccgtcttgcccagtttattggaaaccgaagggaactgaatgaggacaagctggagaagctggaggagctgacaatggatggggccaaggctaaggctattctggatgcctcacggtcctccatgggcatggacatatctgccattgacttgataaacatcgagagcttctccagtcgtgtggtgtctttatctgaataccgccagagcctacacacttacctgcgctccaagatgagccaagtagcccccagcctgtcagccctaattggggaagcggtaggtgcacgtctcatcgcacatgctggcagcctcaccaacctggccaagtatccagctgccaagaacaaaggccgcatctcccgatacctggcaaacaaatgcagtattgcctcacgaatcgattgcttctctgaggtgcccacgagtgtattcggggagaagcttcgagaacaagttgaagagcgactgtccttctatgagactggagagataccacgaaagaatctggatgtcatgaaggaagcaatggttcaggcagaggaagcggctgctgagattactaggaagctggagaaacaggagaagaaacgcttaaagaaggaaaagaaacggctggctgcacttgccctcgcgtcttcagaaaacagcagtagtactccagaggagtgtgaggagatgagtgaaaaacccaaaaagaagaaaaagcaaaagccccaggaggttcctcaggagaatggaatggaagacccatctatctctttctccaaacccaagaaaaagaaatctttttccaaggaggagttgatgagtagcgatcttgaagagaccgctggcagcaccagtattcccaagaggaagaagtctacacccaaggaggaaacagttaatgaccctgaggaggcaggccacagaagtggctccaagaaaaagaggaaattctccaaagaggagccggtcagcagtgggcctgaagaggcggttggcaagagcagctccaagaagaagaaaaagttccataaagcatcccaggaagattagaatgcaaatggacattctctgggaggtggggcataccatagcccaaggtgacatttcccaccctgtgccgtgttccccaataaaaacaaattcacaaga

SEQ ID NO: 311005 - DNA, 2659 bp, Homo sapiens
  misc_feature (1)..(1): n is a, c, g, or t
  misc_feature (8)..(8): n is a, c, g, or t
nggccggngtgaatcggacgaggcgggagctggcgccatggtgctgttgcacgtgctgtttgagcacgcggtcggctacgcgctgctggcgctgaaggaagtggaggagatcagtctgctgcagccgcaggtggaggagtccgtgctcaacctgggcaaattccacagcatcgttcgtctggtggccttttgtccctttgcctcatcccaggttgccttggaaaatgccaacgccgtgtctgaaggggttgttcatgaggacctccgcctgctcttggagacccacctgccgtccaaaaagaagaaagtactcttgggagttggggatcccaagattggtgccgcaatacaggaggagttagggtacaactgccagactggaggagtcatagctgagatcctgcgaggagttcgtctgcacttccacaatctggtgaagggtctgaccgatctgtcagcttgtaaagcacagctggggctgggacacagctattcccgtgccaaagttaagtttaatgtgaaccgggtggacaatatgatcatccagtccattagcctcctggaccagctggataaggacatcaataccttctctatgcgtgtcagggagtggtacgggtatcactttccggagctggtgaagatcatcaacgacaatgccacatactgccgtcttgcccagtttattggaaaccgaagggaactgaatgaggacaagctggagaagctggaggagctgacaatggatggggccaaggctaaggctattctggatgcctcacggtcctccatgggcatggacatatctgccattgacttgataaacatcgagagcttctccagtcgtgtggtgtctttatctgaataccgccagagcctacacacttacctgcgctccaagatgagccaagtagcccccagcctgtcagccctaattggggaagcggtaggtgcacgtctcatcgcacatgctggcagcctcaccaacctggccaagtatccagcatccacagtgcagatccttggggctgaaaaggccctgttcaggtaccagtgagggcacctgcccacaatcaggtgccacttctggtgcccactgcttgttgggggatcacggtgatggctgaccagggctccctgacctatacaggcctctgctatgggggtgatggccagtcctggtgtctgagtgattcccagggcccagcaaagggaccaagtttccagagccctgaagacaaggggtaacaccccaaaatatggactcattttccactccaccttcattggccgagcagctgccaagaacaaaggccgcatctcccgatacctggcaaacaaatgcagtattgcctcacgaatcgattgcttctctgaggtgcccacgagtgtattcggggagaagcttcgagaacaagttgaagagcgactgtccttctatgagactggagagataccacgaaagaatctggatgtcatgaaggaagcaatggttcaggcagaggaagcggctgctgagattactaggaagctggagaaacaggagaagaaacgcttaaagaaggaaaagaaacggctggctgcacttgccctcgcgtcttcagaaaacagcagtagtactccagaggagtgtgaggaaggagataggtgctgaacttgctcaagagcccagagagctggttgtagctcacacccgttccctgggcatgtgtgttctgtcctcggctgcctcccaggagtcctcaacctggggtagtgtaaattcctgctctgcttattatcagacgtgtgtccggaggtggtcgtgtttcacagtggggatgggggcagggaggtccccaatgtgctaagctacaatcattctccctgagattttcatttagcacccagtttcttaaacagtgtttcagggccctgtctggaacttggcatgatggttctgttgcgaccagcatggtgggtgttttttaggtttttttttttaatgggctgaggtaatttctcatgacatgttttccttctaatttgggacagcctttggggtggatttctaaagttatacccacacaattaaactatcccagaaacactgggcaatgttaacgacacgcgttcccctgccttggctacttaattgctgaagatgtaatgagcactgttctcacagcctgttcccctgtccttccctttaggagagatgagtgaaaaacccaaaaagaagaaaaagcaaaagccccaggaggttcctcaggagaatggaatggaagacccatctatctctttctccaaacccaagaaaaagaaatctttttccaaggaggagttgatgagtagcgatcttgaagagaccgctggcagcaccagtattcccaagaggaagaagtctacacccaaggaggaaacagttaatgaccctgaggaggcaggccacagaagtggctccaagaaaaagaggaaattctccaaagaggagccggtcagcagtgggcctgaagaggcggttggcaagagcagctccaagaagaagaaaaagttccataaagcatcccaggaagattagaatgcaaatggacattctctgggaggtggggcataccatagcccaaggtgacatttcccaccctgtgccgtgttccccaataaaaacaaattcacaaga

SEQ ID NO: 311006 - DNA, 1958 bp, Homo sapiens
  misc_feature (1)..(1): n is a, c, g, or t
  misc_feature (8)..(8): n is a, c, g, or t
  misc_feature (1635)..(1635): n is a, c, g, or t
nggccggngtgaatcggacgaggcgggagctggcgccatggtgctgttgcacgtgctgtttgagcacgcggtcggctacgcgctgctggcgctgaaggaagtggaggagatcagtctgctgcagccgcaggtggaggagtccgtgctcaacctgggcaaattccacagcatcgttcgtctggtggccttttgtccctttgcctcatcccaggttgccttggaaaatgccaacgccgtgtctgaaggggttgttcatgaggacctccgcctgctcttggagacccacctgccgtccaaaaagaagaaagtactcttgggagttggggatcccaagattggtgccgcaatacaggaggagttagggtacaactgccagactggaggagtcatagctgagatcctgcgaggagttcgtctgcacttccacaatctggtgaagggtctgaccgatctgtcagcttgtaaagcacagctggggctgggacacagctattcccgtgccaaagttaagtttaatgtgaaccgggtggacaatatgatcatccagtccattagcctcctggaccagctggataaggacatcaataccttctctatgcgtgtcagggagtggtacgggtatcactttccggagctggtgaagatcatcaacgacaatgccacatactgccgtcttgcccagtttattggaaaccgaagggaactgaatgaggacaagctggagaagctggaggagctgacaatggatggggccaaggctaaggctattctggatgcctcacggtcctccatgggcatggacatatctgccattgacttgataaacatcgagagcttctccagtcgtgtggtgtctttatctgaataccgccagagcctacacacttacctgcgctccaagatgagccaagtagcccccagcctgtcagccctaattggggaagcggtaggtgcacgtctcatcgcacatgctggcagcctcaccaacctggccaagtatccagcatccacagtgcagatccttggggctgaaaaggccctgttcagagccctgaagacaaggggtaacaccccaaaatatggactcattttccactccaccttcattggccgagcagctgccaagaacaaaggccgcatctcccgatacctggcaaacaaatgcagtattgcctcacgaatcgattgcttctctgaggtgcccacgagtgtattcggggagaagcttcgagaacaagttgaagagcgactgtccttctatgagactggagagataccacgaaagaatctggatgtcatgaaggaagcaatggttcaggcagaggaagcggctgctgagattactaggaagctggagaaacaggagaagaaacgcttaaagaaggaaaagaaacggctggctgcacttgccctcgcgtcttcagaaaacagcagtagtactccagaggagtgtgaggagatgagtgaaaaacccaaaaagaagaaaaagcaaaagccccaggaggttcctcaggagaatggaatggaagacccatctatctctttctccaaacccaagaaaaagaaatctttttccaaggaggagttgatgagtagcgatcttgaagagaccgctggcgggccctttgggggggnccccaaaagggccccaaaccagcaccagtattcccaagaggaagaagtctacacccaaggaggaaacagttaatgaccctgaggaggcaggccacagaagtggctccaagaaaaagaggaaattctccaaagaggagccggtcagcagtgggcctgaagaggcggttggcaagagcagctccaagaagaagaaaaagttccataaagcatcccaggaagattagaatgcaaatggacattctctgggaggtggggcataccatagcccaaggtgacatttcccaccctgtgccgtgttccccaataaaaacaaattcacaaga

SEQ ID NO: 311007 - DNA, 2037 bp, Homo sapiens
  misc_feature (1)..(1): n is a, c, g, or t
  misc_feature (8)..(8): n is a, c, g, or t
nggccggngtgaatcggacgaggcgggagctggcgccatggtgctgttgcacgtgctgtttgagcacgcggtcggctacgcgctgctggcgctgaaggaagtggaggagatcagtctgctgcagccgcaggtggaggagtccgtgctcaacctgggcaaattccacagcatcgttcgtctggtggccttttgtccctttgcctcatcccaggttgccttggaaaatgccaacgccgtgtctgaaggggttgttcatgaggacctccgcctgctcttggagacccacctgccgtccaaaaagaagaaagtactcttgggagttggggatcccaagattggtgccgcaatacaggaggagttagggtacaactgccagactggaggagtcatagctgagatcctgcgaggagttcgtctgcacttccacaatctggtgaagggtctgaccgatctgtcagcttgtaaagcacagctggggctgggacacagctattcccgtgccaaagttaagtttaatgtgaaccgggtggacaatatgatcatccagtccattagcctcctggaccagctggataaggacatcaataccttctctatgcgtgtcagggagtggtacgggtatcactttccggagctggtgaagatcatcaacgacaatgccacatactgccgtcttgcccagtttattggaaaccgaagggaactgaatgaggacaagctggagaagctggaggagctgacaatggatggggccaaggctaaggctattctggatgcctcacggtcctccatgggcatggacatatctgccattgacttgataaacatcgagagcttctccagtcgtgtggtgtctttatctgaataccgccagagcctacacacttacctgcgctccaagatgagccaagtagcccccagcctgtcagccctaattggggaagcggtaggtgcacgtctcatcgcacatgctggcagcctcaccaacctggccaagtatccagcatccacagtgcagatccttggggctgaaaaggccctgttcagagccctgaagacaaggggtaacaccccaaaatatggactcattttccactccaccttcattggccgagcagctgccaagaacaaaggccgcatctcccgatacctggcaaacaaatgcagtattgcctcacgaatcgattgcttctctgaggtgcccacgagtgtattcggggagaagcttcgagaacaagttgaagagcgactgtccttctatgagactggagagataccacgaaagaatctggatgtcatgaaggaagcaatggttcaggcagaggaagcggctgctgagattactaggaagctggagaaacaggagaagaaacgcttaaagaaggaaaagaaacggctggctgcacttgccctcgcgtcttcagaaaacagcagtagtactccagaggagtgtgaggaaggagataggtgctgaacttgctcaagagcccagagagctggttgtagctcacacccgttccctgggcatgtgtgttctgtcctcggctgcctcccaggagtcctcaacctggggagatgagtgaaaaacccaaaaagaagaaaaagcaaaagccccaggaggttcctcaggagaatggaatggaagacccatctatctctttctccaaacccaagaaaaagaaatctttttccaaggaggagttgatgagtagcgatcttgaagagaccgctggcagcaccagtattcccaagaggaagaagtctacacccaaggaggaaacagttaatgaccctgaggaggcaggccacagaagtggctccaagaaaaagaggaaattctccaaagaggagccggtcagcagtgggcctgaagaggcggttggcaagagcagctccaagaagaagaaaaagttccataaagcatcccaggaagattagaatgcaaatggacattctctgggaggtggggcataccatagcccaaggtgacatttcccaccctgtgccgtgttccccaataaaaacaaattcacaaga

SEQ ID NO: 311008 - DNA, 2335 bp, Homo sapiens
  misc_feature (6)..(7): n is a, c, g, or t
  misc_feature (23)..(23): n is a, c, g, or t
  misc_feature (32)..(32): n is a, c, g, or t
gtggcnngtcgaggctgggtttnaattcggcngagggtgctgttgcacgtgctgtttgagcacgcggtcggctacgcgctgctggcgctgaaggaagtggaggagatcagtctgctgcagccgcaggtggaggagtccgtgctcaacctgggcaaattccacagcatcgttcgtctggtggccttttgtccctttgcctcatcccaggttgccttggaaaatgccaacgccgtgtctgaagacctgaatgcagttgttcccatggctgggccaggctttgcagtgatgacttgcgaatcaaatctgtcaatcccctgagtgcaatcactgatgtctccatgtctctgagcaatgcctgatggggagggatctaggtatgccatcccagcgtgctcggtgggaccagggtagtcagctgagggatgttagagttgatcgtccttcagcctgttagtgggaactgtgttctttcccctgaggggttgttcatgaggacctccgcctgctcttggagacccacctgccgtccaaaaagaagaaagtactcttgggagttggggatcccaagattggtgccgcaatacaggaggagttagggtacaactgccagactggaggagtcatagctgagatcctgcgaggagttcgtctgcacttccacaatctggtgaagggtctgaccgatctgtcagcttgtaaagcacagctggggctgggacacagctattcccgtgccaaagttaagtttaatgtgaaccgggtggacaatatgatcatccagtccattagcctcctggaccagctggataaggacatcaataccttctctatgcgtgtcagggagtggtacgggtatcactttccggagctggtgaagatcatcaacgacaatgccacatactgccgtcttgcccagtttattggaaaccgaagggaactgaatgaggacaagctggagaagctggaggagctgacaatggatggggccaaggctaaggctattctggatgcctcacggtcctccatgggcatggacatatctgccattgacttgataaacatcgagagcttctccagtcgtgtggtgtctttatctgaataccgccagagcctacacacttacctgcgctccaagatgagccaagtagcccccagcctgtcagccctaattggggaagcggtaggtgcacgtctcatcgcacatgctggcagcctcaccaacctggccaagtatccagcatccacagtgcagatccttggggctgaaaaggccctgttcaggtaccagtgagggcacctgcccacaatcaggtgccacttctggtgcccactgcttgttgggggatcacggtgatggctgaccagggctccctgacctatacaggcctctgctatgggggtgatggccagtcctggtgtctgagtgattcccagggcccagcaaagggaccaagtttccagagccctgaagacaaggggtaacaccccaaaatatggactcattttccactccaccttcattggccgagcagctgccaagaacaaaggccgcatctcccgatacctggcaaacaaatgcagtattgcctcacgaatcgattgcttctctgaggtgcccacgagtgtattcggggagaagcttcgagaacaagttgaagagcgactgtccttctatgagactggagagataccacgaaagaatctggatgtcatgaaggaagcaatggttcaggcagaggaagcggctgctgagattactaggaagctggagaaacaggagaagaaacgcttaaagaaggaaaagaaacggctggctgcacttgccctcgcgtcttcagaaaacagcagtagtactccagaggagtgtgaggagatgagtgaaaaacccaaaaagaagaaaaagcaaaagccccaggaggttcctcaggagaatggaatggaagacccatctatctctttctccaaacccaagaaaaagaaatctttttccaaggaggagttgatgagtagcgatcttgaagagaccgctggcagcaccagtattcccaagaggaagaagtctacacccaaggaggaaacagttaatgaccctgaggaggcaggccacagaagtggctccaagaaaaagaggaaattctccaaagaggagccggtcagcagtgggcctgaagaggcggttggcaagagcagctccaagaagaagaaaaagttccataaagcatcccaggaagattagaatgcaaatggacattctctgggaggtggggcataccatagcccaaggtgacatttcccaccctgtgccgtgttccccaataaaaacaaattcacaaga

SEQ ID NO: 311009 - DNA, 2230 bp, Homo sapiens
  misc_feature (6)..(7): n is a, c, g, or t
  misc_feature (23)..(23): n is a, c, g, or t
  misc_feature (32)..(32): n is a, c, g, or t
gtggcnngtcgaggctgggtttnaattcggcngagggtgctgttgcacgtgctgtttgagcacgcggtcggctacgcgctgctggcgctgaaggaagtggaggagatcagtctgctgcagccgcaggtggaggagtccgtgctcaacctgggcaaattccacagcatcgttcgtctggtggccttttgtccctttgcctcatcccaggttgccttggaaaatgccaacgccgtgtctgaagacctgaatgcagttgttcccatggctgggccaggctttgcagtgatgacttgcgaatcaaatctgtcaatcccctgagtgcaatcactgatgtctccatgtctctgagcaatgcctgatggggagggatctaggggttgttcatgaggacctccgcctgctcttggagacccacctgccgtccaaaaagaagaaagtactcttgggagttggggatcccaagattggtgccgcaatacaggaggagttagggtacaactgccagactggaggagtcatagctgagatcctgcgaggagttcgtctgcacttccacaatctggtgaagggtctgaccgatctgtcagcttgtaaagcacagctggggctgggacacagctattcccgtgccaaagttaagtttaatgtgaaccgggtggacaatatgatcatccagtccattagcctcctggaccagctggataaggacatcaataccttctctatgcgtgtcagggagtggtacgggtatcactttccggagctggtgaagatcatcaacgacaatgccacatactgccgtcttgcccagtttattggaaaccgaagggaactgaatgaggacaagctggagaagctggaggagctgacaatggatggggccaaggctaaggctattctggatgcctcacggtcctccatgggcatggacatatctgccattgacttgataaacatcgagagcttctccagtcgtgtggtgtctttatctgaataccgccagagcctacacacttacctgcgctccaagatgagccaagtagcccccagcctgtcagccctaattggggaagcggtaggtgcacgtctcatcgcacatgctggcagcctcaccaacctggccaagtatccagcatccacagtgcagatccttggggctgaaaaggccctgttcaggtaccagtgagggcacctgcccacaatcaggtgccacttctggtgcccactgcttgttgggggatcacggtgatggctgaccagggctccctgacctatacaggcctctgctatgggggtgatggccagtcctggtgtctgagtgattcccagggcccagcaaagggaccaagtttccagagccctgaagacaaggggtaacaccccaaaatatggactcattttccactccaccttcattggccgagcagctgccaagaacaaaggccgcatctcccgatacctggcaaacaaatgcagtattgcctcacgaatcgattgcttctctgaggtgcccacgagtgtattcggggagaagcttcgagaacaagttgaagagcgactgtccttctatgagactggagagataccacgaaagaatctggatgtcatgaaggaagcaatggttcaggcagaggaagcggctgctgagattactaggaagctggagaaacaggagaagaaacgcttaaagaaggaaaagaaacggctggctgcacttgccctcgcgtcttcagaaaacagcagtagtactccagaggagtgtgaggagatgagtgaaaaacccaaaaagaagaaaaagcaaaagccccaggaggttcctcaggagaatggaatggaagacccatctatctctttctccaaacccaagaaaaagaaatctttttccaaggaggagttgatgagtagcgatcttgaagagaccgctggcagcaccagtattcccaagaggaagaagtctacacccaaggaggaaacagttaatgaccctgaggaggcaggccacagaagtggctccaagaaaaagaggaaattctccaaagaggagccggtcagcagtgggcctgaagaggcggttggcaagagcagctccaagaagaagaaaaagttccataaagcatcccaggaagattagaatgcaaatggacattctctgggaggtggggcataccatagcccaaggtgacatttcccaccctgtgccgtgttccccaataaaaacaaattcacaaga

SEQ ID NO: 311010 - DNA, 2217 bp, Homo sapiens
  misc_feature (1)..(1): n is a, c, g, or t
  misc_feature (8)..(8): n is a, c, g, or t
nggccggngtgaatcggacgaggcgggagctggcgccatggtgctgttgcacgtgctgtttgagcacgcggtcggctacgcgctgctggcgctgaaggaagtggaggagatcagtctgctgcagccgcaggtggaggagtccgtgctcaacctgggcaaattccacagcatcgttcgtctggtggccttttgtccctttgcctcatcccaggttgccttggaaaatgccaacgccgtgtctgaaggggttgttcatgaggacctccgcctgctcttggagacccacctgccgtccaaaaagaagaaagtactcttgggagttggggatcccaagattggtgccgcaatacaggaggagttagggtacaactgccagactggaggagtcatagctgagatcctgcgaggagttcgtctgcacttccacaatctggtgaagggtctgaccgatctgtcagcttgtaaagcacagctggggctgggacacagctattcccgtgccaaagttaagtttaatgtgaaccgggtggacaatatgatcatccagtccattagcctcctggaccagctggataaggacatcaataccttctctatgcgtgtcagggagtggtacgggtatcactttccggagctggtgaagatcatcaacgacaatgccacatactgccgtcttgcccagtttattggaaaccgaagggaactgaatgaggacaagctggagaagctggaggagctgacaatggatggggccaaggctaaggctattctggatgcctcacggtcctccatgggcatggacatatctgccattgacttgataaacatcgagagcttctccagtcgtgtggtgtctttatctgaataccgccagagcctacacacttacctgcgctccaagatgagccaagtagcccccagcctgtcagccctaattggggaagcggtaggtgcacgtctcatcgcacatgctggcagcctcaccaacctggccaagtatccagcatccacagtgcagatccttggggctgaaaaggccctgttcaggtaccagtgagggcacctgcccacaatcaggtgccacttctggtgcccactgcttgttgggggatcacggtgatggctgaccagggctccctgacctatacaggcctctgctatgggggtgatggccagtcctggtgtctgagtgattcccagggcccagcaaagggaccaagtttccagagccctgaagacaaggggtaacaccccaaaatatggactcattttccactccaccttcattggccgagcagctgccaagaacaaaggccgcatctcccgatacctggcaaacaaatgcagtattgcctcacgaatcgattgcttctctgaggtgcccacgagtgtattcggggagaagcttcgagaacaagttgaagagcgactgtccttctatgagactggagagataccacgaaagaatctggatgtcatgaaggaagcaatggttcaggcagaggaagcggctgctgagattactaggaagctggagaaacaggagaagaaacgcttaaagaaggaaaagaaacggctggctgcacttgccctcgcgtcttcagaaaacagcagtagtactccagaggagtgtgaggaaggagataggtgctgaacttgctcaagagcccagagagctggttgtagctcacacccgttccctgggcatgtgtgttctgtcctcggctgcctcccaggagtcctcaacctggggagatgagtgaaaaacccaaaaagaagaaaaagcaaaagccccaggaggttcctcaggagaatggaatggaagacccatctatctctttctccaaacccaagaaaaagaaatctttttccaaggaggagttgatgagtagcgatcttgaagagaccgctggcagcaccagtattcccaagaggaagaagtctacacccaaggaggaaacagttaatgaccctgaggaggcaggccacagaagtggctccaagaaaaagaggaaattctccaaagaggagccggtcagcagtgggcctgaagaggcggttggcaagagcagctccaagaagaagaaaaagttccataaagcatcccaggaagattagaatgcaaatggacattctctgggaggtggggcataccatagcccaaggtgacatttcccaccctgtgccgtgttccccaataaaaacaaattcacaaga

SEQ ID NO: 311011 - DNA, 1959 bp, Homo sapiens
  misc_feature (6)..(7): n is a, c, g, or t
  misc_feature (23)..(23): n is a, c, g, or t
  misc_feature (32)..(32): n is a, c, g, or t
gtggcnngtcgaggctgggtttnaattcggcngagggtgctgttgcacgtgctgtttgagcacgcggtcggctacgcgctgctggcgctgaaggaagtggaggagatcagtctgctgcagccgcagctgctcttggagacccacctgccgtccaaaaagaagaaagtactcttgggagttggggatcccaagattggtgccgcaatacaggaggagttagggtacaactgccagactggaggagtcatagctgagatcctgcgaggagttcgtctgcacttccacaatctggtgaagggtctgaccgatctgtcagcttgtaaagcacagctggggctgggacacagctattcccgtgccaaagttaagtttaatgtgaaccgggtggacaatatgatcatccagtccattagcctcctggaccagctggataaggacatcaataccttctctatgcgtgtcagggagtggtacgggtatcactttccggagctggtgaagatcatcaacgacaatgccacatactgccgtcttgcccagtttattggaaaccgaagggaactgaatgaggacaagctggagaagctggaggagctgacaatggatggggccaaggctaaggctattctggatgcctcacggtcctccatgggcatggacatatctgccattgacttgataaacatcgagagcttctccagtcgtgtggtgtctttatctgaataccgccagagcctacacacttacctgcgctccaagatgagccaagtagcccccagcctgtcagccctaattggggaagcggtaggtgcacgtctcatcgcacatgctggcagcctcaccaacctggccaagtatccagcatccacagtgcagatccttggggctgaaaaggccctgttcaggtaccagtgagggcacctgcccacaatcaggtgccacttctggtgcccactgcttgttgggggatcacggtgatggctgaccagggctccctgacctatacaggcctctgctatgggggtgatggccagtcctggtgtctgagtgattcccagggcccagcaaagggaccaagtttccagagccctgaagacaaggggtaacaccccaaaatatggactcattttccactccaccttcattggccgagcagctgccaagaacaaaggccgcatctcccgatacctggcaaacaaatgcagtattgcctcacgaatcgattgcttctctgaggtgcccacgagtgtattcggggagaagcttcgagaacaagttgaagagcgactgtccttctatgagactggagagataccacgaaagaatctggatgtcatgaaggaagcaatggttcaggcagaggaagcggctgctgagattactaggaagctggagaaacaggagaagaaacgcttaaagaaggaaaagaaacggctggctgcacttgccctcgcgtcttcagaaaacagcagtagtactccagaggagtgtgaggagatgagtgaaaaacccaaaaagaagaaaaagcaaaagccccaggaggttcctcaggagaatggaatggaagacccatctatctctttctccaaacccaagaaaaagaaatctttttccaaggaggagttgatgagtagcgatcttgaagagaccgctggcagcaccagtattcccaagaggaagaagtctacacccaaggaggaaacagttaatgaccctgaggaggcaggccacagaagtggctccaagaaaaagaggaaattctccaaagaggagccggtcagcagtgggcctgaagaggcggttggcaagagcagctccaagaagaagaaaaagttccataaagcatcccaggaagattagaatgcaaatggacattctctgggaggtggggcataccatagcccaaggtgacatttcccaccctgtgccgtgttccccaataaaaacaaattcacaaga

SEQ ID NO: 311012 - DNA, 2033 bp, Homo sapiens
  misc_feature (1)..(1): n is a, c, g, or t
  misc_feature (8)..(8): n is a, c, g, or t
nggccggngtgaatcggacgaggcgggagctggcgccatggtgctgttgcacgtgctgtttgagcacgcggtcggctacgcgctgctggcgctgaaggaagtggaggagatcagtctgctgcagccgcaggtggaggagtccgtgctcaacctgggcaaattccacagcatcgttcgtctggtggccttttgtccctttgcctcatcccaggttgccttggaaaatgccaacgccgtgtctgaaggggttgttcatgaggacctccgcctgctcttggagacccacctgccgtccaaaaagaagaaagtactcttgggagttggggatcccaagattggtgccgcaatacaggaggagttagggtacaactgccagactggaggagtcatagctgagatcctgcgaggagttcgtctgcacttccacaatctggtgaagggtctgaccgatctgtcagcttgtaaagcacagctggggctgggacacagctattcccgtgccaaagttaagtttaatgtgaaccgggtggacaatatgatcatccagtccattagcctcctggaccagctggataaggacatcaataccttctctatgcgtgtcagggagtggtacgggtatcactttccggagctggtgaagatcatcaacgacaatgccacatactgccgtcttgcccagtttattggaaaccgaagggaactgaatgaggacaagctggagaagctggaggagctgacaatggatggggccaaggctaaggctattctggatgcctcacggtcctccatgggcatggacatatctgccattgacttgataaacatcgagagcttctccagtcgtgtggtgtctttatctgaataccgccagagcctacacacttacctgcgctccaagatgagccaagtagcccccagcctgtcagccctaattggggaagcggtaggtgcacgtctcatcgcacatgctggcagcctcaccaacctggccaagtatccagcatccacagtgcagatccttggggctgaaaaggccctgttcaggtaccagtgagggcacctgcccacaatcaggtgccacttctggtgcccactgcttgttgggggatcacggtgatggctgaccagggctccctgacctatacaggcctctgctatgggggtgatggccagtcctggtgtctgagtgattcccagggcccagcaaagggaccaagtttccagagccctgaagacaaggggtaacaccccaaaatatggactcattttccactccaccttcattggccgagcagctgccaagaacaaaggccgcatctcccgatacctggcaaacaaatgcagtattgcctcacgaatcgattgcttctctgaggtgcccacgagtgtattcggggagaagcttcgagaacaagttgaagagcgactgtccttctatgagactggagagataccacgaaagaatctggatgtcatgaaggaagcaatggttcaggcagaggaagcggctgctgagattactaggaagctggagaaacagcagtagtactccagaggagtgtgaggagatgagtgaaaaacccaaaaagaagaaaaagcaaaagccccaggaggttcctcaggagaatggaatggaagacccatctatctctttctccaaacccaagaaaaagaaatctttttccaaggaggagttgatgagtagcgatcttgaagagaccgctggcagcaccagtattcccaagaggaagaagtctacacccaaggaggaaacagttaatgaccctgaggaggcaggccacagaagtggctccaagaaaaagaggaaattctccaaagaggagccggtcagcagtgggcctgaagaggcggttggcaagagcagctccaagaagaagaaaaagttccataaagcatcccaggaagattagaatgcaaatggacattctctgggaggtggggcataccatagcccaaggtgacatttcccaccctgtgccgtgttccccaataaaaacaaattcacaaga

SEQ ID NO: 311013 - DNA, 2381 bp, Homo sapiens
  misc_feature (1)..(1): n is a, c, g, or t
  misc_feature (8)..(8): n is a, c, g, or t
nggccggngtgaatcggacgaggcgggagctggcgccatggtgctgttgcacgtgctgtttgagcacgcggtcggctacgcgctgctggcgctgaaggaagtggaggagatcagtctgctgcagccgcaggtggaggagtccgtgctcaacctgggcaaattccacagcatcgttcgtctggtggccttttgtccctttgcctcatcccaggttgccttggaaaatgccaacgccgtgtctgaaggggttgttcatgaggacctccgcctgctcttggagacccacctgccgtccaaaaagaagaaagtactcttgggagttggggatcccaagattggtgccgcaatacaggaggagttagggtacaactgccagactggaggagtcatagctgagatcctgcgaggagttcgtctgcacttccacaatctggtgaagggtctgaccgatctgtcagcttgtaaagcacagctggggctgggacacagctattcccgtgccaaagttaagtttaatgtgaaccgggtggacaatatgatcatccagtccattagcctcctggaccagctggataaggacatcaataccttctctatgcgtgtcagggagtggtacgggtatcactttccggagctggtgaagatcatcaacgacaatgccacatactgccgtcttgcccagtttattggaaaccgaagggaactgaatgaggacaagctggagaagctggaggagctgacaatggatggggccaaggctaaggctattctggatgcctcacggtcctccatgggcatggacatatctgccattgacttgataaacatcgagagcttctccagtcgtgtggtgtctttatctgaataccgccagagcctacacacttacctgcgctccaagatgagccaagtagcccccagcctgtcagccctaattggggaagcggtaggtgcacgtctcatcgcacatgctggcagcctcaccaacctggccaagtatccagcatccacagtgcagatccttggggctgaaaaggccctgttcagagccctgaagacaaggggtaacaccccaaaatatggactcattttccactccaccttcattggccgagcagctgccaagaacaaaggccgcatctcccgatacctggcaaacaaatgcagtattgcctcacgaatcgattgcttctctgaggtgcccacgagtgtattcggggagaagcttcgagaacaagttgaagagcgactgtccttctatgagactggagagataccacgaaagaatctggatgtcatgaaggaagcaatggttcaggcagaggaagcggctgctgagattactaggaagctggagaaacaggagaagaaacgcttaaagaaggaaaagaaacggctggctgcacttgccctcgcgtcttcagaaaacagcagtagtactccagaggagtgtgaggtcagtaggcagcacggccctggcagagatcctaggttgtaggattttcaacagcagaacaaaggatatgctgcatcaagctgtggtcttgagtccaggcttttggactgaaacaaggacctgaaacatctaaaactacctcttgattctataggaaggagataggtgctgaacttgctcaagagcccagagagctggttgtagctcacacccgttccctgggcatgtgtgttctgtcctcggctgcctcccaggagtcctcaacctggggtagtgtaaattcctgctctgcttattatcagacgtgtgtccggaggtggtcgtgtttcacagtggggatgggggcagggaggtccccaatgtgctaagctacaatcattctccctgagattttcatttagcacccagtttcttaaacagtgtttcagggccctgtctggaacttggcatgatggttctgttgcgaccagcatggtgggtgttttttaggtttttttttttaatgggctgaggtaatttctcatgacatgttttccttctaatttgggacagcctttggggtggatttctaaagttatacccacacaattaaactatcccagaaacactgggcaatgttaacgacacgcgttcccctgccttggctacttaattgctgaagatgtaatgagcactgttctcacagcctgttcccctgtccttccctttaggaaaaaagaggaaattctccaaagaggagccggtcagcagtgggcctgaagaggcggttggcaagagcagctccaagaagaagaaaaagttccataaagcatcccaggaagattagaatgcaaatggacattctctgggaggtggggcataccatagcccaaggtgacatttcccaccctgtgccgtgttccccaataaaaacaaattcacaaga

SEQ ID NO: 311014 - DNA, 2312 bp, Homo sapiens
  misc_feature (1)..(1): n is a, c, g, or t
  misc_feature (8)..(8): n is a, c, g, or t
nggccggngtgaatcggacgaggcgggagctggcgccatggtgctgttgcacgtgctgtttgagcacgcggtcggctacgcgctgctggcgctgaaggaagtggaggagatcagtctgctgcagccgcaggtggaggagtccgtgctcaacctgggcaaattccacagcatcgttcgtctggtggccttttgtccctttgcctcatcccaggttgccttggaaaatgccaacgccgtgtctgaaggggttgttcatgaggacctccgcctgctcttggagacccacctgccgtccaaaaagaagaaagtactcttgggagttggggatcccaagattggtgccgcaatacaggaggagttagggtacaactgccagactggaggagtcatagctgagatcctgcgaggagttcgtctgcacttccacaatctggtgaagggtctgaccgatctgtcagcttgtaaagcacagctggggctgggacacagctattcccgtgccaaagttaagtttaatgtgaaccgggtggacaatatgatcatccagtccattagcctcctggaccagctggataaggacatcaataccttctctatgcgtgtcagggagtggtacgggtatcactttccggagctggtgaagatcatcaacgacaatgccacatactgccgtcttgcccagtttattggaaaccgaagggaactgaatgaggacaagctggagaagctggaggagctgacaatggatggggccaaggctaaggctattctggatgcctcacggtcctccatgggcatggacatatctgccattgacttgataaacatcgagagcttctccagtcgtgtggtgtctttatctgaataccgccagagcctacacacttacctgcgctccaagatgagccaagtagcccccagcctgtcagccctaattggggaagcggtaggtgcacgtctcatcgcacatgctggcagcctcaccaacctggccaagtatccagcatccacagtgcagatccttggggctgaaaaggccctgttcagagccctgaagacaaggggtaacaccccaaaatatggactcattttccactccaccttcattggccgagcagctgccaagaacaaaggccgcatctcccgatacctggcaaacaaatgcagtattgcctcacgaatcgattgcttctctgaggtgcccacgagtgtattcggggagaagcttcgagaacaagttgaagagcgactgtccttctatgagactggagagataccacgaaagaatctggatgtcatgaaggaagcaatggttcaggcagaggaagcggctgctgagattactaggaagctggagaaacaggagaagaaacgcttaaagaaggaaaagaaacggctggctgcacttgccctcgcgtcttcagaaaacagcagtagtactccagaggagtgtgaggtcagtaggcagcacggccctggcagagatcctaggttgtaggattttcaacagcagaacaaaggatatgctgcatcaagctgtggtcttgagtccaggcttttggactgaaacaaggacctgaaacatctaaaactacctcttgattctataggaaggagataggtgctgaacttgctcaagagcccagagagctggttgtagctcacacccgttccctgggcatgtgtgttctgtcctcggctgcctcccaggagtcctcaacctggggtagtgtaaattcctgctctgcttattatcagacgtgtgtccggaggtggtcgtgtttcacagtggggatgggggcagggaggtccccaatgtgctaagctacaatcattctccctgagattttcatttagcacccagtttcttaaacagtgtttcagggccctgtctggaacttggcatgatggttctgttgcgaccagcatggtgggtgttttttaggtttttttttttaatgggctgaggtaatttctcatgacatgttttccttctaatttgggacagcctttggggtggatttctaaagttatacccacacaattaaactatcccagaaacactgggcaatgttaacgacacgcgttcccctgccttggctacttaattgctgaagatgtaatgagcactgttctcacagcctgttcccctgtccttccctttaggatgaaagcctgcaagtagactatacagaagcctcaggaggtgacgcagtgatgcatggtacgatgacgccatgctatgtaggattttctgagaccaaagaaagaggaatggtgtagggtcgagtagaaggtcatgatttgctctc

SEQ ID NO: 311015 - DNA, 1796 bp, Homo sapiens
  misc_feature (6)..(7): n is a, c, g, or t
  misc_feature (23)..(23): n is a, c, g, or t
  misc_feature (32)..(32): n is a, c, g, or t
gtggcnngtcgaggctgggtttnaattcggcngagtgggaactgtgttctttcccctgaggggttgttcatgaggacctccgcctgctcttggagacccacctgccgtccaaaaagaagaaagtactcttgggagttggggatcccaagattggtgccgcaatacaggaggagttagggtacaactgccagactggaggagtcatagctgagatcctgcgaggagttcgtctgcacttccacaatctggtgaagggtctgaccgatctgtcagcttgtaaagcacagctggggctgggacacagctattcccgtgccaaagttaagtttaatgtgaaccgggtggacaatatgatcatccagtccattagcctcctggaccagctggataaggacatcaataccttctctatgcgtgtcagggagtggtacgggtatcactttccggagctggtgaagatcatcaacgacaatgccacatactgccgtcttgcccagtttattggaaaccgaagggaactgaatgaggacaagctggagaagctggaggagctgacaatggatggggccaaggctaaggctattctggatgcctcacggtcctccatgggggtcagtgcagagcctggcaacctgcataaggtaggtgcacgtctcatcgcacatgctggcagcctcaccaacctggccaagtatccagcatccacagtgcagatccttggggctgaaaaggccctgttcaggtaccagtgagggcacctgcccacaatcaggtgccacttctggtgcccactgcttgttgggggatcacggtgatggctgaccagggctccctgacctatacaggcctctgctatgggggtgatggccagtcctggtgtctgagtgattcccagggcccagcaaagggaccaagtttccagagccctgaagacaaggggtaacaccccaaaatatggactcattttccactccaccttcattggccgagcagctgccaagaacaaaggccgcatctcccgatacctggcaaacaaatgcagtattgcctcacgaatcgattgcttctctgaggtgcccacgagtgtattcggggagaagcttcgagaacaagttgaagagcgactgtccttctatgagactggagagataccacgaaagaatctggatgtcatgaaggaagcaatggttcaggcagaggaagcggctgctgagattactaggaagctggagaaacaggagaagaaacgcttaaagaaggaaaagaaacggctggctgcacttgccctcgcgtcttcagaaaacagcagtagtactccagaggagtgtgaggagatgagtgaaaaacccaaaaagaagaaaaagcaaaagccccaggaggttcctcaggagaatggaatggaagacccatctatctctttctccaaacccaagaaaaagaaatctttttccaaggaggagttgatgagtagcgatcttgaagagaccgctggcagcaccagtattcccaagaggaagaagtctacacccaaggaggaaacagttaatgaccctgaggaggcaggccacagaagtggctccaagaaaaagaggaaattctccaaagaggagccggtcagcagtgggcctgaagaggcggttggcaagagcagctccaagaagaagaaaaagttccataaagcatcccaggaagattagaatgcaaatggacattctctgggaggtggggcataccatagcccaaggtgacatttcccaccctgtgccgtgttccccaataaaaacaaattcacaaga

SEQ ID NO: 311016 - DNA, 1741 bp, Homo sapiens
  misc_feature (1)..(1): n is a, c, g, or t
  misc_feature (8)..(8): n is a, c, g, or t
  misc_feature (1640)..(1640): n is a, c, g, or t
nggccggngtgaatcggacgaggcgggagctggcgccatggtgctgttgcacgtgctgtttgagcacgcggtcggctacgcgctgctggcgctgaaggaagtggaggagatcagtctgctgcagccgcaggtggaggagtccgtgctcaacctgggcaaattccacagcatcgttcgtctggtggccttttgtccctttgcctcatcccaggttgccttggaaaatgccaacgccgtgtctgaaggggttgttcatgaggacctccgcctgctcttggagacccacctgccgtccaaaaagaagaaagtactcttgggagttggggatcccaagattggtgccgcaatacaggaggagttagggtacaactgccagactggaggagtcatagctgagatcctgcgaggagttcgtctgcacttccacaatctggtgaagggtctgaccgatctgtcagcttgtaaagcacagctggggctgggacacagctattcccgtgccaaagttaagtttaatgtgaaccgggtggacaatatgatcatccagtccattagcctcctggaccagctggataaggacatcaataccttctctatgcgtgtcagggagtggtacgggtatcactttccggagctggtgaagatcatcaacgacaatgccacatactgccgtcttgcccagtttattggaaaccgaagggaactgaatgaggacaagctggagaagctggaggagctgacaatggatggggccaaggctaaggctattctggatgcctcacggtcctccatgggcatggacatatctgccattgacttgataaacatcgagagcttctccagtcgtgtggtgtctttatctgaataccgccagagcctacacacttacctgcgctccaagatgagccaagtagcccccagcctgtcagccctaattggggaagcggtaggtgcacgtctcatcgcacatgctggcagcctcaccaacctggccaagtatccagcatccacagtgcagatccttggggctgaaaaggccctgttcaggtaccagtgagggcacctgcccacaatcaggtgccacttctggtgcccactgcttgttgggggatcacggtgatggctgaccagggctccctgacctatacaggcctctgctatgggggtgatggccagtcctggtgtctgagtgattcccagggcccagcaaagggaccaagtttccagagccctgaagacaaggggtaacaccccaaaatatggactcattttccactccaccttcattggccgagcagctgccaagaacaaaggccgcatctcccgatacctggcaaacaaatgcagtattgcctcacgaatcgattgcttctctgaggtgcccacgagtgtattcggggagaagcttcgagaacaagttgaagagcgactgtccttctatgagactggagagataccacgaaagaatctggatgtcatgaaggaagcaatggttcaggcagaggaagcggctgctgagattactaggaagctggagaaacaggagaagaaacgcttaaagaaggaaaagaaacggctggctgcacttgccctcgcgtcttcagaaaacagcagtagtactccagaggagtgtgagagangagtgaaaaacccaaaaaaacacccaccccacaccccaccacacacacaacccacacacaaaccaccccaccacccccccaccccaccacccccccccacc

SEQ ID NO: 311017 - DNA, 1142 bp, Homo sapiens
  misc_feature (1)..(1): n is a, c, g, or t
  misc_feature (8)..(8): n is a, c, g, or t
nggccggngtgaatcggacgaggcgggagctggcgccatggtgctgttgcacgtgctgtttgagcacgcggtcggctacgcgctgctggcgctgaaggaagtggaggagatcagtctgctgcagccgcaggtggaggagtccgtgctcaacctgggcaaattccacagcatcgttcgtctggtggccttttgtccctttgcctcatcccaggttgccttggaaaatgccaacgccgtgtctgaaggggttgttcatgaggacctccgcctgctcttggagacccacctgccgtccaaaaagaagaaagtactcttgggagttggggatcccaagattggtgccgcaatacaggaggagttagggtacaactgccagactggaggagtcatagctgagatcctgcgaggagttcgtctgcacttccacaatctggtgaagggtctgaccgatctgtcagcttgtaaagcacagctggggctgggacacagctattcccgtgccaaagttaagtttaatgtgaaccgggtggacaatatgatcatccagtccattagcctcctggaccagctggataaggacatcaataccttctctatgcgtgtcagggagtggtacgggtatcactttccggagctggtgaagatcatcaacgacaatgccacatactgccgtcttgcccagtttattggaaaccgaagggaactgaatgaggacaagctggagaagctggaggagctgacaatggatggggccaaggctaaggctattctggatgcctcacggtcctccatgggcatggacatatctgccattgacttgataaacatcgagagcttctccagtcgtgtggtgtctttatctgaataccgccagagcctacacacttacctgcgctccaagatgagccaagtagcccccagcctgtcagccctaattggggaagcggtaggtgcacgtctcatcgcacatgctggcagcctcaccaacctggccaagtatccagcatccacagtgcagatccttggggctgaaaaggccctgttcagagcctgaagacagggtacactccaaaattgggctccttttcatccacttcatggcgagcgtgcccaaacaaggcgttccgatccgggaaagcggt

SEQ ID NO: 311018 - DNA, 1014 bp, Homo sapiens
  misc_feature (1)..(1): n is a, c, g, or t
  misc_feature (8)..(8): n is a, c, g, or t
  misc_feature (799)..(799): n is a, c, g, or t
nggccggngtgaatcggacgaggcgggagctggcgccatggtgctgttgcacgtgctgtttgagcacgcggtcggctacgcgctgctggcgctgaaggaagtggaggagatcagtctgctgcagccgcaggtggaggagtccgtgctcaacctgggcaaattccacagcatcgttcgtctggtggccttttgtccctttgcctcatcccaggttgccttggaaaatgccaacgccgtgtctgaaggggttgttcatgaggacctccgcctgctcttggagacccacctgccgtccaaaaagaagaaagtactcttgggagttggggatcccaagattggtgccgcaatacaggaggagttagggtacaactgccagactggaggagtcatagctgagatcctgcgaggagttcgtctgcacttccacaatctggtgaagggtctgaccgatctgtcagcttgtaaagcacagctggggctgggacacagctattcccgtgccaaagttaagtttaatgtgaaccgggtggacaatatgatcatccagtccattagcctcctggaccagctggataaggacatcaataccttctctatgcgtgtcagggagtggtacgggtatcactttccggagctggtgaagatcatcaacgacaatgccacatactgccgtcttgcccagtttattggaaaccgaagggaactgaatgaggacaagctggagaagctggaggagctgacaatggatggggccaaggctaaggctattctggatgcctcacggtcctccatggtgganttttgcctggttgtaactcggagctctccgcggggggctatcgaaaccgcaactagactacgcgcccgagaggcaagagccaactcgccacggggagggagcggtcatcgatggacgcacacgccagtacacccaagtgggcgagcgcgcaaagagcacatgaccccggcgagagacacgagcatgcgccggcactactagaaccacccgggcgg

SEQ ID NO: 311019 - DNA, 934 bp, Homo sapiens
  misc_feature (1)..(1): n is a, c, g, or t
  misc_feature (8)..(8): n is a, c, g, or t
  misc_feature (796)..(796): n is a, c, g, or t
  misc_feature (798)..(798): n is a, c, g, or t
  misc_feature (855)..(855): n is a, c, g, or t
nggccggngtgaatcggacgaggcgggagctggcgccatggtgctgttgcacgtgctgtttgagcacgcggtcggctacgcgctgctggcgctgaaggaagtggaggagatcagtctgctgcagccgcaggtggaggagtccgtgctcaacctgggcaaattccacagcatcgttcgtctggtggccttttgtccctttgcctcatcccaggttgccttggaaaatgccaacgccgtgtctgaaggggttgttcatgaggacctccgcctgctcttggagacccacctgccgtccaaaaagaagaaagtactcttgggagttggggatcccaagattggtgccgcaatacaggaggagttagggtacaactgccagactggaggagtcatagctgagatcctgcgaggagttcgtctgcacttccacaatctggtgaagggtctgaccgatctgtcagcttgtaaagcacagctggggctgggacacagctattcccgtgccaaagttaagtttaatgtgaaccgggtggacaatatgatcatccagtccattagcctcctggaccagctggataaggacatcaataccttctctatgcgtgtcagggagtggtacgggtatcactttccggagctggtgaagatcatcaacgacaatgccacatactgccgtcttgcccagtttattggaaaccgaagggaactgaatgaggacaagctggagaagctggaggagctgacaatggatggggccaaggctaaggctattctggatgcctcacggtcctccatggcntngacttatctggcattgactggttaacatcgagagcttcccgacggtggggcctaatngaacgccgactagcactactggcgccagataaccattgccgacgtactatgggaacgccgcgatcaaactcgggcacaa

SEQ ID NO: 311020 - DNA, 1008 bp, Homo sapiens
  misc_feature (1)..(1): n is a, c, g, or t
  misc_feature (8)..(8): n is a, c, g, or t
nggccggngtgaatcggacgaggcgggagctggcgccatggtgctgttgcacgtgctgtttgagcacgcggtcggctacgcgctgctggcgctgaaggaagtggaggagatcagtctgctgcagccgcaggtggaggagtccgtgctcaacctgggcaaattccacagcatcgttcgtctggtggccttttgtccctttgcctcatcccaggttgccttggaaaatgccaacgccgtgtctgaaggggttgttcatgaggacctccgcctgctcttggagacccacctgccgtccaaaaagaagaaagtactcttgggagttggggatcccaagattggtgccgcaatacaggaggagttagggtacaactgccagactggaggagtcatagctgagatcctgcgaggagttcgtctgcacttccacaatctggtgaagggtctgaccgatctgtcagcttgtaaagcacagctggggctgggacacagctattcccgtgccaaagttaagtttaatgtgaaccgggtggacaatatgatcatccagtccattagcctcctggaccagctggataaggacatcaataccttctctatgcgtgtcagggagtggtacgggtatcactttccggagctggtgaagatcatcaacgacaatgccacatactgccgtcttgcccagtttattggaaaccgaagggaactgaatgaggacaagctggagaagctggaggagctgacaatggatggggccaaggctaaggctattctggatgcctcacggtcctccatggtcccgtctccctgggctggctttctgcctgctgtacatcggagcttcccgcggtggggttatttgatacgccgagctcacccttcgggcccattgtactgcccccttgccattggggggggggctctcccgtgcgccccccggtttcccggctctttggccgcccaggggcagttttccctctggaggactccagcattctcgttcgctacgct

SEQ ID NO: 311021 - DNA, 557 bp, Homo sapiens
ccaaaatatggactcattttccactccaccttcattggccgagcagctgccaagaacaaaggccgcatctcccgatacctggcaaacaaatgcagtattgcctcacgaatcgattgcttctctggtatgggtgggggggcgttggcaggtgtgagaaggggctgggtggctgggtggggaggcttgcaaccatagcttccacaatgatggcaatatttttcgtcaacagcagttcacctagtgagtgttgagactctgggtctgagtgaagctgagggtagagggaacacagggttggggtagtttctctctttgggctgacaggctttgtcacccacacacatccagaggtgcccacgagtgtattcggggagaagcttcgagaacaagttgaagagcgactgtccttctatgagactggagagataccacgaaagaatctggatgtcatgaaggaagcaatggttcaggtcagttgggctttgctgggtgtggagtggcatagctagctgttggaggtgatgaactgtctgagcctgaccttgtagaatggaggc

SEQ ID NO: 311022 - DNA, 485 bp, Homo sapiens
acgggtatcactttccggagctggtgaagatcatcaacgacaatgccacatactgccgtcttgcccagtttattggaaaccgaagggaactgaatgaggacaagctggagaagctggaggagctgacaatggatggggccaaggctaaggctattctggatgcctcacggtcctccatgggggtcagtgcagagcctggcaacctgcataaggtatggggctctaaatagctggcctcttgcattcacacttggtttttcctaggcatggacatatctgccattgacttgataaacatcgagagcttctccagtcgtgtggtgtctttatctgaataccgccagagcctacacacttacctgcgctccaagatgagccaagtagcccccagcctgtcagccctaattggggaagcgcggtgcgtcacaggggactcaaaaatgggagaataaggactgttgccatgtgcacctgcactgctgtat

SEQ ID NO: 311023 - DNA, 309 bp, Homo sapiens
cccaaaaagaagaaaaagcaaaagccccaggaggttcctcaggagaatggaatggaagacccatctatctctttctccaaacccaagaaaaagaaatctttttccaaggaggagttgatgagtagcgatcttgaagagaccgctggcagcaccagtattcccaagaggaagaagtctacacccaaggaggaaacagttaatgaccctgaggaggcaggccacagaagtggctccaagaaaaagaggaaattctccaaagaggagccggtcagcagtgggcctgaagaggcggttggcaagagcagctcc

SEQ ID NO: 311024 - DNA, 3136 bp, Homo sapiens
gaagagggcgcgagggtagcagccagagggagccgccagccctgcctgcggatccccgccgggcgcatggggcgcttcgagccgggactgcgtgcgggccccgaggccagtttcctgctgtcgtaagaagccgcgccaggacgcccgccggaccccgagctgctgggaggatgaccatggctgggggcaggaggggactagtggcccctcaaaacacgtttctggagaatattgttcggcggtccaatgatactaattttgtgttggggaatgctcagatagtggactggcctattgtgtacagcaatgatggattttgcaagctgtctggctatcacagggcagaagtgatgcaaaaaagcagcacctgcagttttatgtatggggagctgactgataaagacacgattgaaaaagtgcggcaaacatttgagaactatgagatgaattcctttgaaattctgatgtacaagaagaacaggacacctgtgtggttctttgtgaaaattgctccaattcgaaacgaacaggataaagtggttttatttctttgcactttcagtgacataacagctttcaaacagccaattgaggatgattcatgtaaaggctgggggaagtttgctcggctgacaagagcactgacaagcagcaggggtgtcctgcagcagctggctccaagcgtgcaaaaaggcgagaatgtccacaagcactcccgcctggcagaggtcctacagctgggctcagacatccttccccagtacaagcaagaggcaccaaagactccccctcacatcatcttacattattgtgtttttaagaccacgtgggattggatcatcttgatcttgaccttctatacagccatcttggtcccttataatgtctccttcaaaaccaggcagaataatgtggcctggctggttgttgatagcatcgtggatgttatctttttggtggacattgtgctcaattttcataccacctttgttggaccagcaggggaggtgatttctgaccccaaacttatccgcatgaactacctgaagacgtggtttgtgattgaccttctgtcctgtttgccatatgatgtcatcaacgcttttgagaacgtggatgagggcatcagcagcctgttcagctctctaaaagttgtccggctgctccgtcttgggcgagtggcccgtaagctggaccactacattgaatatggagctgctgtgctggtcctgctggtgtgtgtgtttgggctggctgcacactggatggcctgcatctggtacagcattggggactatgagatctttgacgaggacaccaagacaatccgcaacaacagctggctgtaccaactagcgatggacattggcaccccttaccagtttaatgggtctggctcagggaagtgggaaggtggtcccagcaagaattctgtctacatctcctcgttgtatttcacaatgaccagcctcaccagtgtgggctttgggaacatcgccccatccacagacattgagaagatctttgcagtggccatcatgatgattggctcacttctctatgccaccatcttcgggaatgtgacgactattttccaacagatgtatgccaacaccaacagataccatgagatgctcaacagtgttcgggacttcctgaagctctaccaggtgccaaaaggattgagtgagcgagtaatggattatattgtgtccacttggtccatgtccagaggcattgacacagagaaggtcctgcagatctgccccaaggacatgagagccgacatctgcgtgcacctgaaccgcaaggtgttcaaggagcacccggccttccggctggccagtgatggctgcctccgggcactggccatggagttccagacggtgcactgtgccccaggggacctcatctaccatgcaggagagagcgttgacagcctctgctttgtggtttctggctccctggaggtgatccaagatgatgaggtggtggccattctaggaaaaggagacgtgtttggagatgtgttctggaaggaagccacccttgcccagtcctgtgccaatgttagggccttgacctactgtgatctgcatgtgatcaagcgggatgccctgcagaaagtgctggaattctacacggccttctcccattccttctcccggaacctgattctgacgtacaacttgaggaagaggattgtgttccggaagatcagcgatgtgaaacgtgaagaggaagaacgcatgaaacgaaagaatgaggcccccctgatcttgcccccggaccaccctgtccggcgcctcttccagagattccgacagcagaaagaggccaggctggcagctgagagagggggccgggacctggatgacctagatgtggagaagggcaatgtccttacagagcatgcctccgccaaccacagcctcgtgaaggccagcgtggtcaccgtgcgtgagagtcctgccacgcccgtatccttccaggcagcctccacctccggggtgccagaccacgcaaagctacaggcgccagggtccgagtgcctgggccccaaggggggcgggggcgattgtgccaagcgcaaaagctgggcccgcttcaaagatgcttgcgggaagagtgaggactggaacaaggtgtccaaggctgagtcgatggagacacttcccgagaggacaaaagcgtcaggcgaggccacactgaagaagacagactcgtgtgacagtggcatcaccaagagcgacttgcgcctggacaacgtgggtgaggccaggagtccccaggatcggagtcccatcctggcagaggtcaagcattcgttctaccccatccctgagcagacgctgcaggccacagtcctggaggtgaggcacgagctgaaggaggacatcaaggccttaaacgccaaaatgaccaatattgagaaacagctctctgagatactcaggatattaacttccagaagatcctctcagtctcctcaggagttgtttgaaatatcgaggccacagtccccagaatcagagagagacatttttggagccagctgagaggtctatttaaaaaaaaagtcagagacagatacctccaaccctgccgtcaccaccacccctaccacccggaattc

SEQ ID NO: 311025 - DNA, 3217 bp, Homo sapiens
gaagagggcgcgagggtagcagccagagggagccgccagccctgcctgcggatccccgccgggcgcatggggcgcttcgagccgggactgcgtgcgggccccgaggccagtttcctgctgtcgtaagaagccgcgccaggacgcccgccggaccccgagctgctgggaggatgaccatggctgggggcaggaggggactagtggcccctcaaaacacgtttctggagaatattgttcggcggtccaatgatactaattttgtgttggggaatgctcagatagtggactggcctattgtgtacagcaatgatggattttgcaagctgtctggctatcacagggcagaagtgatgcaaaaaagcagcacctgcagttttatgtatggggagctgactgataaagacacgattgaaaaagtgcggcaaacatttgagaactatgagatgaattcctttgaaattctgatgtacaagaagaacaggacacctgtgtggttctttgtgaaaattgctccaattcgaaacgaacaggataaagtggttttatttctttgcactttcagtgacataacagctttcaaacagccaattgaggatgattcatgtaaaggctgggggaagtttgctcggctgacaagagcactgacaagcagcaggggtgtcctgcagcagctggctccaagcgtgcaaaaaggcgagaatgtccacaagcactcccgcctggcagaggtcctacagctgggctcagacatccttccccagtacaagcaagaggcaccaaagactccccctcacatcatcttacattattgtgtttttaagaccacgtgggattggatcatcttgatcttgaccttctatacagccatcttggtcccttataatgtctccttcaaaaccaggcagaataatgtggcctggctggttgttgatagcatcgtggatgttatctttttggtggacattgtgctcaattttcataccacctttgttggaccagcaggggaggtgatttctgaccccaaacttatccgcatgaactacctgaagacgtggtttgtgattgaccttctgtcctgtttgccatatgatgtcatcaacgcttttgagaacgtggatgaggttagtgcctttatgggtgatccagggaagattggttttgctgatcagattccaccaccactggaggggagagagagtcagggcatcagcagcctgttcagctctctaaaagttgtccggctgctccgtcttgggcgagtggcccgtaagctggaccactacattgaatatggagctgctgtgctggtcctgctggtgtgtgtgtttgggctggctgcacactggatggcctgcatctggtacagcattggggactatgagatctttgacgaggacaccaagacaatccgcaacaacagctggctgtaccaactagcgatggacattggcaccccttaccagtttaatgggtctggctcagggaagtgggaaggtggtcccagcaagaattctgtctacatctcctcgttgtatttcacaatgaccagcctcaccagtgtgggctttgggaacatcgccccatccacagacattgagaagatctttgcagtggccatcatgatgattggctcacttctctatgccaccatcttcgggaatgtgacgactattttccaacagatgtatgccaacaccaacagataccatgagatgctcaacagtgttcgggacttcctgaagctctaccaggtgccaaaaggattgagtgagcgagtaatggattatattgtgtccacttggtccatgtccagaggcattgacacagagaaggtcctgcagatctgccccaaggacatgagagccgacatctgcgtgcacctgaaccgcaaggtgttcaaggagcacccggccttccggctggccagtgatggctgcctccgggcactggccatggagttccagacggtgcactgtgccccaggggacctcatctaccatgcaggagagagcgttgacagcctctgctttgtggtttctggctccctggaggtgatccaagatgatgaggtggtggccattctaggaaaaggagacgtgtttggagatgtgttctggaaggaagccacccttgcccagtcctgtgccaatgttagggccttgacctactgtgatctgcatgtgatcaagcgggatgccctgcagaaagtgctggaattctacacggccttctcccattccttctcccggaacctgattctgacgtacaacttgaggaagaggattgtgttccggaagatcagcgatgtgaaacgtgaagaggaagaacgcatgaaacgaaagaatgaggcccccctgatcttgcccccggaccaccctgtccggcgcctcttccagagattccgacagcagaaagaggccaggctggcagctgagagagggggccgggacctggatgacctagatgtggagaagggcaatgtccttacagagcatgcctccgccaaccacagcctcgtgaaggccagcgtggtcaccgtgcgtgagagtcctgccacgcccgtatccttccaggcagcctccacctccggggtgccagaccacgcaaagctacaggcgccagggtccgagtgcctgggccccaaggggggcgggggcgattgtgccaagcgcaaaagctgggcccgcttcaaagatgcttgcgggaagagtgaggactggaacaaggtgtccaaggctgagtcgatggagacacttcccgagaggacaaaagcgtcaggcgaggccacactgaagaagacagactcgtgtgacagtggcatcaccaagagcgacttgcgcctggacaacgtgggtgaggccaggagtccccaggatcggagtcccatcctggcagaggtcaagcattcgttctaccccatccctgagcagacgctgcaggccacagtcctggaggtgaggcacgagctgaaggaggacatcaaggccttaaacgccaaaatgaccaatattgagaaacagctctctgagatactcaggatattaacttccagaagatcctctcagtctcctcaggagttgtttgaaatatcgaggccacagtccccagaatcagagagagacatttttggagccagctgagaggtctatttaaaaaaaaagtcagagacagatacctccaaccctgccgtcaccaccacccctaccacccggaattc

SEQ ID NO: 311026 - DNA, 2863 bp, Homo sapiens
cgttgccgggtcgcaggtcccgccagtgcgagcgcaacggaggtcgaaggcgttcagactcttagctgaacgcggagctgcggcggctatgctgtggagcggctgccggcgtttcggggcgcgcctcggctgcctgcccggcggtctccgggtcctcgtccagaccggccaccggagcttgacctcctgcatcgacccttccatgggacttaatgaagagcagaaagaatttcaaaaagtggcctttgactttgctgcccgagagatggctccaaatatggcagagtgggaccagaaggagctgttcccagtggatgtgatgcggaaggcagcccagctaggcttcggaggggtctacatacaaacagatgtgggcgggtctgggctgtcacgtcttgatacctctgtcatttttgaagccttggctacaggctgcaccagcaccacagcctatataagcatccacaacatgtgtgcctggatgattgatagcttcggaaatgaggaacagaggcacaaattttgcccaccgctctgtaccatggagaagtttgcttcctactgcctcactgaaccaggaagtgggagtgatgctgcctctcttctgacctccgctaagaaacagggagatcattacatcctcaatggctccaaggccttcatcagtggtgctggtgagtcagacatctatgtggtcatgtgccgaacaggaggaccaggccccaagggcatctcatgcatagttgttgagaaggggacccctggcctcagctttggcaagaaggagaaaaaggtggggtggaactcccagccaacacgagctgtgatcttcgaagactgtgctgtccctgtggccaacagaattgggagcgaggggcagggcttcctcattgccgtgagaggactgaacggagggaggatcaatattgcttcctgctccctgggggctgcccacgcctctgtcatcctcacccgagaccacctcaatgtccggaagcagtttggagagcctctggccagtaaccagtacttgcaattcacactggctgatatggcaacaaggctggtggccgcgcggctgatggtccgcaatgcagcagtggctctgcaggaggagaggaaggatgcagtggccttgtgctccatggccaagctctttgctacagatgaatgctttgccatctgcaaccaggccttgcagatgcacgggggctacggctacctgaaggattacgctgttcagcagtacgtgcgggactccagggtccaccagattctagaaggtagcaatgaagtgatgaggatactgatctctagaagcctgcttcaggagtagaacccacacttgttctggcctggtgttcagtgcgactgcagtcagtgttgagtggtgccatgtgggccgctctattccaaaggaatcatggattagacccaagggctgagctcctctagggcaggacctgcaccctgtgtgttggcaccagcatcgggtcttggactggggcagaatccccagtggaaccggaagagctggactgatgagaaacatcagaagaacacatactaccttgttttcctaatgccagaagggtgaccagtgaagattcaccgtcaaaccatgaaagtcctttcttggatccactttatcttgattagtctgcattttactagttcactggatccctcctctaggggcctggggactttcactgatgctcttcctgattctagagcaaaggtgtgggaaggggaaatggaggaatgccctcctgtctgtgtcgttctctgtgccacagctacagatgcagaaggtttctctggatagcacacctctgaatgtaaatcatgataaaatggatatttggaaacttactcctaagctgtgatttagggtgtatttctacttctggactgcctcaatatcaagggctgagacttttgaattttgaatattcgttgggtttcatgttaagaagcctgtggtctaggagtgctattcagtgtttcttttcctgataaacactttgaatattttttttgtgtttttgtttccttttctgaagctgttcctccttttaaatatttttaatcacattgataaaatctatccttcaccacctctggttctactatagttgatttttattttaaatgtttaattgtatttgattaaacacttaactggattttggaataataaaactctcgtccaatttggcttttaaaaaaaaaaaaaaaaaaaaaaaaaaaaaaaaagaagagaaagaaaagaagaaaagaagaaaaaaaaaaaaagaaaaaaaaagaagaacaaaaaaaaaaaaaaaaaaaaaacaacaaagagaagaacaaataaaaagagaagaagagagagagagaaaaagaaaaacaaccaacgagccacaaaagggaaaaacaacctcgagaaacagccgacagagtcgcaagaaataaaggaatctcacgacaaaagacacgacataaaaccacaaagcgagggcagagagggaggagcggagaaaaaaaagagcagaaacgagagaggagacacaaaagacacaaacggcaccaactaagagagcgaaaacgaacgtacaaagacggcgagagacgcagacaaggcacaacggagcagagacaaacgacacagaaaaagaggaaacaacaacacgggagacagtgacaaagaacggacaaaataatatggagaaagagaacagtgtaagcagagatgaaaacagcgagaccaaaaaaaatgggaacggggagagaaagagaagcgaacggaaaggaagagaaagaaaacaaaacgaagcgacagcatacaacaccaggcacaggacaaagaagaagaagagga

SEQ ID NO: 311027 - DNA, 2231 bp, Homo sapiens
cgttgccgggtcgcaggtcccgccagtgcgagcgcaacggaggtcgaaggcgttcagactcttagctgaacgcggagctgcggcggctatgctgtggagcggctgccggcgtttcggggcgcgcctcggctgcctgcccggcggtctccgggtcctcgtccagaccggccaccggagcttgacctcctgcatcgacccttccatgggacttaatgaagagcagaaagaatttcaaaaagtggcctttgactttgctgcccgagagatggctccaaatatggcagagtgggaccagaaggagctgttcccagtggatgtgatgcggaaggcagcccagctaggcttcggaggggtctacatacaaacagatgtgggcgggtctgggctgtcacgtcttgatacctctgtcatttttgaagccttggctacaggctgcaccagcaccacagcctatataagcatccacaacatgtgtgcctggatgattgatagcttcggaaatgaggaacagaggcacaaattttgcccaccgctctgtaccatggagaagtttgcttcctactgcctcactgaaccaggaagtgggagtgatgctgcctctcttctgacctccgctaagaaacagggagatcattacatcctcaatggctccaaggccttcatcagtggtgctggtgagtcagacatctatgtggtcatgtgccgaacaggaggaccaggccccaagggcatctcatgcatagttgttgagaaggggacccctggcctcagctttggcaagaaggagaaaaaggtggggtggaactcccagccaacacgagctgtgatcttcgaagactgtgctgtccctgtggccaacagaattgggagcgaggggcagggcttcctcattgccgtgagaggactgaacggagggaggatcaatattgcttcctgctccctgggggctgcccacgcctctgtcatcctcacccgagaccacctcaatgtccggaagcagtttggagagcctctggccagtaaccagtacttgcaattcacactggctgatatggcaacaaggctggtggccgcgcggctgatggtccgcaatgcagcagtggctctgcaggaggagaggaaggatgcagtggccttgtgctccatggccaagctctttgctacagatgaatgctttgccatctgcaaccaggccttgcagatgcacgggggctacggctacctgaaggattacgctgttcagcagtacgtgcgggactccagggtccaccagattctagaaggtagcaatgaagtgatgaggatactgatctctagaagcctgcttcaggagtagaacccacacttgttctggcctggtgttcagtgcgactgcagtcagtgttgagtggtgccatgtgggccgctctattccaaaggaatcatggattagacccaagggctgagctcctctagggcaggacctgcaccctgtgtgttggcaccagcatcgggtcttggactggggcagaatccccagtggaaccggaagagctggactgatgagaaacatcagaagaacacatactaccttgttttcctaatgccagaagggtgaccagtgaagattcaccgtcaaaccatgaaagtcctttcttggatccactttatcttgattagtctgcattttactagttcactggatccctcctctaggggcctggggactttcactgatgctcttcctgattctagagcaaaggtgtgggaaggggaaatggaggaatgccctcctgtctgtgtcgttctctgtgccacagctacagatgcagaaggtttctctggatagcacacctctgaatgtaaatcatgataaaatggatatttggaaacttactcctaagctgtgatttagggtgtatttctacttctggactgcctcaatatcaagggctgagacttttgaattttgaatattcgttgggtttcatgttaagaagcctgtggtctaggagtgctattcagtgtttcttttcctgataaacactttgaatattttttttgtgtttttgtttccttttctgaagctgttcctccttttaaatatttttaatcacattgataaaatctatccttcaccacctctggttctactatagttgatttttattttaaatgtttaattgtatttgattaaacacttaactggattttggaataataaaactctcgtccaatttggcttttaaaaa

SEQ ID NO: 311028 - DNA, 2037 bp, Homo sapiens
cgttgccgggtcgcaggtcccgccagtgcgagcgcaacggaggtcgaaggcgttcagactcttagctgaacgcggagctgcggcggctatgctgtggagcggctgccggcgtttcggggcgcgcctcggctgcctgcccggcggtctccgggtcctcgtccagaccggccaccggagcttgacctcctgcatcgacccttccatgggacttaatgaagagcagaaagaatttcaaaaagtggcctttgactttgctgcccgagagatggctccaaatatggcagagtgggaccagaaggagctgttcccagtggatgtgatgcggaaggcagcccagctaggcttcggaggggtctacatacaaacagatgtgggcgggtctgggctgtcacgtcttgatacctctgtcatttttgaagccttggctacaggctgcaccagcaccacagcctatataagcatccacaacatgtgtgcctggatgattgatagcttcggaaatgaggaacagaggcacaaattttgcccaccgctctgtaccatggagaagtttgcttcctactgcctcactgaaccaggaagtgggagtgatgctgcctctcttctgacctccgctaagaaacagggagatcattacatcctcaatggctccaaggccttcatcagtggtgctggtgagtcagacatctatgtggtcatgtgccgaacaggaggaccaggccccaagggcatctcatgcatagttgttgagaaggggacccctggcctcagctttggcaagaaggagaaaaaggtggggtggaactcccagccaacacgagctgtgatcttcgaagactgtgctgtccctgtggccaacagaattgggagcgaggggcagggcttcctcattgccgtgagaggactgaacggagggaggatcaatattgcttcctgctccctgggggctgcccacgcctctgtcatcctcacccgagaccacctcaatgtccggaagcagtttggagagcctctggccagtaaccagtacttgcaattcacactggctgatatggcaacaaggctggtggccgcgcggctgatggtccgcaatgcagcagtggctctgcaggaggagaggaaggatgcagtggccttgtgctccatggccaagctctttgctacagatgaatgctttgccatctgcaaccaggccttgcagatgcacgggggctacggctacctgaaggattacgctgttcagcagtacgtgcgggactccagggtccaccagattctagaaggtagcaatgaagtgatgaggatactgatctctagaagcctgcttcaggagtagaacccacacttgttctggcctggtgttcagtgcgactgcagtcagtgttgagtggtgccatgtgggccgctctattccaaaggaatcatggattagacccaagggctgagctcctctagggcaggacctgcaccctgtgtgttggcaccagcatcgggtcttggactggggcagaatccccagtggaaccggaagagctggactgatgagaaacatcagaagaacacatactaccttgttttcctaatgccagaagggtgaccagtgaagattcaccgtcaaaccatgaaagtcctttcttggatccactttatcttgattagtctgcattttactagttcactggatccctcctctaggggcctggggactttcactgatgctcttcctgattctagagcaaaggtgtgggaaggggaaatggaggaatgccctcctgtctgtgtcgttctctgtgccacagctacagatgcagaaggtttctctggatagcacacctctgaatgtaaatcatgataaaatggatatttggaaacttactcctaagctgtgatttagggtgtatttctacttctggactgcctcaatatcaagggctgagacttttgaattttgaatattcgttgggtttcatgttaagaagcctgtggtctaggagtgctattcagtgtttcttttcctgataaacactttgaatattt

SEQ ID NO: 311029 - DNA, 3246 bp, Homo sapiens
cgttgccgggtcgcaggtcccgccagtgcgagcgcaacggaggtcgaaggcgttcagactcttagctgaacgcggagctgcggcggctatgctgtggagcggctgccggcgtttcggggcgcgcctcggctgcctgcccggcggtctccgggtcctcgtccagaccggccaccggagcttgacctcctgcatcgacccttccatgggacttaatgaagagcagaaagaatttcaaaaagtggcctttgactttgctgcccgagagatggctccaaatatggcagagtgggaccagaaggagctgttcccagtggatgtgatgcggaaggcagcccagctaggcttcggaggggtctacatacaaacagatgtgggcgggtctgggctgtcacgtcttgatacctctgtcatttttgaagccttggctacaggctgcaccagcaccacagcctatataagcatccacaacatgtgtgcctggatgattgatagcttcggaaatgaggaacagaggcacaaattttgcccaccgctctgtaccatggagaagtttgcttcctactgcctcactgaaccaggaagtgggagtgatgctgcctctcttctgacctccgctaagaaacagggagatcattacatcctcaatggctccaaggccttcatcagtggtgctggtgagtcagacatctatgtggtcatgtgccgaacaggaggaccaggccccaagggcatctcatgcatagttgttgagaaggggacccctggcctcagctttggcaagaaggagaaaaagctgcttacgttggtgcactttgttgctccaggaagagacgcttagagaagacctggtgttggccacaagtctcagtaatggaaggcgtgtggtcccttttgcttctttgattaaaaataaagtaaaactcattggagatgattgtgggtatttcagcaacccaagaaggacacttaggtactgtaagtaatttgaaaagtaagatacttctaggattaagagccgccatggccagggcatgaacaggagacctgtgatcatgtaaccgtaattggtaataagggctcaagacccattcagattttttagaccagatgctcaaagcagtcatctctctctagtttgtactgttatggggggactttgtgagagaaggcaggtaatgaaatgacccctaagtgtacctctttctcacagctcctcgggtttctgtattttcctacaggatccttcctgatcctctgtaactgtaaggcattatgcattttagcatccccttctctttggtaacacagcaaccatttcctaggcttctactgtgtgtgaagcccatgctaactcctgggcaggaagaccttcagtaaaaggcttagaaatggagtttatcctatcaacaaaagagagcaaggaaatgatgtaaaggcagtctattttcagagccagagaggaactgggagattgtagatagtttgtggttttcaattagaggcactgaaattgggggcagttggtgtcacaatcctaaaagaagttgtgagaagtgtttgtaggttagtcaggtagagtagacattagtagattctcttaataagttagaaaatgtttagctgaaacaggtatctttctgagtgctgacaggcctttaaacctgaactttttctttttcctcattttaagttcttgtgggtctaagtcttgggtgctgaaacccatacctcacaggctcccgtccccagggaaggccgccctacctgctggattgttgggcaaccacgcagtccctgatttttgccaggtggggtggaactcccagccaacacgagctgtgatcttcgaagactgtgctgtccctgtggccaacagaattgggagcgaggggcagggcttcctcattgccgtgagaggactgaacggagggaggatcaatattgcttcctgctccctgggggctgcccacgcctctgtcatcctcacccgagaccacctcaatgtccggaagcagtttggagagcctctggccagtaaccagtacttgcaattcacactggctgatatggcaacaaggctggtggccgcgcggctgatggtccgcaatgcagcagtggctctgcaggaggagaggaaggatgcagtggccttgtgctccatggccaagctctttgctacagatgaatgctttgccatctgcaaccaggccttgcagatgcacgggggctacggctacctgaaggattacgctgttcagcagtacgtgcgggactccagggtccaccagattctagaaggtagcaatgaagtgatgaggatactgatctctagaagcctgcttcaggagtagaacccacacttgttctggcctggtgttcagtgcgactgcagtcagtgttgagtggtgccatgtgggccgctctattccaaaggaatcatggattagacccaagggctgagctcctctagggcaggacctgcaccctgtgtgttggcaccagcatcgggtcttggactggggcagaatccccagtggaaccggaagagctggactgatgagaaacatcagaagaacacatactaccttgttttcctaatgccagaagggtgaccagtgaagattcaccgtcaaaccatgaaagtcctttcttggatccactttatcttgattagtctgcattttactagttcactggatccctcctctaggggcctggggactttcactgatgctcttcctgattctagagcaaaggtgtgggaaggggaaatggaggaatgccctcctgtctgtgtcgttctctgtgccacagctacagatgcagaaggtttctctggatagcacacctctgaatgtaaatcatgataaaatggatatttggaaacttactcctaagctgtgatttagggtgtatttctacttctggactgcctcaatatcaagggctgagacttttgaattttgaatattcgttgggtttcatgttaagaagcctgtggtctaggagtgctattcagtgtttcttttcctgataaacactttgaatattttttttgtgtttttgtttccttttctgaagctgttcctccttttaaatatttttaatcacattgataaaatctatccttcaccacctctggttctactatagttgatttttattttaaatgtttaattgtatttgattaaacacttaactggattttggaataataaaactctcgtccaatttggcttttaaaaa

SEQ ID NO: 311030 - DNA, 3017 bp, Homo sapiens
cgttgccgggtcgcaggtcccgccagtgcgagcgcaacggaggtcgaaggcgttcagactcttagctgaacgcggagctgcggcggctatgctgtggagcggctgccggcgtttcggggcgcgcctcggctgcctgcccggcggtctccgggtcctcgtccagaccggccaccggagcttgacctcctgcatcgacccttccatgggacttaatgaagagcagaaagaatttcaaaaagtggcctttgactttgctgcccgagagatggctccaaatatggcagagtgggaccagaaggagctgttcccagtggatgtgatgcggaaggcagcccagctaggcttcggaggggtctacatacaaacagatgtgggcgggtctgggctgtcacgtcttgatacctctgtcatttttgaagccttggctacaggctgcaccagcaccacagcctatataagcatccacaacatgtgtgcctggatgattgatagcttcggaaatgaggaacagaggcacaaattttgcccaccgctctgtaccatggagaagtttgcttcctactgcctcactgaaccaggaagtgggagtgatgctgcctctcttctgacctccgctaagaaacagggagatcattacatcctcaatggctccaaggccttcatcagtggtgctggtgagtcagacatctatgtggtcatgtgccgaacaggaggaccaggccccaagggcatctcatgcatagttgttgagaaggggacccctggcctcagctttggcaagaaggagaaaaaggtggggtggaactcccagccaacacgagctgtgatcttcgaagactgtgctgtccctgtggccaacagaattgggagcgaggggcagggcttcctcattgccgtgagaggactgaacggagggaggatcaatattgcttcctgctccctgggggctgcccacgcctctgtcatcctcacccgagaccacctcaatgtccggaagcagtttggagagcctctggccagtaaccagtacttgcaattcacactggctgatatggcaacaaggctggtggccgcgcggctgatggtccgcaatgcagcagtggctctgcaggaggagaggaaggatgcagtggccttgtgctccatggccaagctctttgctacagatgaatgctttgccatctgcaaccaggccttgcagatgcacgggggctacggctacctgaaggattacgctgttcagcagtacgtgcgggactccagggtccaccagattctagaagagctgttctggcaggggcctggagtccagagccgcagcttcgtccctttcggggggcctcagatcgctctgctgctgcccttttcctctggagatctgcgagaagggtgaactgagataatggatgagaaagcatgttgaaaaccacagccggggcttttctctaaggttatcgagtacgtggttctcagggatccaagaacagtgatggacaaggcaaatgtgagccagtatggtcatcagtagctctatattgattatcagccagatggcctaaaagatacctgtctcaatattactagtgtatttttcaataaaataaaccatcactatatgggtatcttcttggtagtcacagacattctatcgaggaaacatggaagccgttggggtcgggctcggagcctggctgtctccactctctacagccagtgcggaagtcttgaaatgacacgactcttggaaaagcaggaggggcagaggcttctttgagtgacttcggtgaagcaacgtgaggctgccttgctggaaacattatataatggggcttccctgcccctttcacagcacccttctcaaacctcagcctgtgctggaatcgcctggagggcatgggagcgcagattgcgggcctcaaccccagagcttctgctccagagggtctagtgtgggcctgggaatttgtatctgcaacaagtcttcaagtgaggctgccacagcttgtctgagaaccacactttgagacccaccgctctggtgttaatgtcagagtcacaggctaccacaggtagcaatgaagtgatgaggatactgatctctagaagcctgcttcaggagtagaacccacacttgttctggcctggtgttcagtgcgactgcagtcagtgttgagtggtgccatgtgggccgctctattccaaaggaatcatggattagacccaagggctgagctcctctagggcaggacctgcaccctgtgtgttggcaccagcatcgggtcttggactggggcagaatccccagtggaaccggaagagctggactgatgagaaacatcagaagaacacatactaccttgttttcctaatgccagaagggtgaccagtgaagattcaccgtcaaaccatgaaagtcctttcttggatccactttatcttgattagtctgcattttactagttcactggatccctcctctaggggcctggggactttcactgatgctcttcctgattctagagcaaaggtgtgggaaggggaaatggaggaatgccctcctgtctgtgtcgttctctgtgccacagctacagatgcagaaggtttctctggatagcacacctctgaatgtaaatcatgataaaatggatatttggaaacttactcctaagctgtgatttagggtgtatttctacttctggactgcctcaatatcaagggctgagacttttgaattttgaatattcgttgggtttcatgttaagaagcctgtggtctaggagtgctattcagtgtttcttttcctgataaacactttgaatattttttttgtgtttttgtttccttttctgaagctgttcctccttttaaatatttttaatcacattgataaaatctatccttcaccacctctggttctactatagttgatttttattttaaatgtttaattgtatttgattaaacacttaactggattttggaataataaaactctcgtccaatttggcttttaaaaa

SEQ ID NO: 311031 - DNA, 2197 bp, Homo sapiens
accttgtgttctgcctgcctcggcctcccatagtgctgggattacagatgtgagccaccgcacccggcccctctcacccttttcctcaatccaaagatggaactgccagtgatttgaggaagtaatagaaactactaatagaaagcacatataactctgatttttagaggctcgtgtaacctaactagaagtagtacaaacgtgctggtgagaagtacctcagcctggttatctctgggtagtccttattccaggaatatgttttaatccaccgtttgcctttaaagagtcttcccaattgtgactctccccttcccactcttctgctttactccactgccctgccctttgttctctttccccttctcccccatttttttttcttttccatctttatttctgtcattgtcttttcttcttggtgtacctatcagcatgtgtgcctggatgattgatagcttcggaaatgaggaacagaggcacaaattttgcccaccgctctgtaccatggagaagtttgcttcctactgcctcactgaaccaggaagtgggagtgatgctgcctctcttctgacctccgctaagaaacagggagatcattacatcctcaatggctccaaggccttcatcagtggtgctggtgagtcagacatctatgtggtcatgtgccgaacaggaggaccaggccccaagggcatctcatgcatagttgttgagaaggggacccctggcctcagctttggcaagaaggagaaaaaggtggggtggaactcccagccaacacgagctgtgatcttcgaagactgtgctgtccctgtggccaacagaattgggagcgaggggcagggcttcctcattgccgtgagaggactgaacggagggaggatcaatattgcttcctgctccctgggggctgcccacgcctctgtcatcctcacccgagaccacctcaatgtccggaagcagtttggagagcctctggccagtaaccagtacttgcaattcacactggctgatatggcaacaaggctggtggccgcgcggctgatggtccgcaatgcagcagtggctctgcaggaggagaggaaggatgcagtggccttgtgctccatggccaagctctttgctacagatgaatgctttgccatctgcaaccaggccttgcagatgcacgggggctacggctacctgaaggattacgctgttcagcagtacgtgcgggactccagggtccaccagattctagaaggtagcaatgaagtgatgaggatactgatctctagaagcctgcttcaggagtagaacccacacttgttctggcctggtgttcagtgcgactgcagtcagtgttgagtggtgccatgtgggccgctctattccaaaggaatcatggattagacccaagggctgagctcctctagggcaggacctgcaccctgtgtgttggcaccagcatcgggtcttggactggggcagaatccccagtggaaccggaagagctggactgatgagaaacatcagaagaacacatactaccttgttttcctaatgccagaagggtgaccagtgaagattcaccgtcaaaccatgaaagtcctttcttggatccactttatcttgattagtctgcattttactagttcactggatccctcctctaggggcctggggactttcactgatgctcttcctgattctagagcaaaggtgtgggaaggggaaatggaggaatgccctcctgtctgtgtcgttctctgtgccacagctacagatgcagaaggtttctctggatagcacacctctgaatgtaaatcatgataaaatggatatttggaaacttactcctaagctgtgatttagggtgtatttctacttctggactgcctcaatatcaagggctgagacttttgaattttgaatattcgttgggtttcatgttaagaagcctgtggtctaggagtgctattcagtgtttcttttcctgataaacactttgaatattttttttgtgtttttgtttccttttctgaagctgttcctccttttaaatatttttaatcacattgataaaatctatccttcaccacctctggttctactatagttgatttttattttaaatgtttaattgtatttgattaaacacttaactggattttggaataataaaactctcgtccaatttggcttttaaaaa

SEQ ID NO: 311032 - DNA, 1850 bp, Homo sapiens
cgttgccgggtcgcaggtcccgccagtgcgagcgcaacggaggtcgaaggcgttcagactcttagctgaacgcggagctgcggcggctatgctgtggagcggctgccggcgtttcggggcgcgcctcggctgcctgcccggcggtctccgggtcctcgtccagaccggccaccggagcttgacctcctgcatcgaccgaagtgggagtgatgctgcctctcttctgacctccgctaagaaacagggagatcattacatcctcaatggctccaaggccttcatcagtggtgctggtgagtcagacatctatgtggtcatgtgccgaacaggaggaccaggccccaagggcatctcatgcatagttgttgagaaggggacccctggcctcagctttggcaagaaggagaaaaaggtggggtggaactcccagccaacacgagctgtgatcttcgaagactgtgctgtccctgtggccaacagaattgggagcgaggggcagggcttcctcattgccgtgagaggactgaacggagggaggatcaatattgcttcctgctccctgggggctgcccacgcctctgtcatcctcacccgagaccacctcaatgtccggaagcagtttggagagcctctggccagtaaccagtacttgcaattcacactggctgatatggcaacaaggctggtggccgcgcggctgatggtccgcaatgcagcagtggctctgcaggaggagaggaaggatgcagtggccttgtgctccatggccaagctctttgctacagatgaatgctttgccatctgcaaccaggccttgcagatgcacgggggctacggctacctgaaggattacgctgttcagcagtacgtgcgggactccagggtccaccagattctagaaggtagcaatgaagtgatgaggatactgatctctagaagcctgcttcaggagtagaacccacacttgttctggcctggtgttcagtgcgactgcagtcagtgttgagtggtgccatgtgggccgctctattccaaaggaatcatggattagacccaagggctgagctcctctagggcaggacctgcaccctgtgtgttggcaccagcatcgggtcttggactggggcagaatccccagtggaaccggaagagctggactgatgagaaacatcagaagaacacatactaccttgttttcctaatgccagaagggtgaccagtgaagattcaccgtcaaaccatgaaagtcctttcttggatccactttatcttgattagtctgcattttactagttcactggatccctcctctaggggcctggggactttcactgatgctcttcctgattctagagcaaaggtgtgggaaggggaaatggaggaatgccctcctgtctgtgtcgttctctgtgccacagctacagatgcagaaggtttctctggatagcacacctctgaatgtaaatcatgataaaatggatatttggaaacttactcctaagctgtgatttagggtgtatttctacttctggactgcctcaatatcaagggctgagacttttgaattttgaatattcgttgggtttcatgttaagaagcctgtggtctaggagtgctattcagtgtttcttttcctgataaacactttgaatattttttttgtgtttttgtttccttttctgaagctgttcctccttttaaatatttttaatcacattgataaaatctatccttcaccacctctggttctactatagttgatttttattttaaatgtttaattgtatttgattaaacacttaactggattttggaataataaaactctcgtccaatttggcttttaaaaa

SEQ ID NO: 311033 - DNA, 2121 bp, Homo sapiens
cgttgccgggtcgcaggtcccgccagtgcgagcgcaacggaggtcgaaggcgttcagactcttagctgaacgcggagctgcggcggctatgctgtggagcggctgccggcgtttcggggcgcgcctcggctgcctgcccggcggtctccgggtcctcgtccagaccggccaccggagcttgacctcctgcatcgacccttccatgggacttaatgaagagcagaaagaatttcaaaaagtggcctttgactttgctgcccgagagatggctccaaatatggcagagtgggaccagaaggagctgttcccagtggatgtgatgcggaaggcagcccagctaggcttcggaggggtctacatacaaacagatgtgggcgggtctgggctgtcacgtcttgatacctctgtcatttttgaagccttggctacaggctgcaccagcaccacagcctatataagcatccacaagaagtgggagtgatgctgcctctcttctgacctccgctaagaaacagggagatcattacatcctcaatggctccaaggccttcatcagtggtgctggtgagtcagacatctatgtggtcatgtgccgaacaggaggaccaggccccaagggcatctcatgcatagttgttgagaaggggacccctggcctcagctttggcaagaaggagaaaaaggtggggtggaactcccagccaacacgagctgtgatcttcgaagactgtgctgtccctgtggccaacagaattgggagcgaggggcagggcttcctcattgccgtgagaggactgaacggagggaggatcaatattgcttcctgctccctgggggctgcccacgcctctgtcatcctcacccgagaccacctcaatgtccggaagcagtttggagagcctctggccagtaaccagtacttgcaattcacactggctgatatggcaacaaggctggtggccgcgcggctgatggtccgcaatgcagcagtggctctgcaggaggagaggaaggatgcagtggccttgtgctccatggccaagctctttgctacagatgaatgctttgccatctgcaaccaggccttgcagatgcacgggggctacggctacctgaaggattacgctgttcagcagtacgtgcgggactccagggtccaccagattctagaaggtagcaatgaagtgatgaggatactgatctctagaagcctgcttcaggagtagaacccacacttgttctggcctggtgttcagtgcgactgcagtcagtgttgagtggtgccatgtgggccgctctattccaaaggaatcatggattagacccaagggctgagctcctctagggcaggacctgcaccctgtgtgttggcaccagcatcgggtcttggactggggcagaatccccagtggaaccggaagagctggactgatgagaaacatcagaagaacacatactaccttgttttcctaatgccagaagggtgaccagtgaagattcaccgtcaaaccatgaaagtcctttcttggatccactttatcttgattagtctgcattttactagttcactggatccctcctctaggggcctggggactttcactgatgctcttcctgattctagagcaaaggtgtgggaaggggaaatggaggaatgccctcctgtctgtgtcgttctctgtgccacagctacagatgcagaaggtttctctggatagcacacctctgaatgtaaatcatgataaaatggatatttggaaacttactcctaagctgtgatttagggtgtatttctacttctggactgcctcaatatcaagggctgagacttttgaattttgaatattcgttgggtttcatgttaagaagcctgtggtctaggagtgctattcagtgtttcttttcctgataaacactttgaatattttttttgtgtttttgtttccttttctgaagctgttcctccttttaaatatttttaatcacattgataaaatctatccttcaccacctctggttctactatagttgatttttattttaaatgtttaattgtatttgattaaacacttaactggattttggaataataaaactctcgtccaatttggcttttaaaaa

SEQ ID NO: 311034 - DNA, 2579 bp, Homo sapiens
cgttgccgggtcgcaggtcccgccagtgcgagcgcaacggaggtcgaaggcgttcagactcttagctgaacgcggagctgcggcggctatgctgtggagcggctgccggcgtttcggggcgcgcctcggctgcctgcccggcggtctccgggtcctcgtccagaccggccaccggagcttgacctcctgcatcgacccttccatgggacttaatgaagagcagaaagaatttcaaaaagtggcctttgactttgctgcccgagagatggctccaaatatggcagagtgggaccagaaggagctgttcccagtggatgtgatgcggaaggcagcccagctaggcttcggaggggtctacatacaaacagatgtgggcgggtctgggctgtcacgtcttgatacctctgtcatttttgaagccttggctacaggctgcaccagcaccacagcctatataagcatccacaacatgtgtgcctggatgattgatagcttcggaaatgaggaacagaggcacaaattttgcccaccgctctgtaccatggagaagtttgcttcctactgcctcactgaaccaggaagtgggagtgatgctgcctctcttctgacctccgctaagaaacagggagatcattacatcctcaatggctccaaggccttcatcagtggtgctggtgagtcagacatctatgtggtcatgtgccgaacaggaggaccaggccccaagggcatctcatgcatagttgttgagaaggggacccctggcctcagctttggcaagaaggagaaaaaggtggggtggaactcccagccaacacgagctgtgatcttcgaagactgtgctgtccctgtggccaacagaattgggagcgaggggcagggcttcctcattgccgtgagaggactgaacggagggaggatcaatattgcttcctgctccctgggggctgcccacgcctctgtcatcctcacccgagaccacctcaatgtccggaagcagtttggagagcctctggccagtaaccagtacttgcaattcacactggctgatatggcaacaaggctggtggccgcgcggctgatggtccgcaatgcagcagtggctctgcaggaggagaggaaggatgcagtggccttgtgctccatggccaagctctttgctacagatgaatgctttgccatctgcaaccaggccttgcagatgcacgggggctacggctacctgaaggattacgctgttcagcagtacgtgcgggactccagggtccaccagattctagaagagctgttctggcaggggcctggagtccagagccgcagcttcgtccctttcggggggcctcagatcgctctgctgctgcccttttcctctggagatctgcgagaagggtgaactgagataatggatgagaaagcatgttgaaaaccacagccggggcttttctctaaggttatcgagtacgtggttctcagggatccaagaacagtgatggacaaggcaaatgtgagccagtatggtcatcagtagctctatattgattatcagccagatggcctaaaagatacctgtctcaatattactagtgtatttttcaataaaataaaccatcactatatgggtatcttcttggtagtcacagacattctatcgaggaaacatggaagccgttggggtcgggctcggagcctggctgtctccactctctacagccagtgcggaagtcttgaaatgacacgactcttggaaaagcaggaggggcagaggcttctttgagtgacttcggtgaagcaacgtgaggctgccttgctggaaacattatataatggggcttccctgcccctttcacagcacccttctcaaacctcagcctgtgctggaatcgcctggagggcatgggagcgcagattgcgggcctcaaccccagagcttctgctccagagggtctagtgtgggcctgggaatttgtatctgcaacaagtcttcaagtgaggctgccacagcttgtctgagaaccacactttgagacccaccgctctggtgttaatgtcagagtcacaggctaccacaggttagaccgctgctttcttctgcaaacctcattccagaaagatgtttatgggctcagtcgccagtgttcaaactgaattcccgagagtcgttttccttccattactcttggaattgctttctcactgagctttatgtgcgtaggaaacttcgccttcattctaactctctctccaccctgcaataataagcaggaaaacatttattgtaggccacaccatcacccacttacagaagaattggggcactcatcactgtatcactttgtttcatcatggactttactgttggataaatctacagtttatgctttatttgagacgatgtgactactgattcctcgagggggtttatatttctttttgcattaaaggccactgctaaaaatgaagcaaataattgataccctcctttcagggaaaatgttttcattcttttgtaagtcagttttctgattaccaaagaaatgtgtatttattgttgaaaccttataaaattaggaaaagtaggc

SEQ ID NO: 311035 - DNA, 1928 bp, Homo sapiens
tgtttacattgtcaggctgcattgccactagggggaaccatagctttttatcatcccagccaggtggctgtgggcagcttctgcctggcagatctgcaaccaggccttgcagatgcacgggggctacggctacctgaaggattacgctgttcagcagtacgtgcgggactccagggtccaccagattctagaagagctgttctggcaggggcctggagtccagagccgcagcttcgtccctttcggggggcctcagatcgctctgctgctgcccttttcctctggagatctgcgagaagggtgaactgagataatggatgagaaagcatgttgaaaaccacagccggggcttttctctaaggttatcgagtacgtggttctcagggatccaagaacagtgatggacaaggcaaatgtgagccagtatggtcatcagtagctctatattgattatcagccagatggcctaaaagatacctgtctcaatattactagtgtatttttcaataaaataaaccatcactatatgggtatcttcttggtagtcacagacattctatcgaggaaacatggaagccgttggggtcgggctcggagcctggctgtctccactctctacagccagtgcggaagtcttgaaatgacacgactcttggaaaagcaggaggggcagaggcttctttgagtgacttcggtgaagcaacgtgaggctgccttgctggaaacattatataatggggcttccctgcccctttcacagcacccttctcaaacctcagcctgtgctggaatcgcctggagggcatgggagcgcagattgcgggcctcaaccccagagcttctgctccagagggtctagtgtgggcctgggaatttgtatctgcaacaagtcttcaagtgaggctgccacagcttgtctgagaaccacactttgagacccaccgctctggtgttaatgtcagagtcacaggctaccacaggtagcaatgaagtgatgaggatactgatctctagaagcctgcttcaggagtagaacccacacttgttctggcctggtgttcagtgcgactgcagtcagtgttgagtggtgccatgtgggccgctctattccaaaggaatcatggattagacccaagggctgagctcctctagggcaggacctgcaccctgtgtgttggcaccagcatcgggtcttggactggggcagaatccccagtggaaccggaagagctggactgatgagaaacatcagaagaacacatactaccttgttttcctaatgccagaagggtgaccagtgaagattcaccgtcaaaccatgaaagtcctttcttggatccactttatcttgattagtctgcattttactagttcactggatccctcctctaggggcctggggactttcactgatgctcttcctgattctagagcaaaggtgtgggaaggggaaatggaggaatgccctcctgtctgtgtcgttctctgtgccacagctacagatgcagaaggtttctctggatagcacacctctgaatgtaaatcatgataaaatggatatttggaaacttactcctaagctgtgatttagggtgtatttctacttctggactgcctcaatatcaagggctgagacttttgaattttgaatattcgttgggtttcatgttaagaagcctgtggtctaggagtgctattcagtgtttcttttcctgataaacactttgaatattttttttgtgtttttgtttccttttctgaagctgttcctccttttaaatatttttaatcacattgataaaatctatccttcaccacctctggttctactatagttgatttttattttaaatgtttaattgtatttgattaaacacttaactggattttggaataataaaactctcgtccaatttggcttttaaaaa

SEQ ID NO: 311036 - DNA, 1183 bp, Homo sapiens
tttatataagcatttttaccatcagaagaagtttttaaaaaagtattatttcctgacatttttcagtactttgtagagaagtctctgataatctcatctctcccaggctaaaagcaatgattgtagtttaaatctgcagctactctgaactaggcctggagcagcctggtcagagctttactaaactctcagactttgctgctgtgaaattcttcctccttcctccctcttacaggtagcaatgaagtgatgaggatactgatctctagaagcctgcttcaggagtagaacccacacttgttctggcctggtgttcagtgcgactgcagtcagtgttgagtggtgccatgtgggccgctctattccaaaggaatcatggattagacccaagggctgagctcctctagggcaggacctgcaccctgtgtgttggcaccagcatcgggtcttggactggggcagaatccccagtggaaccggaagagctggactgatgagaaacatcagaagaacacatactaccttgttttcctaatgccagaagggtgaccagtgaagattcaccgtcaaaccatgaaagtcctttcttggatccactttatcttgattagtctgcattttactagttcactggatccctcctctaggggcctggggactttcactgatgctcttcctgattctagagcaaaggtgtgggaaggggaaatggaggaatgccctcctgtctgtgtcgttctctgtgccacagctacagatgcagaaggtttctctggatagcacacctctgaatgtaaatcatgataaaatggatatttggaaacttactcctaagctgtgatttagggtgtatttctacttctggactgcctcaatatcaagggctgagacttttgaattttgaatattcgttgggtttcatgttaagaagcctgtggtctaggagtgctattcagtgtttcttttcctgataaacactttgaatattttttttgtgtttttgtttccttttctgaagctgttcctccttttaaatatttttaatcacattgataaaatctatccttcaccacctctggttctactatagttgatttttattttaaatgtttaattgtatttgattaaacacttaactggattttggaataataaaactctcgtccaatttggcttttaaaaa

SEQ ID NO: 311037 - DNA, 163 bp, Homo sapiens
agaagatttcctagaagatagaattgtgctgggctccctcgacctcactgactttctcaccttctctctgctgccttttgatccctcctcaggaagtgggagtgatgctgcctctcttctgacctccgctaagaaacagggagatcattacatcctcaatggc

SEQ ID NO: 311038 - DNA, 470 bp, Homo sapiens
tcactgtttgtatctctcctaatctgattccagatcatttcgttgacttttgtctatcctttttatactctcttggactgcctctctgatctgcagtcactgcagcgaccttttacctcacctcagtctctgtgccattggaccttattgtcagtctctgtgccattggaccttattgtcagtctctgtgccattggaccttattgtcagtctctgtgccattggaccttattgtcagtctctgtgccattggaccttattgtcagtctctgtgccattggaccttattgtcaggaggacccagtggtgttcccagacgctgtgagaactcaagcattccctggtccttttgcaccccttttacccccacaggccttcatcagtggtgctggtgagtcagacatctatgtggtcatgtgccgaacaggaggaccaggccccaagggcatctcatgcatagttgttgagaa

SEQ ID NO: 311039 - DNA, 650 bp, Homo sapiens
ccactagggggaaccatagctttttatcatcccagccaggtggctgtgggcagcttctgcctggcaggtaataagggagaggggcagagggctttgagtcgcctgtctggggggaactgacaagtttagtaggtgaacttcccttgtctctaaccatacagaatgtggaggccctctttgagcttggctgtttgtggttctttcatgggtttatggcgggctgccagatcgtgggctggggtaggaagggaagctgcttgctccacagtcttcccagagtccaagacgtctagtccctgtctccctgcagatctgcaaccaggccttgcagatgcacgggggctacggctacctgaaggattacgctgttcagcagtacgtgcgggactccagggtccaccagattctagaaggtaaaaattgccagaggttattctcttcccttcagaacggggacgggatcgctgctttccccactctctgtccccatgcctcctgggcctcagggtgcagtcaagccctgtctgtctcgaggcttcctcctccctcccgttccacagagctgttctggcaggggcctggagtccagagccgcagcttcgtccctttcggggggcctcagatcgctctgctgctgcccttttcctctg

SEQ ID NO: 311040 - DNA, 407 bp, Homo sapiens
tgccagaacaagtttttacaggacccatgttaactgataaccactgtaagatgacaaacaggcatattaagagaattcatacgctgtcgcatgtgcaagcctcctaatccctcactgtgccctctaaaaggaaggccgtctctgaatcagctgctgatcaccctgctctcttttgtacgtaggagctgttcccagtggatgtgatgcggaaggcagcccagctaggcttcggaggggtctacatacaaacagatgtgggcgggtctgggctgtcacgtcttgatacctctgtcatttttgaagccttggctacaggctgcaccagcaccacagcctatataagcatccacaagtgagtgcccaagcttggaaggcacaatgaagtgctcactcgggctgactgtgag

SEQ ID NO: 311041 - DNA, 397 bp, Homo sapiens
gatctagaggaccctttaaatgctgtagaccaggctgggttctggccagagctgttgcactaggcaatgctgccagagatgaggaggcatcagggcagtcatcccttctgctgtttgccccaagaatgccatacaaacctggggatgacccttaaaagtctcccgtcacccccagtattggggggaagctgactattcctcagatgatagcccagtcacttgaagaacaggacaagactattctgtgtctagggggctcaagcactgtgtgtgggtctaacgaatgcattttgtggaaatgggctcagactccccaaagggccatccaacctatgggagtgtctggccttctgaggtcctgaaatgtctcttttgtcagtaaacagctaataccctc

SEQ ID NO: 311042 - DNA, 3774 bp, Homo sapiens
ctagaggatcccgctccacccgacggggtggggggcaacggtcagccgtcaccctgagacgggcggcggcgggatggcaacagcctccggggcctcggacttgtctggctccggagcgcccccgcccggtgtgggagctcaggcggcggcggccgctgaggaggaggagcgagaggtggtgcgggtccgagtcaagaaatgtgagagcttcttgccgccagagttccgctcttttgctgtagatccccagatcacctcgctcgacgtgttgcagcacatcctcatccgagcctttgatttgagtgggaagaagaactttggcatcagctacctgggccgggaccggctaggacaggaagtttacctctcacttctatctgactgggacctcagcacagcctttgccactgcctccaaaccttacctgcaattgcgtgtagatattcggccctcggaggacagcccattgctagaagactgggacataatcagccccaaagatgtcattggctccgacgtgttgctggctgagaaacggtcatcactgacgactgccgccctgccctttacacagtccatcctcactcaggtgggccgtaccttgtctaaggtccaacaagtgctgagctggtcgtatggggaagatgtcaagcccttcaagccacccctgagcgatgctgagtttcacacgtacctgaaccacgagggccagctctcccgacccgaggagttgcgcctgcggatctatcatggcggtgtggagccctcgctgcgaaaggtggtgtggcggtacctgctgaacgtgtatccagatggactgacaggccgagagcggatggactacatgaaacgcaagagccgcgagtatgagcagctcaagagcgagtgggcccagcgagcgaaccctgaggacctggaattcatccgcagcacggtcctcaaggatgtactgcgcactgaccgggcccacccctactatgcggggcctgaggatggcccacatctacgggcgctgcacgacctgctcaccacctatgccgttacccacccacaggtgtcctactgccagggcatgagtgaccttgcctcacccatcctcgctgtcatggaccatgagggccatgcctttgtttgcttttgtggcatcatgaaacgcctggccgccaacttccaccctgacggccgcgccatggccaccaagtttgcacacttgaagctgttgctgcgacacgctgaccctgacttttatcaatacctgcaagaggcaggcgctgatgacctcttcttctgttaccgctggctgctgctggaactcaagcgtgagttcgccttcgacgatgccctccgcatgcttgaggtcacttggagttcgctgccccctgatcctcctgaacatgaggtagagctggttggaccccccagccaagtggcagacgctggttttggtggccacagggggtggcccgtgcgacagaggcacatgctgaggcctgctggtggaggaggtagtacctttgaagatgctgttgaccacctggccacagccagtcaggggcctggtggtggggggcgtctcctgagacaggccagcttggatggcctccagcaactcagggataacatgggctccaggagggaccctctggtccagctgccccacccagctgcccttatcagctccaagtccctctctgagcctttattgaactccccagacccactgctctcctccttttcccaccctgattccccatcttcctcatctccaccatccacccaggaggcctctcccactggtgatatggctgtaggatcccccttgatgcaagaggtaggctccccgaaagaccctggaaagtccctgccacctgtaccaccaatgggcctgcccccaccccaggagtttggccgggggaacccattcatgctgttcctctgcctggccatcctgctggagcaccgcgaccacatcatgcgcaatgggctggattataatgagctggccatgcactttgaccgccttgtgcgaaaacaccacctggggcgcgtcctgcgccgggctagggctctctttgctgattacctgcagtcagaggtgtgggactcagaggagggggctgaggccacagccgcatcttgatcaggctttctcaagccctccatcggccccaccagatctccattctttgccatgagggccaacacatgagaccccacctccctccctgcctgccagccctagacttgttggagcatagagcccttcctccccaggcctaagtatgtggagctctgctttggcactgccccgcagaggccacgcctatttattctgtttctgttgttttgtttttaacaactatactttgcacacatgaaggtcactgtggtttgtgtgtttctctgcctcctccctgggttttgctgtagatggagtcctcaggggccctttacctgatggaggggaaatacttcacttggtggagagaggctccagcttcccccttgtgatggggagagtggatgctgacaatcagttcccaaaggtgagcccaggtggagcactgcttgaggaaggcctgagtctgtttttttggtacatccatcggcctgtaagggtctgtattatggctgtgaatatatgttttcaggacagccccctggatgagagataagagagttcctggctcaaaaaaggacaagattctttactgagattgggaagtatgggctacttagaaacgttggagcagccacccctggcattccacatgtcaccatttctaggatcttggcctctctgtgaggtttatgcaccaatgctggcagccctgggcaggggcctcggcctcctttttgttttccacttcagacaggtaccgtgcagatgttaacaaggtttgagcgaggtgcatctcacacaagtgtgaaagcccaatcatcacattgttgaattacaaaaggatctagggctcctattcttgtcacttgctttggagccagtttgaaagactggcctagcccatgcctagcggccctaaactgggattccagctcacagcacctgtcttaaccatttcagcagtagaaaccacttatttaccttctccatctcactaatatggacaaacaacaagcactgataaaacgcaggccctaatagaattcacttcgttatttggaggataatgatcaaaaaaaggtcctttttcccactgacatgctcagagggtgggattctctcacaggccaggtgctgtcatccacaaaggatgggtgaaataactggggtcctcaggtcacggtctagccacaccagcttctcccaagtactaaccaggcttgaccctgcttagcttcagaggtcagacaagatctggcatgttcaggatggtatggctgtagaccaggctgggttctggccagagctgttgcactaggcaatgctgccagagatgaggaggcatcagggcagtcatcccttctgctgtttgccccaagaatgccatacaaacctggggatgacccttaaaagtctcccgtcacccccagtattggggggaagctgactattcctcagatgatagcccagtcacttgaagaacaggacaagactattctgtgtctagggggctcaagcactgtgtgtgggtctaacgaatgcattttgtggaaatgggctcagactccccaaagggccatccaacctatgggagtgtctggccttctgaggtcctgaaatgtctcttttgtcagtaaacagctaataccctc

SEQ ID NO: 311043 - DNA, 3602 bp, Homo sapiens
gaattccggtaagaagctctcacaaaatgtgagagcttcttgccgccagagttccgctcttttgctgtagatccccagatcacctcgctcgacgtgttgcagcacatcctcatccgagcctttgatttgagtgggaagaagaactttggcatcagctacctgggccgggaccggctaggacaggaagtttacctctcacttctatctgactgggacctcagcacagcctttgccactgcctccaaaccttacctgcaattgcgtgtagatattcggccctcggaggacagcccattgctagaagactgggacataatcagccccaaagatgtcattggctccgacgtgttgctggctgagaaacggtcatcactgacgactgccgccctgccctttacacagtccatcctcactcaggtgggccgtaccttgtctaaggtccaacaagtgctgagctggtcgtatggggaagatgtcaagcccttcaagccacccctgagcgatgctgagtttcacacgtacctgaaccacgagggccagctctcccgacccgaggagttgcgcctgcggatctatcatggcggtgtggagccctcgctgcgaaaggtggtgtggcggtacctgctgaacgtgtatccagatggactgacaggccgagagcggatggactacatgaaacgcaagagccgcgagtatgagcagctcaagagcgagtgggcccagcgagcgaaccctgaggacctggaattcatccgcagcacggtcctcaaggatgtactgcgcactgaccgggcccacccctactatgcggggcctgaggatggcccacatctacgggcgctgcacgacctgctcaccacctatgccgttacccacccacaggtgtcctactgccagggcatgagtgaccttgcctcacccatcctcgctgtcatggaccatgagggccatgcctttgtttgcttttgtggcatcatgaaacgcctggccgccaacttccaccctgacggccgcgccatggccaccaagtttgcacacttgaagctgttgctgcgacacgctgaccctgacttttatcaatacctgcaagaggcaggcgctgatgacctcttcttctgttaccgctggctgctgctggaactcaagcgtgagttcgccttcgacgatgccctccgcatgcttgaggtcacttggagttcgctgccccctgatcctcctgaacatgaggtagagctggttggaccccccagccaagtggcagacgctggttttggtggccacagggggtggcccgtgcgacagaggcacatgctgaggcctgctggtggaggaggtagtacctttgaagatgctgttgaccacctggccacagccagtcaggggcctggtggtggggggcgtctcctgagacaggccagcttggatggcctccagcaactcagggataacatgggctccaggagggaccctctggtccagctgccccacccagctgcccttatcagctccaagtccctctctgagcctttattgaactccccagacccactgctctcctccttttcccaccctgattccccatcttcctcatctccaccatccacccaggaggcctctcccactggtgatatggctgtaggatcccccttgatgcaagaggtaggctccccgaaagaccctggaaagtccctgccacctgtaccaccaatgggcctgcccccaccccaggagtttggccgggggaacccattcatgctgttcctctgcctggccatcctgctggagcaccgcgaccacatcatgcgcaatgggctggattataatgagctggccatgcactttgaccgccttgtgcgaaaacaccacctggggcgcgtcctgcgccgggctagggctctctttgctgattacctgcagtcagaggtgtgggactcagaggagggggctgaggccacagccgcatcttgatcaggctttctcaagccctccatcggccccaccagatctccattctttgccatgagggccaacacatgagaccccacctccctccctgcctgccagccctagacttgttggagcatagagcccttcctccccaggcctaagtatgtggagctctgctttggcactgccccgcagaggccacgcctatttattctgtttctgttgttttgtttttaacaactatactttgcacacatgaaggtcactgtggtttgtgtgtttctctgcctcctccctgggttttgctgtagatggagtcctcaggggccctttacctgatggaggggaaatacttcacttggtggagagaggctccagcttcccccttgtgatggggagagtggatgctgacaatcagttcccaaaggtgagcccaggtggagcactgcttgaggaaggcctgagtctgtttttttggtacatccatcggcctgtaagggtctgtattatggctgtgaatatatgttttcaggacagccccctggatgagagataagagagttcctggctcaaaaaaggacaagattctttactgagattgggaagtatgggctacttagaaacgttggagcagccacccctggcattccacatgtcaccatttctaggatcttggcctctctgtgaggtttatgcaccaatgctggcagccctgggcaggggcctcggcctcctttttgttttccacttcagacaggtaccgtgcagatgttaacaaggtttgagcgaggtgcatctcacacaagtgtgaaagcccaatcatcacattgttgaattacaaaaggatctagggctcctattcttgtcacttgctttggagccagtttgaaagactggcctagcccatgcctagcggccctaaactgggattccagctcacagcacctgtcttaaccatttcagcagtagaaaccacttatttaccttctccatctcactaatatggacaaacaacaagcactgataaaacgcaggccctaatagaattcacttcgttatttggaggataatgatcaaaaaaaggtcctttttcccactgacatgctcagagggtgggattctctcacaggccaggtgctgtcatccacaaaggatgggtgaaataactggggtcctcaggtcacggtctagccacaccagcttctcccaagtactaaccaggcttgaccctgcttagcttcagaggtcagacaagatctggcatgttcaggatggtatggctgtagaccaggctgggttctggccagagctgttgcactaggcaatgctgccagagatgaggaggcatcagggcagtcatcccttctgctgtttgccccaagaatgccatacaaacctggggatgacccttaaaagtctcccgtcacccccagtattggggggaagctgactattcctcagatgatagcccagtcacttgaagaacaggacaagactattctgtgtctagggggctcaagcactgtgtgtgggtctaacgaatgcattttgtggaaatgggctcagactccccaaagggccatccaacctatgggagtgtctggccttctgaggtcctgaaatgtctcttttgtcagtaaacagctaataccctc

SEQ ID NO: 311044 - DNA, 4247 bp, Homo sapiens
ctagaggatcccgctccacccgacggggtggggggcaacggtcagccgtcaccctgagacgggcggcggcgggatggcaacagcctccggggcctcggacttgtctggctccggagcgcccccgcccggtgtgggagctcaggcggcggcggccgctgaggaggaggagcgagaggtggtgcgggtccgagtcaagaaatgtgagagcttcttgccgccagagttccgctcttttgctgtagatccccagatcacctcgctcgacgtgttgcagcacatcctcatccgagcctttgatttgagtgggaagaagaactttggcatcagctacctgggccgggaccggctaggacaggaagtttacctctcacttctatctgactgggacctcagcacagcctttgccactgcctccaaaccttacctgcaattgcgtgtagatattcggccctcggaggacagcccattgctagaagactgggacataatcagccccaaagatgtcattggctccgacgtgttgctggctgagaaacggtcatcactgacgactgccgccctgccctttacacagtccatcctcactcaggtgggccgtaccttgtctaaggtccaacaagtgctgagctggtcgtatggggaagatgtcaagcccttcaagccacccctgagcgatgctgagtttcacacgtacctgaaccacgagggccagctctcccgacccgaggagttgcgcctgcggatctatcatggcggtgtggagccctcgctgcgaaaggtggtgtggcggtacctgctgaacgtgtatccagatggactgacaggccgagagcggatggactacatgaaacgcaagagccgcgagtatgagcagctcaagagcgagtgggcccagcgagcgaaccctgaggacctggaattcatccgcagcacggtcctcaaggatgtactgcgcactgaccgggcccacccctactatgcggggcctgaggatggcccacatctacgggcgctgcacgacctgctcaccacctatgccgttacccacccacaggtgtcctactgccagggcatgagtgaccttgcctcacccatcctcgctgtcatggaccatgagggccatgcctttgtttgcttttgtggcatcatgaaacgcctggccgccaacttccaccctgacggccgcgccatggccaccaagtttgcacacttgaagctgttgctgcgacacgctgaccctgacttttatcaatacctgcaagaggcaggcgctgatgacctcttcttctgttaccgctggctgctgctggaactcaagcgtgagttcgccttcgacgatgccctccgcatgcttgaggtcacttggagttcgctgccccctgatcctcctgaacatgaggtagagctggttggaccccccagccaagtggcagacgctggttttggtggccacagggggtggcccgtgcgacagaggcacatgctgaggcctgctggtggaggaggtagtacctttgaagatgctgttgaccacctggccacagccagtcaggggcctggtggtggggggcgtctcctgagacaggccagcttggatggcctccagcaactcagggataacatgggctccaggagggaccctctggtccagctgccccacccagctgcccttatcagctccaagtccctctctgagcctttattgaactccccagacccactgctctcctccttttcccaccctgattccccatcttcctcatctccaccatccacccaggaggcctctcccactggtgatatggctgtaggatcccccttgatgcaagaggtaggctccccgaaagaccctggaaagtccctgccacctgtaccaccaatgggcctgcccccaccccaggagtttggccgggggaacccattcatgctgttcctctgcctggccatcctgctggagcaccgcgaccacatcatgcgcaatgggctggattataatgagctggccatgcactttgaccgccttgtgcgaaaacaccacctggggcgcgtcctgcgccgggctagggctctctttgctgattacctgcagtcagaggtgtgggactcagaggagggggctgaggccacagccgcatcttgatcaggctttctcaagccctccatcggccccaccagatctccattctttgccatgagggccaacacatgagaccccacctccctccctgcctgccagccctagacttgttggagcatagagcccttcctccccaggcctaagtatgtggagctctgctttggcactgccccgcagaggccacgcctatttattctgtttctgttgttttgtttttaacaactatactttgcacacatgaaggtcactgtggtttgtgtgtttctctgcctcctccctgggttttgctgtagatggagtcctcaggggccctttacctgatggaggggaaatacttcacttggtggagagaggctccagcttcccccttgtgatggggagagtggatgctgacaatcagttcccaaaggtgagcccaggtggagcactgcttgaggaaggcctgagtctgtttttttggtacatccatcggcctgtaagggtctgtattatggctgtgaatatatgttttcaggacagccccctggatgagagataagagagttcctggctcaaaaaaggacaagattctttactgagattgggaagtatgggctacttagaaacgttggagcagccacccctggcattccacatgtcaccatttctaggatcttggcctctctgtgaggtttatgcaccaatgctggcagccctgggcaggggcctcggcctcctttttgttttccacttcagacaggtaccgtgcagatgttaacaaggtttgagcgaggtgcatctcacacaagtgtgaaagcccaatcatcacattgttgaattacaaaaggatctagggctcctattcttgtcacttgctttggagccagtttgaaagactggcctagcccatgcctagcggccctaaactgggattccagctcacagcacctgtcttaaccatttcagcagtagaaaccacttatttaccttctccatctcactaatatggacaaacaacaagcactgataaaacgcaggccctaatagaattcacttcgttatttggaggataatgatcaaaaaaaggtcctttttcccactgacatgctcagagggtgggattctctcacaggccaggtgctgtcatccacaaaggatgggtgaaataactggggtcctcaggtcacggtctagccacaccagcttctcccaagtactaaccaggcttgaccctgcttagcttcagaggtcagacaagatctggcatgttcaggatggtatggctgtagaccaggctgggttctggccagagctgttgcactaggcaatgctgccagagatgaggaggcatcagggcagtcatcccttctgctgtttgccccaagaatgccatacaaacctggggatgacccttaaaagtctcccgtcacccccagtattggggggaagctgactattcctcagatgatagcccagtcacttgaagaacaggacaagactattctgtgtctagggggctcaagcactgtgtgtgggtctaacgaatgcattttgtggaaatgggctcagactccccaaagggccatccaacctatgggagtgtctggccttctgaggtcctgaaatgtctcttttgtcagtaaacagctaataccctcaaaaaaagccacaaccaaaaccaaaagcacacacaacacaacacacacccccgcccaacaagacaccaacgaacaacaccaaaaaaccgcgggcgccgcccccacaaagcatctacccgcggggcgcggccccacaactcacgcgccgcccccccgcttcgtcgggcagccagaggcggccccccagtgacgcgaggccccatacacacaaagcagcaggcgcacggccgcgaccacctccaccaaccaacgccgcccgagggagaccaaccacgcccacacgcagcccatcatcgggccaagcacaccccaccatatcctcgggcgggcgcacactccggcgcacacaccccagcacggacaacgcgcccgcagcatacaaaacgcgcacggcgcgttgtgcgtacccacccccaacctagccccggcagacacagcgccaccgacagcagcaacattacaccggcacgcgc

SEQ ID NO: 311045 - DNA, 3823 bp, Homo sapiens
ctagaggatcccgctccacccgacggggtggggggcaacggtcagccgtcaccctgagacgggcggcggcgggatggcaacagcctccggggcctcggacttgtctggctccggagcgcccccgcccggtgtgggagctcaggcggcggcggccgctgaggaggaggagcgagaggtggtgcgggtccgagtcaagcatggtgatggggcccctggtggcctaccccatgtcttctctccccagaaaatgtgagagcttcttgccgccagagttccgctcttttgctgtagatccccagatcacctcgctcgacgtgttgcagcacatcctcatccgagcctttgatttgagtgggaagaagaactttggcatcagctacctgggccgggaccggctaggacaggaagtttacctctcacttctatctgactgggacctcagcacagcctttgccactgcctccaaaccttacctgcaattgcgtgtagatattcggccctcggaggacagcccattgctagaagactgggacataatcagccccaaagatgtcattggctccgacgtgttgctggctgagaaacggtcatcactgacgactgccgccctgccctttacacagtccatcctcactcaggtgggccgtaccttgtctaaggtccaacaagtgctgagctggtcgtatggggaagatgtcaagcccttcaagccacccctgagcgatgctgagtttcacacgtacctgaaccacgagggccagctctcccgacccgaggagttgcgcctgcggatctatcatggcggtgtggagccctcgctgcgaaaggtggtgtggcggtacctgctgaacgtgtatccagatggactgacaggccgagagcggatggactacatgaaacgcaagagccgcgagtatgagcagctcaagagcgagtgggcccagcgagcgaaccctgaggacctggaattcatccgcagcacggtcctcaaggatgtactgcgcactgaccgggcccacccctactatgcggggcctgaggatggcccacatctacgggcgctgcacgacctgctcaccacctatgccgttacccacccacaggtgtcctactgccagggcatgagtgaccttgcctcacccatcctcgctgtcatggaccatgagggccatgcctttgtttgcttttgtggcatcatgaaacgcctggccgccaacttccaccctgacggccgcgccatggccaccaagtttgcacacttgaagctgttgctgcgacacgctgaccctgacttttatcaatacctgcaagaggcaggcgctgatgacctcttcttctgttaccgctggctgctgctggaactcaagcgtgagttcgccttcgacgatgccctccgcatgcttgaggtcacttggagttcgctgccccctgatcctcctgaacatgaggtagagctggttggaccccccagccaagtggcagacgctggttttggtggccacagggggtggcccgtgcgacagaggcacatgctgaggcctgctggtggaggaggtagtacctttgaagatgctgttgaccacctggccacagccagtcaggggcctggtggtggggggcgtctcctgagacaggccagcttggatggcctccagcaactcagggataacatgggctccaggagggaccctctggtccagctgccccacccagctgcccttatcagctccaagtccctctctgagcctttattgaactccccagacccactgctctcctccttttcccaccctgattccccatcttcctcatctccaccatccacccaggaggcctctcccactggtgatatggctgtaggatcccccttgatgcaagaggtaggctccccgaaagaccctggaaagtccctgccacctgtaccaccaatgggcctgcccccaccccaggagtttggccgggggaacccattcatgctgttcctctgcctggccatcctgctggagcaccgcgaccacatcatgcgcaatgggctggattataatgagctggccatgcactttgaccgccttgtgcgaaaacaccacctggggcgcgtcctgcgccgggctagggctctctttgctgattacctgcagtcagaggtgtgggactcagaggagggggctgaggccacagccgcatcttgatcaggctttctcaagccctccatcggccccaccagatctccattctttgccatgagggccaacacatgagaccccacctccctccctgcctgccagccctagacttgttggagcatagagcccttcctccccaggcctaagtatgtggagctctgctttggcactgccccgcagaggccacgcctatttattctgtttctgttgttttgtttttaacaactatactttgcacacatgaaggtcactgtggtttgtgtgtttctctgcctcctccctgggttttgctgtagatggagtcctcaggggccctttacctgatggaggggaaatacttcacttggtggagagaggctccagcttcccccttgtgatggggagagtggatgctgacaatcagttcccaaaggtgagcccaggtggagcactgcttgaggaaggcctgagtctgtttttttggtacatccatcggcctgtaagggtctgtattatggctgtgaatatatgttttcaggacagccccctggatgagagataagagagttcctggctcaaaaaaggacaagattctttactgagattgggaagtatgggctacttagaaacgttggagcagccacccctggcattccacatgtcaccatttctaggatcttggcctctctgtgaggtttatgcaccaatgctggcagccctgggcaggggcctcggcctcctttttgttttccacttcagacaggtaccgtgcagatgttaacaaggtttgagcgaggtgcatctcacacaagtgtgaaagcccaatcatcacattgttgaattacaaaaggatctagggctcctattcttgtcacttgctttggagccagtttgaaagactggcctagcccatgcctagcggccctaaactgggattccagctcacagcacctgtcttaaccatttcagcagtagaaaccacttatttaccttctccatctcactaatatggacaaacaacaagcactgataaaacgcaggccctaatagaattcacttcgttatttggaggataatgatcaaaaaaaggtcctttttcccactgacatgctcagagggtgggattctctcacaggccaggtgctgtcatccacaaaggatgggtgaaataactggggtcctcaggtcacggtctagccacaccagcttctcccaagtactaaccaggcttgaccctgcttagcttcagaggtcagacaagatctggcatgttcaggatggtatggctgtagaccaggctgggttctggccagagctgttgcactaggcaatgctgccagagatgaggaggcatcagggcagtcatcccttctgctgtttgccccaagaatgccatacaaacctggggatgacccttaaaagtctcccgtcacccccagtattggggggaagctgactattcctcagatgatagcccagtcacttgaagaacaggacaagactattctgtgtctagggggctcaagcactgtgtgtgggtctaacgaatgcattttgtggaaatgggctcagactccccaaagggccatccaacctatgggagtgtctggccttctgaggtcctgaaatgtctcttttgtcagtaaacagctaataccctc

SEQ ID NO: 311046 - DNA, 3619 bp, Homo sapiens
ctagaggatcccgctccacccgacggggtggggggcaacggtcagccgtcaccctgagacgggcggcggcgggatggcaacagcctccggggcctcggacttgtctggctccggagcgcccccgcccggtgtgggagctcaggcggcggcggccgctgaggaggaggagcgagaggtggtgcgggtccgagtcaagaaatgtgagagcttcttgccgccagagttccgctcttttgctgtagatccccagatcacctcgctcgacgtgttgcagcacatcctcatccgagcctttgatttgagtgggcccattgctagaagactgggacataatcagccccaaagatgtcattggctccgacgtgttgctggctgagaaacggtcatcactgacgactgccgccctgccctttacacagtccatcctcactcaggtgggccgtaccttgtctaaggtccaacaagtgctgagctggtcgtatggggaagatgtcaagcccttcaagccacccctgagcgatgctgagtttcacacgtacctgaaccacgagggccagctctcccgacccgaggagttgcgcctgcggatctatcatggcggtgtggagccctcgctgcgaaaggtggtgtggcggtacctgctgaacgtgtatccagatggactgacaggccgagagcggatggactacatgaaacgcaagagccgcgagtatgagcagctcaagagcgagtgggcccagcgagcgaaccctgaggacctggaattcatccgcagcacggtcctcaaggatgtactgcgcactgaccgggcccacccctactatgcggggcctgaggatggcccacatctacgggcgctgcacgacctgctcaccacctatgccgttacccacccacaggtgtcctactgccagggcatgagtgaccttgcctcacccatcctcgctgtcatggaccatgagggccatgcctttgtttgcttttgtggcatcatgaaacgcctggccgccaacttccaccctgacggccgcgccatggccaccaagtttgcacacttgaagctgttgctgcgacacgctgaccctgacttttatcaatacctgcaagaggcaggcgctgatgacctcttcttctgttaccgctggctgctgctggaactcaagcgtgagttcgccttcgacgatgccctccgcatgcttgaggtcacttggagttcgctgccccctgatcctcctgaacatgaggtagagctggttggaccccccagccaagtggcagacgctggttttggtggccacagggggtggcccgtgcgacagaggcacatgctgaggcctgctggtggaggaggtagtacctttgaagatgctgttgaccacctggccacagccagtcaggggcctggtggtggggggcgtctcctgagacaggccagcttggatggcctccagcaactcagggataacatgggctccaggagggaccctctggtccagctgccccacccagctgcccttatcagctccaagtccctctctgagcctttattgaactccccagacccactgctctcctccttttcccaccctgattccccatcttcctcatctccaccatccacccaggaggcctctcccactggtgatatggctgtaggatcccccttgatgcaagaggtaggctccccgaaagaccctggaaagtccctgccacctgtaccaccaatgggcctgcccccaccccaggagtttggccgggggaacccattcatgctgttcctctgcctggccatcctgctggagcaccgcgaccacatcatgcgcaatgggctggattataatgagctggccatgcactttgaccgccttgtgcgaaaacaccacctggggcgcgtcctgcgccgggctagggctctctttgctgattacctgcagtcagaggtgtgggactcagaggagggggctgaggccacagccgcatcttgatcaggctttctcaagccctccatcggccccaccagatctccattctttgccatgagggccaacacatgagaccccacctccctccctgcctgccagccctagacttgttggagcatagagcccttcctccccaggcctaagtatgtggagctctgctttggcactgccccgcagaggccacgcctatttattctgtttctgttgttttgtttttaacaactatactttgcacacatgaaggtcactgtggtttgtgtgtttctctgcctcctccctgggttttgctgtagatggagtcctcaggggccctttacctgatggaggggaaatacttcacttggtggagagaggctccagcttcccccttgtgatggggagagtggatgctgacaatcagttcccaaaggtgagcccaggtggagcactgcttgaggaaggcctgagtctgtttttttggtacatccatcggcctgtaagggtctgtattatggctgtgaatatatgttttcaggacagccccctggatgagagataagagagttcctggctcaaaaaaggacaagattctttactgagattgggaagtatgggctacttagaaacgttggagcagccacccctggcattccacatgtcaccatttctaggatcttggcctctctgtgaggtttatgcaccaatgctggcagccctgggcaggggcctcggcctcctttttgttttccacttcagacaggtaccgtgcagatgttaacaaggtttgagcgaggtgcatctcacacaagtgtgaaagcccaatcatcacattgttgaattacaaaaggatctagggctcctattcttgtcacttgctttggagccagtttgaaagactggcctagcccatgcctagcggccctaaactgggattccagctcacagcacctgtcttaaccatttcagcagtagaaaccacttatttaccttctccatctcactaatatggacaaacaacaagcactgataaaacgcaggccctaatagaattcacttcgttatttggaggataatgatcaaaaaaaggtcctttttcccactgacatgctcagagggtgggattctctcacaggccaggtgctgtcatccacaaaggatgggtgaaataactggggtcctcaggtcacggtctagccacaccagcttctcccaagtactaaccaggcttgaccctgcttagcttcagaggtcagacaagatctggcatgttcaggatggtatggctgtagaccaggctgggttctggccagagctgttgcactaggcaatgctgccagagatgaggaggcatcagggcagtcatcccttctgctgtttgccccaagaatgccatacaaacctggggatgacccttaaaagtctcccgtcacccccagtattggggggaagctgactattcctcagatgatagcccagtcacttgaagaacaggacaagactattctgtgtctagggggctcaagcactgtgtgtgggtctaacgaatgcattttgtggaaatgggctcagactccccaaagggccatccaacctatgggagtgtctggccttctgaggtcctgaaatgtctcttttgtcagtaaacagctaataccctc

SEQ ID NO: 311047 - DNA, 3509 bp, Homo sapiens
ctagaggatcccgctccacccgacggggtggggggcaacggtcagccgtcaccctgagacgggcggcggcgggatggcaacagcctccggggcctcggacttgtctggctccggagcgcccccgcccggtgtgggagctcaggcggcggcggccgctgaggaggaggagcgagaggtggtgcgggtccgagtcaaggcccattgctagaagactgggacataatcagccccaaagatgtcattggctccgacgtgttgctggctgagaaacggtcatcactgacgactgccgccctgccctttacacagtccatcctcactcaggtgggccgtaccttgtctaaggtccaacaagtgctgagctggtcgtatggggaagatgtcaagcccttcaagccacccctgagcgatgctgagtttcacacgtacctgaaccacgagggccagctctcccgacccgaggagttgcgcctgcggatctatcatggcggtgtggagccctcgctgcgaaaggtggtgtggcggtacctgctgaacgtgtatccagatggactgacaggccgagagcggatggactacatgaaacgcaagagccgcgagtatgagcagctcaagagcgagtgggcccagcgagcgaaccctgaggacctggaattcatccgcagcacggtcctcaaggatgtactgcgcactgaccgggcccacccctactatgcggggcctgaggatggcccacatctacgggcgctgcacgacctgctcaccacctatgccgttacccacccacaggtgtcctactgccagggcatgagtgaccttgcctcacccatcctcgctgtcatggaccatgagggccatgcctttgtttgcttttgtggcatcatgaaacgcctggccgccaacttccaccctgacggccgcgccatggccaccaagtttgcacacttgaagctgttgctgcgacacgctgaccctgacttttatcaatacctgcaagaggcaggcgctgatgacctcttcttctgttaccgctggctgctgctggaactcaagcgtgagttcgccttcgacgatgccctccgcatgcttgaggtcacttggagttcgctgccccctgatcctcctgaacatgaggtagagctggttggaccccccagccaagtggcagacgctggttttggtggccacagggggtggcccgtgcgacagaggcacatgctgaggcctgctggtggaggaggtagtacctttgaagatgctgttgaccacctggccacagccagtcaggggcctggtggtggggggcgtctcctgagacaggccagcttggatggcctccagcaactcagggataacatgggctccaggagggaccctctggtccagctgccccacccagctgcccttatcagctccaagtccctctctgagcctttattgaactccccagacccactgctctcctccttttcccaccctgattccccatcttcctcatctccaccatccacccaggaggcctctcccactggtgatatggctgtaggatcccccttgatgcaagaggtaggctccccgaaagaccctggaaagtccctgccacctgtaccaccaatgggcctgcccccaccccaggagtttggccgggggaacccattcatgctgttcctctgcctggccatcctgctggagcaccgcgaccacatcatgcgcaatgggctggattataatgagctggccatgcactttgaccgccttgtgcgaaaacaccacctggggcgcgtcctgcgccgggctagggctctctttgctgattacctgcagtcagaggtgtgggactcagaggagggggctgaggccacagccgcatcttgatcaggctttctcaagccctccatcggccccaccagatctccattctttgccatgagggccaacacatgagaccccacctccctccctgcctgccagccctagacttgttggagcatagagcccttcctccccaggcctaagtatgtggagctctgctttggcactgccccgcagaggccacgcctatttattctgtttctgttgttttgtttttaacaactatactttgcacacatgaaggtcactgtggtttgtgtgtttctctgcctcctccctgggttttgctgtagatggagtcctcaggggccctttacctgatggaggggaaatacttcacttggtggagagaggctccagcttcccccttgtgatggggagagtggatgctgacaatcagttcccaaaggtgagcccaggtggagcactgcttgaggaaggcctgagtctgtttttttggtacatccatcggcctgtaagggtctgtattatggctgtgaatatatgttttcaggacagccccctggatgagagataagagagttcctggctcaaaaaaggacaagattctttactgagattgggaagtatgggctacttagaaacgttggagcagccacccctggcattccacatgtcaccatttctaggatcttggcctctctgtgaggtttatgcaccaatgctggcagccctgggcaggggcctcggcctcctttttgttttccacttcagacaggtaccgtgcagatgttaacaaggtttgagcgaggtgcatctcacacaagtgtgaaagcccaatcatcacattgttgaattacaaaaggatctagggctcctattcttgtcacttgctttggagccagtttgaaagactggcctagcccatgcctagcggccctaaactgggattccagctcacagcacctgtcttaaccatttcagcagtagaaaccacttatttaccttctccatctcactaatatggacaaacaacaagcactgataaaacgcaggccctaatagaattcacttcgttatttggaggataatgatcaaaaaaaggtcctttttcccactgacatgctcagagggtgggattctctcacaggccaggtgctgtcatccacaaaggatgggtgaaataactggggtcctcaggtcacggtctagccacaccagcttctcccaagtactaaccaggcttgaccctgcttagcttcagaggtcagacaagatctggcatgttcaggatggtatggctgtagaccaggctgggttctggccagagctgttgcactaggcaatgctgccagagatgaggaggcatcagggcagtcatcccttctgctgtttgccccaagaatgccatacaaacctggggatgacccttaaaagtctcccgtcacccccagtattggggggaagctgactattcctcagatgatagcccagtcacttgaagaacaggacaagactattctgtgtctagggggctcaagcactgtgtgtgggtctaacgaatgcattttgtggaaatgggctcagactccccaaagggccatccaacctatgggagtgtctggccttctgaggtcctgaaatgtctcttttgtcagtaaacagctaataccctc

SEQ ID NO: 311048 - DNA, 3580 bp, Homo sapiens
gaattccggtaagaagctctcacaaaatgtgagagcttcttgccgccagagttccgctcttttgctgtagatccccagatcacctcgctcgacgtgttgcagcacatcctcatccgagcctttgatttgagtgggcccattgctagaagactgggacataatcagccccaaagatgtcattggctccgacgtgttgctggctgagaaacggtcatcactgacgactgccgccctgccctttacacagtccatcctcactcaggtgttttcagggaccctagggacccagctgtggttggagggcagagccttcctggcaccctggttctgagcatgctggttggcatctgcccctagtccacacagctgatggtggcctccctccctcctcataggtgggccgtaccttgtctaaggtccaacaagtgctgagctggtcgtatggggaagatgtcaagcccttcaagccacccctgagcgatgctgagtttcacacgtacctgaaccacgagggccagctctcccgacccgaggagttgcgcctgcggatctatcatggcggtgtggagccctcgctgcgaaaggtggtgtggcggtacctgctgaacgtgtatccagatggactgacaggccgagagcggatggactacatgaaacgcaagagccgcgagtatgagcagctcaagagcgagtgggcccagcgagcgaaccctgaggacctggaattcatccgcagcacggtcctcaaggatgtactgcgcactgaccgggcccacccctactatgcggggcctgaggatggcccacatctacgggcgctgcacgacctgctcaccacctatgccgttacccacccacaggtgtcctactgccagggcatgagtgaccttgcctcacccatcctcgctgtcatggaccatgagggccatgcctttgtttgcttttgtggcatcatgaaacgcctggccgccaacttccaccctgacggccgcgccatggccaccaagtttgcacacttgaagctgttgctgcgacacgctgaccctgacttttatcaatacctgcaagaggcaggcgctgatgacctcttcttctgttaccgctggctgctgctggaactcaagcgtgagttcgccttcgacgatgccctccgcatgcttgaggtcacttggagttcgctgccccctgatcctcctgaacatgaggtagagctggttggaccccccagccaagtggcagacgctggttttggtggccacagggggtggcccgtgcgacagaggcacatgctgaggcctgctggtggaggaggtagtacctttgaagatgctgttgaccacctggccacagccagtcaggggcctggtggtggggggcgtctcctgagacaggccagcttggatggcctccagcaactcagggataacatgggctccaggagggaccctctggtccagctgccccacccagctgcccttatcagctccaagtccctctctgagcctttattgaactccccagacccactgctctcctccttttcccaccctgattccccatcttcctcatctccaccatccacccaggaggcctctcccactggtgatatggctgtaggatcccccttgatgcaagaggtaggctccccgaaagaccctggaaagtccctgccacctgtaccaccaatgggcctgcccccaccccaggagtttggccgggggaacccattcatgctgttcctctgcctggccatcctgctggagcaccgcgaccacatcatgcgcaatgggctggattataatgagctggccatgcactttgaccgccttgtgcgaaaacaccacctggggcgcgtcctgcgccgggctagggctctctttgctgattacctgcagtcagaggtgtgggactcagaggagggggctgaggccacagccgcatcttgatcaggctttctcaagccctccatcggccccaccagatctccattctttgccatgagggccaacacatgagaccccacctccctccctgcctgccagccctagacttgttggagcatagagcccttcctccccaggcctaagtatgtggagctctgctttggcactgccccgcagaggccacgcctatttattctgtttctgttgttttgtttttaacaactatactttgcacacatgaaggtcactgtggtttgtgtgtttctctgcctcctccctgggttttgctgtagatggagtcctcaggggccctttacctgatggaggggaaatacttcacttggtggagagaggctccagcttcccccttgtgatggggagagtggatgctgacaatcagttcccaaaggtgagcccaggtggagcactgcttgaggaaggcctgagtctgtttttttggtacatccatcggcctgtaagggtctgtattatggctgtgaatatatgttttcaggacagccccctggatgagagataagagagttcctggctcaaaaaaggacaagattctttactgagattgggaagtatgggctacttagaaacgttggagcagccacccctggcattccacatgtcaccatttctaggatcttggcctctctgtgaggtttatgcaccaatgctggcagccctgggcaggggcctcggcctcctttttgttttccacttcagacaggtaccgtgcagatgttaacaaggtttgagcgaggtgcatctcacacaagtgtgaaagcccaatcatcacattgttgaattacaaaaggatctagggctcctattcttgtcacttgctttggagccagtttgaaagactggcctagcccatgcctagcggccctaaactgggattccagctcacagcacctgtcttaaccatttcagcagtagaaaccacttatttaccttctccatctcactaatatggacaaacaacaagcactgataaaacgcaggccctaatagaattcacttcgttatttggaggataatgatcaaaaaaaggtcctttttcccactgacatgctcagagggtgggattctctcacaggccaggtgctgtcatccacaaaggatgggtgaaataactggggtcctcaggtcacggtctagccacaccagcttctcccaagtactaaccaggcttgaccctgcttagcttcagaggtcagacaagatctggcatgttcaggatggtatggctgtagaccaggctgggttctggccagagctgttgcactaggcaatgctgccagagatgaggaggcatcagggcagtcatcccttctgctgtttgccccaagaatgccatacaaacctggggatgacccttaaaagtctcccgtcacccccagtattggggggaagctgactattcctcagatgatagcccagtcacttgaagaacaggacaagactattctgtgtctagggggctcaagcactgtgtgtgggtctaacgaatgcattttgtggaaatgggctcagactccccaaagggccatccaacctatgggagtgtctggccttctgaggtcctgaaatgtctcttttgtcagtaaacagctaataccctc

SEQ ID NO: 311049 - DNA, 714 bp, Homo sapiens
ctagaggatcccgctccacccgacggggtggggggcaacggtcagccgtcaccctgagacgggcggcggcgggatggcaacagcctccggggcctcggacttgtctggctccggagcgcccccgcccggtgtgggagctcaggcggcggcggccgctgaggaggaggagcgagaggtggtgcgggtccgagtcaagaaatgtgagagcttcttgccgccagagttccgctcttttgctgtagatccccagatcacctcgctcgacgtgttgcagcacatcctcatccgagcctttgatttgagtgggaagaagaactttggcatcagctacctgggccgggaccggctaggacaggaagtttacctctcacttctatctgactgggacctcagcacagcctttgccactgcctccaaaccttacctgcaattgcgtgtagatattcggccctcggaggacagcccattgctagaagactgggacataatcagccccaaagatgtcattggctccgacgtgttgctggctgagaaacggtcatcactgacgactgccgccctgccctttacacagtccatcctcactcaggtgggccgtaccttgtctaaggtccaacaagtgctgagctggtcgtatggggaagatgtcaagcccttcaagccaccccgtcgggtggagcggtacgagctcgatcgtacttaggggggttcaca

SEQ ID NO: 311050 - DNA, 569 bp, Homo sapiens
ctagaggatcccgctccacccgacggggtggggggcaacggtcagccgtcaccctgagacgggcggcggcgggatggcaacagcctccggggcctcggacttgtctggctccggagcgcccccgcccggtgtgggagctcaggcggcggcggccgctgaggaggaggagcgagaggtggtgcgggtccgagtcaagaaatgtgagagcttcttgccgccagagttccgctcttttgctgtagatccccagatcacctcgctcgacgtgttgcagcacatcctcatccgagcctttgatttgagtgggtgagtgggaagatgctggggactggccagtgggccaccgacctctacagtggctatctggcctttgtttggtagggtttttgtttattttactactacaaataatcccacagtgaacagccacgtatgcatgtcttggagcacagtagtctacttttgtctgtggttttgctttctgcagtttcagttacccatggtcaacctcagtctgcaaatattacatacaataagatattttgagagagagagagagaccacattca

SEQ ID NO: 311051 - DNA, 369 bp, Homo sapiens
gaagcaggggagtgttgtaggtagatgtgttagattggttacagcaccatagaggactgatttaacaggagccagactggacacggtgattctggcaaccatagttgaagggatatagaagaaggattgggggcctgaactcttgcagtagcctcctcctcactggaccctgtggtccagaacacctgccttgatctggcccctggcacctctctgactttgccttctaccactctgcacctcactcttcagcatggtgatggggcccctggtggcctaccccatgtcttctctccccagaaaatgtgagagcttcttgccgccagagttccgctcttttgctgtagatccccagatcacctcgctcga

SEQ ID NO: 311052 - DNA, 1928 bp, Homo sapiens
ggcacgaggctttacatgagtttttaaatcctattttaaaacataaaagaaacaaatccatcattggccgcacagccccagccaccgccccccaaccagggagcaagaggagacgcctgggtcctgttccgcacgcggatttgctggtctgtttaactggtgtccattctcgcattataggcgtccagctgggcatccagctcctctgccgaaagctgctgctttgaattcctgccggcacctctgcctcttccacgggcgcctccgcgggtgcctctccgggtgcctccaccaccaccaaaacctccagcgccacggtttctagtcatgccacctctgtttacgctctgtgcaggcctccgctgtgcgtcaatctgtgacgtgacaagctgaatgtactgaagatggcggctgctgtaggacggttgctccgagcgtcggttgcccgacatgtgagtgccattccttggggcatttctgccactgcagccctcaggcctgctgcatgtggaagaacgagcttgacaaatttattgtgttctggttccagtcaagcaaaattattcagcaccagttcctcatgccatgcacctgctgtcacccagcatgcaccctattttaagggtacagccgttgtcaatggagagttcaaagacctaagccttgatgactttaaggggaaatatttggtgcttttcttctatcctttggatttcacctttgtgtgtcctacagaaattgttgcttttagtgacaaagctaacgaatttcacgatgtgaactgtgaagttgtcgcagtctcagtggattcccactttagccatcttgcctggataaatacaccaagaaagaatggtggtttgggccacatgaacatcgcactcttgtcagacttaactaagcagatttcccgagactacggtgtgctgttagaaggttctggtcttgcactaagaggtctcttcataattgaccccaatggagtcatcaagcatttgagcgtcaacgatctcccagtgggccgaagcgtggaagaaaccctccgcttggtgaaggcgtccagtatgttgaaccctggggaagtctgccgaatggacatcaagccaagtccagctgcttccaaagagtactttcagaaggtaaatcagtagatcacccatgtgtatctgcaccttctcaactgagagaagaaccacagttgaaacctgcttttatcattttcaagatggttatttgtagaaggcaaggaaccaattatgcttgtattcataagtattactctaaatgttttgtttttgtaattctggctaagaccttttaaacatggttagttgctagtacaaggaatcctttattggtaacatcttggtggctggctagctagtttctacagaacataatttgcctctatagaaggctattcttagatcatgtctcaatggaaacactcttctttcttagccttacttgaatcttgcctataataaagtagagcaacacacattgaaagcttctgatcaacggtcctgaaattttcatcttgaatgtctttgtattaaactgaattttcttttaagctaacaaagatcataattttcaatgattagccgtgtaactcctgcaatgaatgtttatgtgattgaagcaaatgtgaatcgtattattttaaaaagtggcagagtgacttaactgatcatgcatgatccctcatccctgaaattgagtttatgtagtcattttacttattttattcattagctaactttgtctatgtatatttctagatattgattagtgtaatcgattataaaggatatttatcaaatccagggattgcattttgaaattataattattttctttgctgaagtattcattgtaaaacatacaaaataaacatattttaaaacatttgcattttaccacca

SEQ ID NO: 311053 - DNA, 913 bp, Homo sapiens
  misc_feature (12)..(12): n is a, c, g, or t
  misc_feature (731)..(731): n is a, c, g, or t
actgtaggctangtacgggctggtgggcactgaagatggcggctgctgtaggacggttgctccgagcgtcggttgcccgacatgtgagtgccattccttggggcatttctgccactgcagccctcaggcctgctgcatgtggaagaacgagcttgacaaatttattgtgttctggttccagtcaagcaaaattattcagcaccagttcctcatgccatgcacctgctgtcacccagcatgcaccctattttaagggtacagccgttgtcaatggagagttcaaagacctaagccttgatgactttaaggggaaatatttggtgcttttcttctatcctttggatttcacctttgtgtgtcctacagaaattgttgcttttagtgacaaagctaacgaatttcacgatgtgaactgtgaagttgtcgcagtctcagtggattcccactttagccatcttgcctggataaatacaccaagaaagaatggtggtttgggccacatgaacatcgcactcttgtcagacttaactaagcagatttcccgagactacggtgtgctgttagaaggttctggtcttgcactaagaggtctcttcataattgaccccaatggagtcatcaagcatttgagcgtcaacgatctcccagtgggccgaagcgtggaagaaaccctccgcttggtgaaggcgtccagtatgttgaaccctggggaagtctgccgaatggacgancaagcaagtccagtgttccaagagtattcacaggactcgggatcaccgtgtttgctttcactgggagaacagtgacggtacatacaagattgagagggacgaaggttaataaaaggggagtgggaaaaagtgggcaaactggcggggatagacatacacacagatcgaacacatatatattg

SEQ ID NO: 311054 - DNA, 1375 bp, Homo sapiens
aaactttaaagagattatcaaacgaatgcctaggtctttcagaattgtcaatggccagagaaagggtactggctatttttctcctacggtccctttccctatgagaactcactaattttgcagttacctctgtacccgttttaatattgagattaacaagagagagaagctgagtctggcttataagataaagacttttgggagtctatgggccctgctctgtcccagctctgcctcaccttctattggtggacttcagctggctgcaccctctgggaacagtttcacctcaaaccccaggctcccagtgcctgacccagggagggagaagcatcttttatcctgagttttctctaacctgccttttccatgagtgattgatacctgaaatttccacatccttttaagacagactgttaaaacctgtaggttaaataaccggacacagtgacacacacctatagtcacgctacttgggagtctgaggtgggaggatcagttgagccagaagttcgaggctgcagcctgctgtgatcacacctgagaagagcactgcactccagcgtgggcaatacagtgagaccctatatttaaaccaaacaaccaaaaaaacttctaggctaaacatatctgcatctgtcacagtaacaccaacacagaagataaacacagaccactgtggtagcgtggttcatctcattacatgctgctacatgattaaaagtgatgggcatggttttctgttttgcatagacttagagcctgtacattctttctatgaagatttttcccgtgggatttccccccatttacccaataattcattcataataaacagttgttgaacctagataaaatacacctctgtctcttcccatttgcctataagtttcttgccaagatgtgatacagcagctcaaagaatgcttgccaagtcactaatagtctttgctctctctagttcagtgactttccgatactgtgtaacattcagggcactatgtgaacttgtaagtgtgaccatactgcatgttttatggtgacctggtccagtactgcctttgttaaagcatctgtcatcagtaagagatgataagttttttgcacaacagtgaaaaccccacctttaagcatatgattacgcttaataaatattttattaaaaggaaaattaaagacctaaaagggaagaagttagactgttctagttctggtactgttgaggcactgatgaggataaatgatcatgcagaggtctcttcataattgaccccaatggagtcatcaagcatttgagcgtcaacgatctcccagtgggccgaagcgtggaagaaaccctccgcttgggcccactgggagatcgttggtggaattc

SEQ ID NO: 311055 - DNA, 884 bp, Homo sapiens
  misc_feature (847)..(847): n is a, c, g, or t
  misc_feature (851)..(851): n is a, c, g, or t
gcagcggggtctctgcccgccccgtggcgcccgagtgcactgaagatggcggctgctgtaggacggttgctccgagcgtcggttgcccgacatgtgagtgccattccttggggcatttctgccactgcagccctcaggcctgctgcatgtggaagaacgagcttgacaaatttattgtgttctggttccagtcaagcaaaattattcagcaccagttcctcatgccatgcacctgctgtcacccagcatgcaccctattttaagggtacagccgttgtcaatggagagttcaaagacctaagccttgatgactttaaggggaaatatttggtgcttttcttctatcctttggatttcacctttgtgtgtcctacagaaattgttgcttttagtgacaaagctaacgaatttcacgatgtgaactgtgaagttgtcgcagtctcagtggattcccactttagccatcttgcctggataaatacaccaagaaagaatggtggtttgggccacatgaacatcgcactcttgtcagacttaactaagcagatttcccgagactacggtgtgctgttagaaggttctggtcttgcactaagaggtctcttcataattgaccccaatggagtcatcaagcatttgagcgtcaacgatctcccagtgggccgaagcgtggaagaaaccctccgcttggtgaaggcgtccagtatgttgaaccctggggaagtctgccgaatggacggaatggaccggtttcctagataagcagtcagtgttccaaagcttcgaagggatcggatacccggtttggctttcaggggaaacaccggagaccgcttatccaggttgnggcngcccccgtctcacatcacatcggtgtgggacca

SEQ ID NO: 311056 - DNA, 880 bp, Homo sapiens
  misc_feature (814)..(814): n is a, c, g, or t
gcagcggggtctctgcccgccccgtggcgcccgagtgcactgaagatggcggctgctgtaggacggttgctccgagcgtcggttgcccgacatgtgagtgccattccttggggcatttctgccactgcagccctcaggcctgctgcatgtggaagaacgagcttgacaaatttattgtgttctggttccagtcaagcaaaattattcagcaccagttcctcatgccatgcacctgctgtcacccagcatgcaccctattttaagggtacagccgttgtcaatggagagttcaaagacctaagccttgatgactttaaggggaaatatttggtgcttttcttctatcctttggatttcacctttgtgtgtcctacagaaattgttgcttttagtgacaaagctaacgaatttcacgatgtgaactgtgaagttgtcgcagtctcagtggattcccactttagccatcttgcctggataaatacaccaagaaagaatggtggtttgggccacatgaacatcgcactcttgtcagacttaactaagcagatttcccgagactacggtgtgctgttagaaggttctggtcttgcactaagaggtctcttcataattgaccccaatggagtcatcaagcatttgagcgtcaacgatctcccagtgggccgaagcgtggaagaaaccctccgcttggtgaaggcgtccagtatgttgaaccctggggaagtctgccgaatggaccggatttctagataagcagtcagtgttccaagagtcttcgagggaacggaaccccggttttgctttccacgggaanacccgggaccggttcactcagaggtggaagggcccgtttccccagggggcggacccaagggggacc

SEQ ID NO: 311057 - DNA, 1593 bp, Homo sapiens
gcagcggggtctctgcccgccccgtggcgcccgagtgcactgaagatggcggctgctgtaggacggttgctccgagcgtcggttgcccgacatgtgagtgccattccttggggcatttctgccactgcagccctcaggcctgctgcatgtggaagaacgagcttgacaaatttattgtgttctggttccagtcaagcaaaattattcagcaccagttcctcatgccatgcacctgctgtcacccagcatgcaccctattttaagggtacagccgttgtcaatggagagttcaaagacctaagccttgatgactttaaggggaaatatttggtgcttttcttctatcctttggatttcacctttgtgtgtcctacagaaattgttgcttttagtgacaaagctaacgaatttcacgatgtgaactgtgaagttgtcgcagtctcagtggattcccactttagccatcttgcctggataaatacaccaagaaagaatggtggtttgggccacatgaacatcgcactcttgtcagacttaactaagcagatttcccgagactacggtgtgctgttagaaggttctggtcttgcactaagaggtctcttcataattgaccccaatggagtcatcaagcatttgagcgtcaacgatctcccagtgggccgaagcgtggaagaaaccctccgcttggtgaaggcgttccagtatgtagaaacacatggagaagtctgcccagcgaactggacaccggattctcctacgatcaagccaagtccagctgcttccaaagagtactttcagaaggtaaatcagtagatcacccatgtgtatctgcaccttctcaactgagagaagaaccacagttgaaacctgcttttatcattttcaagatggttatttgtagaaggcaaggaaccaattatgcttgtattcataagtattactctaaatgttttgtttttgtaattctggctaagaccttttaaacatggttagttgctagtacaaggaatcctttattggtaacatcttggtggctggctagctagtttctacagaacataatttgcctctatagaaggctattcttagatcatgtctcaatggaaacactcttctttcttagccttacttgaatcttgcctataataaagtagagcaacacacattgaaagcttctgatcaacggtcctgaaattttcatcttgaatgtctttgtattaaactgaattttcttttaagctaacaaagatcataattttcaatgattagccgtgtaactcctgcaatgaatgtttatgtgattgaagcaaatgtgaatcgtattattttaaaaagtggcagagtgacttaactgatcatgcatgatccctcatccctgaaattgagtttatgtagtcattttacttattttattcattagctaactttgtctatgtatatttctagatattgattagtgtaatcgattataaaggatatttatcaaatccagggattgcattttgaaattataattattttctttgctgaagtattcattgtaaaacatacaaaataaacatattttaaaacatttgcattttaccacca

SEQ ID NO: 311058 - DNA, 897 bp, Homo sapiens
  misc_feature (741)..(741): n is a, c, g, or t
  misc_feature (743)..(743): n is a, c, g, or t
  misc_feature (750)..(750): n is a, c, g, or t
  misc_feature (761)..(761): n is a, c, g, or t
  misc_feature (770)..(770): n is a, c, g, or t
  misc_feature (775)..(775): n is a, c, g, or t
  misc_feature (777)..(777): n is a, c, g, or t
  misc_feature (793)..(793): n is a, c, g, or t
  misc_feature (800)..(800): n is a, c, g, or t
  misc_feature (806)..(806): n is a, c, g, or t
  misc_feature (808)..(809): n is a, c, g, or t
  misc_feature (811)..(811): n is a, c, g, or t
  misc_feature (895)..(896): n is a, c, g, or t
gcagcggggtctctgcccgccccgtggcgcccgagtgcactgaagatggcggctgctgtaggacggttgctccgagcgtcggttgcccgacatgtgagtgccattccttggggcatttctgccactgcagccctcaggcctgctgcatgtggaagaacgagcttgacaaatttattgtgttctggttccagtcaagcaaaattattcagcaccagttcctcatgccatgcacctgctgtcacccagcatgcaccctattttaagggtacagccgttgtcaatggagagttcaaagacctaagccttgatgactttaaggggaaatatttggtgcttttcttctatcctttggatttcacctttgtgtgtcctacagaaattgttgcttttagtgacaaagctaacgaatttcacgatgtgaactgtgaagttgtcgcagtctcagtggattcccactttagccatcttgcctggataaatacaccaagaaagaatggtggtttgggccacatgaacatcgcactcttgtcagacttaactaagcagatttcccgagactacggtgtgctgttagaaggttctggtcttgcactaagaggtctcttcataattgaccccaatggagtcatcaagcatttgagcgtcaacgatctcccagtgggccgaagcgtggaagaaaccctccgcttggtgaaggcgtccagtatgttgaaccctggggaagtctgccgaatggacacntnagcagcngggtccagagnctcgagganccggnanccggtttgcctctggnaaacacngacgcntnntncaggttggggggcctgttaaccaggttggtcgtacacaggcgcattccggctctttctttcttccccataatttatcttttttnnc

SEQ ID NO: 311059 - DNA, 1559 bp, Homo sapiens
  misc_feature (12)..(12): n is a, c, g, or t
actgtaggctangtacgggctggtgggcactgaagatggcggctgctgtaggacggttgctccgagcgtcggttgcccgacatgtgagtgccattccttggggcatttctgccactgcagccctcaggcctgctgcatgtggaagaacgagcttgacaaatttattgtgttctggttccagtcaagcaaaattattcagcaccagttcctcatgccatgcacctgctgtcacccagcatgcaccctattttaagggtacagccgttgtcaatggagagttcaaagacctaagccttgatgactttaaggggaaatatttggtgcttttcttctatcctttggatttcacctttgtgtgtcctacagaaattgttgcttttagtgacaaagctaacgaatttcacgatgtgaactgtgaagttgtcgcagtctcagtggattcccactttagccatcttgcctggataaatacaccaagaaagaatggtggtttgggccacatgaacatcgcactcttgtcagacttaactaagcagatttcccgagactacggtgtgctgttagaaggttctggtcttgcactaagaggtctcttcataattgaccccaatggagtcatcaagcatttgagcgtcaacgatctcccagtgggccgaagcgtggaagaaaccctccgcttggtgaaggcgtccagtatgttgaaccctggggaagtctgccgaatggacatcaagccaagtccagctgcttccaaagagtactttcagaaggtaaatcagtagatcacccatgtgtatctgcaccttctcaactgagagaagaaccacagttgaaacctgcttttatcattttcaagatggttatttgtagaaggcaaggaaccaattatgcttgtattcataagtattactctaaatgttttgtttttgtaattctggctaagaccttttaaacatggttagttgctagtacaaggaatcctttattggtaacatcttggtggctggctagctagtttctacagaacataatttgcctctatagaaggctattcttagatcatgtctcaatggaaacactcttctttcttagccttacttgaatcttgcctataataaagtagagcaacacacattgaaagcttctgatcaacggtcctgaaattttcatcttgaatgtctttgtattaaactgaattttcttttaagctaacaaagatcataattttcaatgattagccgtgtaactcctgcaatgaatgtttatgtgattgaagcaaatgtgaatcgtattattttaaaaagtggcagagtgacttaactgatcatgcatgatccctcatccctgaaattgagtttatgtagtcattttacttattttattcattagctaactttgtctatgtatatttctagatattgattagtgtaatcgattataaaggatatttatcaaatccagggattgcattttgaaattataattattttctttgctgaagtattcattgtaaaacatacaaaataaacatattttaaaacatttgcattttaccacca

SEQ ID NO: 311060 - DNA, 1952 bp, Homo sapiens
ggcacgaggctttacatgagtttttaaatcctattttaaaacataaaagaaacaaatccatcattggccgcacagccccagccaccgccccccaaccagggagcaagaggagacgcctgggtcctgttccgcacgcggatttgctggtctgtttaactggtgtccattctcgcattataggcgtccagctgggcatccagctcctctgccgaaagctgctgctttgaattcctgccggcacctctgcctcttccacgggcgcctccgcgggtgcctctccgggtgcctccaccaccaccaaaacctccagcgccacggtttctagtcatgccacctctgtttacgctctgtgcaggcctccgctgtgcgtcaatctgtgacgtgacaagctgaatgtactgaagatggcggctgctgtaggacggttgctccgagcgtcggttgcccgacatgtgagtgccattccttggggcatttctgccactgcagccctcaggcctgctgcatgtggaagaacgagcttgacaaatttattgtgttctggttccagtcaagcaaaattattcagcaccagttcctcatgccatgcacctgctgtcacccagcatgcaccctattttaagggtacagccgttgtcaatggagagttcaaagacctaagccttgatgactttaaggggaaatatttggtgcttttcttctatcctttggatttcacctttgtgtgtcctacagaaattgttgcttttagtgacaaagctaacgaatttcacgatgtgaactgtgaagttgtcgcagtctcagtggattcccactttagccatcttgcctggataaatacaccaagaaagaatggtggtttgggccacatgaacatcgcactcttgtcagacttaactaagcagatttcccgagactacggtgtgctgttagaaggttctggtcttgcactaagaggtctcttcataattgaccccaatggagtcatcaagcatttgagcgtcaacgatctcccagtgggccgaagcgtggaagaaaccctccgcttggtgaaggcgttccagtatgtagaaacacatggagaagtctgcccagcgaactggacaccggattctcctacgatcaagccaagtccagctgcttccaaagagtactttcagaaggtaaatcagtagatcacccatgtgtatctgcaccttctcaactgagagaagaaccacagttgaaacctgcttttatcattttcaagatggttatttgtagaaggcaaggaaccaattatgcttgtattcataagtattactctaaatgttttgtttttgtaattctggctaagaccttttaaacatggttagttgctagtacaaggaatcctttattggtaacatcttggtggctggctagctagtttctacagaacataatttgcctctatagaaggctattcttagatcatgtctcaatggaaacactcttctttcttagccttacttgaatcttgcctataataaagtagagcaacacacattgaaagcttctgatcaacggtcctgaaattttcatcttgaatgtctttgtattaaactgaattttcttttaagctaacaaagatcataattttcaatgattagccgtgtaactcctgcaatgaatgtttatgtgattgaagcaaatgtgaatcgtattattttaaaaagtggcagagtgacttaactgatcatgcatgatccctcatccctgaaattgagtttatgtagtcattttacttattttattcattagctaactttgtctatgtatatttctagatattgattagtgtaatcgattataaaggatatttatcaaatccagggattgcattttgaaattataattattttctttgctgaagtattcattgtaaaacatacaaaataaacatattttaaaacatttgcattttaccacca

SEQ ID NO: 311061 - DNA, 1952 bp, Homo sapiens; identical to SEQ ID NO: 311060

SEQ ID NO: 311062 - DNA, 1920 bp, Homo sapiens
ggcacgaggctttacatgagtttttaaatcctattttaaaacataaaagaaacaaatccatcattggccgcacagccccagccaccgccccccaaccagggagcaagaggagacgcctgggtcctgttccgcacgcggatttgctggtctgtttaactggtgtccattctcgcattataggcgtccagctgggcatccagctcctctgccgaaagctgctgctttgaattcctgccggcacctctgcctcttccacgggcgcctccgcgggtgcctctccgggtgcctccaccaccaccaaaacctccagcgccacggtttctagtcatgccacctctgtttacgctctgtgcaggcctccgctgtgcgtcaatctgtgacgtgacaagctgaatgtactgaagatggcggctgctgtaggacggttgctccgagcgtcggttgcccgacatgtgagtgccattccttggggcatttctgccactgcagccctcaggcctgctgcatgtggaagaacgagcttgacaaatttattgtgttctggttccagtcaagcaaaattattcagcaccacatgcaccctattttaagggtacagccgttgtcaatggagagttcaaagacctaagccttgatgactttaaggggaaatatttggtgcttttcttctatcctttggatttcacctttgtgtgtcctacagaaattgttgcttttagtgacaaagctaacgaatttcacgatgtgaactgtgaagttgtcgcagtctcagtggattcccactttagccatcttgcctggataaatacaccaagaaagaatggtggtttgggccacatgaacatcgcactcttgtcagacttaactaagcagatttcccgagactacggtgtgctgttagaaggttctggtcttgcactaagaggtctcttcataattgaccccaatggagtcatcaagcatttgagcgtcaacgatctcccagtgggccgaagcgtggaagaaaccctccgcttggtgaaggcgttccagtatgtagaaacacatggagaagtctgcccagcgaactggacaccggattctcctacgatcaagccaagtccagctgcttccaaagagtactttcagaaggtaaatcagtagatcacccatgtgtatctgcaccttctcaactgagagaagaaccacagttgaaacctgcttttatcattttcaagatggttatttgtagaaggcaaggaaccaattatgcttgtattcataagtattactctaaatgttttgtttttgtaattctggctaagaccttttaaacatggttagttgctagtacaaggaatcctttattggtaacatcttggtggctggctagctagtttctacagaacataatttgcctctatagaaggctattcttagatcatgtctcaatggaaacactcttctttcttagccttacttgaatcttgcctataataaagtagagcaacacacattgaaagcttctgatcaacggtcctgaaattttcatcttgaatgtctttgtattaaactgaattttcttttaagctaacaaagatcataattttcaatgattagccgtgtaactcctgcaatgaatgtttatgtgattgaagcaaatgtgaatcgtattattttaaaaagtggcagagtgacttaactgatcatgcatgatccctcatccctgaaattgagtttatgtagtcattttacttattttattcattagctaactttgtctatgtatatttctagatattgattagtgtaatcgattataaaggatatttatcaaatccagggattgcattttgaaattataattattttctttgctgaagtattcattgtaaaacatacaaaataaacatattttaaaacatttgcattttaccacca

SEQ ID NO: 311063 - DNA, 2272 bp, Homo sapiens
ggcacgaggctttacatgagtttttaaatcctattttaaaacataaaagaaacaaatccatcattggccgcacagccccagccaccgccccccaaccagggagcaagaggagacgcctgggtcctgttccgcacgcggatttgctggtctgtttaactggtgtccattctcgcattataggcgtccagctgggcatccagctcctctgccgaaagctgctgctttgaattcctgccggcacctctgcctcttccacgggcgcctccgcgggtgcctctccgggtgcctccaccaccaccaaaacctccagcgccacggtttctagtcatgccacctctgtttacgctctgtgcaggcctccgctgtgcgtcaatctgtgacgtgacaagctgaatgtactgaagatggcggctgctgtaggacggttgctccgagcgtcggttgcccgacatgtgagtgccattccttggggcatttctgccactgcagccctcaggcctgctgcatgtggaagaacgagcttgacaaatttattgtgttctggttccagtcaagcaaaattattcagcaccagttcctcatgccatgcacctgctgtcacccagcatgcaccctattttaagggtacagccgttgtcaatggagagttcaaagacctaagccttgatgactttaaggggaaatatttggtgcttttcttctatcctttggatttcacctttgtgtgtcctacagaaattgttgcttttagtgacaaagctaacgaatttcacgatgtgaactgtgaagttgtcgcagtctcagtggattcccactttagccatcttgcctggataaatacaccaagaaagaatggtggtttgggccacatgaacatcgcactcttgtcagacttaactaagcagatttcccgagactacggtgtgctgttagaaggttctggtcttgcactaagaggtctcttcataattgaccccaatggagtcatcaagcatttgagcgtcaacgatctcccagtgggccgaagcgtggaagaaaccctccgcttggtgaaggcgttccagtatgtagaaacacatggagaagtctgcccagcgaactggacaccggattctcctacgatcaagccaagtccagctgcttccaaagagtactttcagaaggtaaatcagtagatcacccatgtgtatctgcaccttctcaactgagagaagaaccacagttgaaacctgcttttatcattttcaagatggttatttgtagaaggcaaggaaccaattatgcttgtattcataagtattactctaaatgttttgtttttgtaattctggctaagaccttttaaacatggttagttgctagtacaaggaatcctttattggtaacatcttggtggctggctagctagtttctacagaacataatttgcctctatagaaggctattcttagatcatgtctcaatggaaacactcttctttcttagccttacttgaatcttgcctataataaagtagagcaacacacattgaaagcttctgatcaacggtcctgaaattttcatcttgaatgtctttgtattaaactgaattttcttttaagctaacaaagatcataattttcaatgattagccgtgtaactcctgcaatgaatgtttatgtgattgaagcaaatgtgaatcgtattattttaaaaagtggcagagtgacttaactgatcatgcatgatccctcatccctgaaattgagtttatgtagtcattttacttattttattcattagctaactttgtctatgtatatttctagatattgattagtgtaatcgattataaaggatatttatcaaatccagggattgcattttgaaattataattattttctttgctgaagtattcattgtaaaacatacaaaataaacatattttaaaacatttgcattttaccaccaaaaaaaaaaaacaggacaagagagaagcaagagagaaaaaagaagggcccgcgcacacagaaagtcgaggaacacagccacgaactacagacagcaggccatgggagtcacatgagcccagcagcaacacgagagaggatgggcggcaggaatagacagtcacacgcaacacgaaaggtatgacaataaaaaacccaagaaccagcgagtcagccgagacacgcacgggagttcgctaggaggagacgcatcaagcgaagagatgacgtcgcataggcaaaagcgagcaaggacaagcgcagaaacgtacggcgtcacac

SEQ ID NO: 311064 - DNA, 2083 bp, Homo sapiens
  misc_feature (2009)..(2009): n is a, c, g, or t
ggcacgaggctttacatgagtttttaaatcctattttaaaacataaaagaaacaaatccatcattggccgcacagccccagccaccgccccccaaccagggagcaagaggagacgcctgggtcctgttccgcacgcggatttgctggtctgtttaactggtgtccattctcgcattataggcgtccagctgggcatccagctcctctgccgaaagctgctgctttgaattcctgccggcacctctgcctcttccacgggcgcctccgcgggtgcctctccgggtgcctccaccaccaccaaaacctccagcgccacggtttctagtcatgccacctctgtttacgctctgtgcaggcctccgctgtgcgtcaatctgtgacgtgacaagctgaatgtactgaagatggcggctgctgtaggacggttgctccgagcgtcggttgcccgacatgtgagtgccattccttggggcatttctgccactgcagccctcaggcctgctgcatgtggaagaacgagcttgacaaatttattgtgttctggttccagtcaagcaaaattattcagcaccagttcctcatgccatgcacctgctgtcacccagcatgcaccctattttaagggtacagccgttgtcaatggagagttcaaagacctaagccttgatgactttaaggggaaatatttggtgcttttcttctatcctttggatttcacctttgtgtgtcctacagaaattgttgcttttagtgacaaagctaacgaatttcacgatgtgaactgtgaagttgtcgcagtctcagtggattcccactttagccatcttgcctggataaatacaccaagaaagaatggtggtttgggccacatgaacatcgcactcttgtcagacttaactaagcagatttcccgagactacggtgtgctgttagaaggttctggtcttgcactaagaggtctcttcataattgaccccaatggagtcatcaagcatttgagcgtcaacgatctcccagtgggccgaagcgtggaagaaaccctccgcttggtgaaggcgttccagtatgtagaaacacatggagaagtctgcccagcgaactggacaccggattctcctacgatcaagccaagtccagctgcttccaaagagtactttcagaaggtaaatcagtagatcacccatgtgtatctgcaccttctcaactgagagaagaaccacagttgaaacctgcttttatcattttcaagatggttatttgtagaaggcaaggaaccaattatgcttgtattcataagtattactctaaatgttttgtttttgtaattctggctaagaccttttaaacatggttagttgctagtacaaggaatcctttattggtaacatcttggtggctggctagctagtttctacagaacataatttgcctctatagaaggctattcttagatcatgtctcaatggaaacactcttctttcttagccttacttgaatcttgcctataataaagtagagcaacacacattgaaagcttctgatcaacggtcctgaaattttcatcttgaatgtctttgtattaaactgaattttcttttaagctaacaaagatcataattttcaatgattagccgtgtaactcctgcaatgaatgtttatgtgattgaagcaaatgtgaatcgtattattttaaaaagtggcagagtgacttaactgatcatgcatgatccctcatccctgaaattgagtttatgtagtcattttacttattttattcattagctaactttgtctatgtatatttctagatattgattagtgtaatcgattataaaggatatttatcaaatccagggattgcattttgaaattataattattttctttgctgaagtattcattgtaaaacatacaaaataaacatattttaaaacatttgcattttaccaccacaaaaaaaaaaaaaaaaatttggggcccgcccaaaaatttaaacaacgttggcgggnccagagaatggcagccaaaccgccacgcggggtccccaaaaccggacggctggaaacacaggggcggtaacggg

SEQ ID NO: 311065 - DNA, 2248 bp, Homo sapiens
ggcacgaggctttacatgagtttttaaatcctattttaaaacataaaagaaacaaatccatcattggccgcacagccccagccaccgccccccaaccagggagcaagaggagacgcctgggtcctgttccgcacgcggatttgctggtctgtttaactggtgtccattctcgcattataggcgtccagctgggcatccagctcctctgccgaaagctgctgctttgaattcctgccggcacctctgcctcttccacgggcgcctccgcgggtgcctctccgggtgcctccaccaccaccaaaacctccagcgccacggtttctagtcatgccacctctgtttacgctctgtgcaggcctccgctgtgcgtcaatctgtgacgtgacaagctgaatgtactgaagatggcggctgctgtaggacggttgctccgagcgtcggttgcccgacatgtgagtgccattccttggggcatttctgccactgcagccctcaggcctgctgcatgtggaagaacgagcttgacaaatttattgtgttctggttccagtcaagcaaaattattcagcaccagttcctcatgccatgcacctgctgtcacccagcatgcaccctattttaagggtacagccgttgtcaatggagagttcaaagacctaagccttgatgactttaaggggaaatatttggtgcttttcttctatcctttggatttcacctttgtgtgtcctacagaaattgttgcttttagtgacaaagctaacgaatttcacgatgtgaactgtgaagttgtcgcagtctcagtggattcccactttagccatcttgcctggataaatacaccaagaaagaatggtggtttgggccacatgaacatcgcactcttgtcagacttaactaagcagatttcccgagactacggtgtgctgttagaaggttctggtcttgcactaagaggtctcttcataattgaccccaatggagtcatcaagcatttgagcgtcaacgatctcccagtgggccgaagcgtggaagaaaccctccgcttggtgaaggcgttccagtatgtagaaacacatggagaagtctgcccagcgaactggacaccggattctcctacgatcaagccaagtccagctgcttccaaagagtactttcagaaggtaaatcagtagatcacccatgtgtatctgcaccttctcaactgagagaagaaccacagttgaaacctgcttttatcattttcaagatggttatttgtagaaggcaaggaaccaattatgcttgtattcataagtattactctaaatgttttgtttttgtaattctggctaagaccttttaaacatggttagttgctagtacaaggaatcctttattggtaacatcttggtggctggctagctagtttctacagaacataatttgcctctatagaaggctattcttagatcatgtctcaatggaaacactcttctttcttagccttacttgaatcttgcctataataaagtagagcaacacacattgaaagcttctgatcaacggtcctgaaattttcatcttgaatgtctttgtattaaactgaattttcttttaagctaacaaagatcataattttcaatgattagccgtgtaactcctgcaatgaatgtttatgtgattgaagcaaatgtgaatcgtattattttaaaaagtggcagagtgacttaactgatcatgcatgatccctcatccctgaaattgagtttatgtagtcattttacttattttattcattagctaactttgtctatgtatatttctagatattgattagtgtaatcgattataaaggatatttatcaaatccagggattgcattttgaaattataattattttctttgctgaagtattcattgtaaaacatacaaaataaacatattttaaaacatttgcattttaccaccacaaaaaaaaaaaaaaaaaaaaaaaaaaaaaaaaaaaaaaaaaaaaaaaaaaaaaaaaaaaaaaaaaaggggcggcgcgcacgcacaaaaaactaccccgagggggcgcccaacaaatacgcaccaccaacgcatgtggttgaaaacaagggtcgcccaccaagtagtgagtgattaaattaacgacagcgaagagcgacggtgtataaaaacaggcgaggcggaggaaacacgcgccgaggcacacattgaggagaggaacctatagtgagtggggcaagataggggaaacacagc

SEQ ID NO: 311066 - DNA, 1462 bp, Homo sapiens
taagcggatcgtgctgaatcaaaatccacgatggatgttctgatggtcacttagctggagtctactcaatcaggagtccaatagctgaactcgatatcacatttatggccctcgccatgcaccctattttaagggtacagccgttgtcaatggagagttcaaagacctaagccttgatgactttaaggggaaatatttggtgcttttcttctatcctttggatttcacctttgtgtgtcctacagaaattgttgcttttagtgacaaagctaacgaatttcacgatgtgaactgtgaagttgtcgcagtctcagtggattcccactttagccatcttgcctggataaatacaccaagaaagaatggtggtttgggccacatgaacatcgcactcttgtcagacttaactaagcagatttcccgagactacggtgtgctgttagaaggttctggtcttgcactaagaggtctcttcataattgaccccaatggagtcatcaagcatttgagcgtcaacgatctcccagtgggccgaagcgtggaagaaaccctccgcttggtgaaggcgttccagtatgtagaaacacatggagaagtctgcccagcgaactggacaccggattctcctacgatcaagccaagtccagctgcttccaaagagtactttcagaaggtaaatcagtagatcacccatgtgtatctgcaccttctcaactgagagaagaaccacagttgaaacctgcttttatcattttcaagatggttatttgtagaaggcaaggaaccaattatgcttgtattcataagtattactctaaatgttttgtttttgtaattctggctaagaccttttaaacatggttagttgctagtacaaggaatcctttattggtaacatcttggtggctggctagctagtttctacagaacataatttgcctctatagaaggctattcttagatcatgtctcaatggaaacactcttctttcttagccttacttgaatcttgcctataataaagtagagcaacacacattgaaagcttctgatcaacggtcctgaaattttcatcttgaatgtctttgtattaaactgaattttcttttaagctaacaaagatcataattttcaatgattagccgtgtaactcctgcaatgaatgtttatgtgattgaagcaaatgtgaatcgtattattttaaaaagtggcagagtgacttaactgatcatgcatgatccctcatccctgaaattgagtttatgtagtcattttacttattttattcattagctaactttgtctatgtatatttctagatattgattagtgtaatcgattataaaggatatttatcaaatccagggattgcattttgaaattataattattttctttgctgaagtattcattgtaaaacatacaaaataaacatattttaaaacatttgcattttaccacca

SEQ ID NO: 311067 - DNA, 2074 bp, Homo sapiens
ggcacgaggctttacatgagtttttaaatcctattttaaaacataaaagaaacaaatccatcattggccgcacagccccagccaccgccccccaaccagggagcaagaggagacgcctgggtcctgttccgcacgcggatttgctggtctgtttaactggtgtccattctcgcattataggcgtccagctgggcatccagctcctctgccgaaagctgctgctttgaattcctgccggcacctctgcctcttccacgggcgcctccgcgggtgcctctccgggtgcctccaccaccaccaaaacctccagcgccacggtttctagtcatgccacctctgtttacgctctgtgcaggcctccgctgtgcgtcaatctgtgacgtgacaagctgaatgtactgaagatggcggctgctgtaggacggttgctccgagcgtcggttgcccgacatgtgagtgccattccttggggcatttctgccactgcagccctcaggcctgctgcatgtggaagaacgagcttgacaaatttattgtgttctggttccagtcaagcaaaattattcagcaccagttcctcatgccatgcacctgctgtcacccagcatgcaccctattttaagggtacagccgttgtcaatggagagttcaaagacctaagccttgatgactttaaggggaaatatttggtgcttttcttctatcctttggatttcacctttgtgtgtcctacagaaattgttgcttttagtgacaaagctaacgaatttcacgatgtgaactgtgaagttgtcgcagtctcagtggattcccactttagccatcttgcctggataaatacaccaagaaagaatggtggtttgggccacatgaacatcgcactcttgtcagacttaactaagcagatttcccgagactacggtgtgctgttagaaggttctggtcttgcactaagaggtctcttcataattgaccccaatggagtcatcaagcatttgagcgtcaacgatctcccagtgggccgaagcgtggaagaaaccctccgcttggtgaaggcgttccagtatgtagaaacacatggagaagtctgcccagcgaactggacaccggattctcctacgatcaagccaagtccagctgcttccaaagagtactttcagaaggtaaatcagtagatcacccatgtgtatctgcaccttctcaactgagagaagaaccacagttgaaacctgcttttatcattttcaagatggttatttgtagaaggcaaggaaccaattatgcttgtattcataagtattactctaaatgttttgtttttgtaattctggctaagaccttttaaacatggttagttgctagtacaaggaatcctttattggtaacatcttggtggctggctagctagtttctacagaacataatttgcctctatagaaggctattcttagatcatgtctcaatggaaacactcttctttcttagccttacttgaatcttgcctataataaagtagagcaacacacattgaaagcttctgatcaacggtcctgaaattttcatcttgaatgtctttgtattaaactgaattttcttttaagctaacaaagatcataattttcaatgattagccgtgtaactcctgcaatgaatgtttatgtgattgaagcaaatgtgaatcgtattattttaaaaagtggcagagtgacttaactgatcatgcatgatccctcatccctgaaattgagtttatgtagtcattttacttattttattcattagctaactttgtctatgtatatttctagatattgattagtgtaatcgattataaaggatatttatcaaatccagggattgcattttgaaattataattattttctttgctgaagtattcattgtaaaacatacaaaataaacatattttaaaacatttgcattttaccaccaccaaaaaagaaaccaaaacaacaaacaacgcacacacacttgggggggcgcccccggggccccccagaagaagttttaaaaaccaatctcggtggggcggcggggcccccacgaggagacgc

SEQ ID NO: 311068 - DNA, 2046 bp, Homo sapiens
  misc_feature (1950)..(1950): n is a, c, g, or t
  misc_feature (1955)..(1955): n is a, c, g, or t
  misc_feature (1961)..(1961): n is a, c, g, or t
  misc_feature (1964)..(1964): n is a, c, g, or t
  misc_feature (1973)..(1974): n is a, c, g, or t
  misc_feature (1982)..(1982): n is a, c, g, or t
  misc_feature (1988)..(1989): n is a, c, g, or t
  misc_feature (1994)..(1994): n is a, c, g, or t
  misc_feature (1997)..(1997): n is a, c, g, or t
  misc_feature (2003)..(2003): n is a, c, g, or t
  misc_feature (2006)..(2006): n is a, c, g, or t
  misc_feature (2012)..(2012): n is a, c, g, or t
  misc_feature (2019)..(2019): n is a, c, g, or t
  misc_feature (2021)..(2021): n is a, c, g, or t
  misc_feature (2025)..(2025): n is a, c, g, or t
ggcacgaggctttacatgagtttttaaatcctattttaaaacataaaagaaacaaatccatcattggccgcacagccccagccaccgccccccaaccagggagcaagaggagacgcctgggtcctgttccgcacgcggatttgctggtctgtttaactggtgtccattctcgcattataggcgtccagctgggcatccagctcctctgccgaaagctgctgctttgaattcctgccggcacctctgcctcttccacgggcgcctccgcgggtgcctctccgggtgcctccaccaccaccaaaacctccagcgccacggtttctagtcatgccacctctgtttacgctctgtgcaggcctccgctgtgcgtcaatctgtgacgtgacaagctgaatgtactgaagatggcggctgctgtaggacggttgctccgagcgtcggttgcccgacatgtgagtgccattccttggggcatttctgccactgcagccctcaggcctgctgcatgtggaagaacgagcttgacaaatttattgtgttctggttccagtcaagcaaaattattcagcaccagttcctcatgccatgcacctgctgtcacccagcatgcaccctattttaagggtacagccgttgtcaatggagagttcaaagacctaagccttgatgactttaaggggaaatatttggtgcttttcttctatcctttggatttcacctttgtgtgtcctacagaaattgttgcttttagtgacaaagctaacgaatttcacgatgtgaactgtgaagttgtcgcagtctcagtggattcccactttagccatcttgcctggataaatacaccaagaaagaatggtggtttgggccacatgaacatcgcactcttgtcagacttaactaagcagatttcccgagactacggtgtgctgttagaaggttctggtcttgcactaagaggtctcttcataattgaccccaatggagtcatcaagcatttgagcgtcaacgatctcccagtgggccgaagcgtggaagaaaccctccgcttggtgaaggcgttccagtatgtagaaacacatggagaagtctgcccagcgaactggacaccggattctcctacgatcaagccaagtccagctgcttccaaagagtactttcagaaggtaaatcagtagatcacccatgtgtatctgcaccttctcaactgagagaagaaccacagttgaaacctgcttttatcattttcaagatggttatttgtagaaggcaaggaaccaattatgcttgtattcataagtattactctaaatgttttgtttttgtaattctggctaagaccttttaaacatggttagttgctagtacaaggaatcctttattggtaacatcttggtggctggctagctagtttctacagaacataatttgcctctatagaaggctattcttagatcatgtctcaatggaaacactcttctttcttagccttacttgaatcttgcctataataaagtagagcaacacacattgaaagcttctgatcaacggtcctgaaattttcatcttgaatgtctttgtattaaactgaattttcttttaagctaacaaagatcataattttcaatgattagccgtgtaactcctgcaatgaatgtttatgtgattgaagcaaatgtgaatcgtattattttaaaaagtggcagagtgacttaactgatcatgcatgatccctcatccctgaaattgagtttatgtagtcattttacttattttattcattagctaactttgtctatgtatatttctagatattgattagtgtaatcgattataaaggatatttatcaaatccagggattgcattttgaaattataattatattcttggtgagtttctgggaacattcaaataactttttagaaaaaaaaaaaaaaaaaaaatgggggggngccanaattanaangtggggggnnagagaaanggaggnnagaanggnaagggntcncaaaanggggggnancagntgttttaagtactcgtgggat

SEQ ID NO: 311069 - DNA, 1924 bp, Homo sapiens
ggcacgaggctttacatgagtttttaaatcctattttaaaacataaaagaaacaaatccatcattggccgcacagccccagccaccgccccccaaccagggagcaagaggagacgcctgggtcctgttccgcacgcggatttgctggtctgtttaactggtgtccattctcgcattataggcgtccagctgggcatccagctcctctgccgaaagctgctgctttgaattcctgccggcacctctgcctcttccacgggcgcctccgcgggtgcctctccgggtgcctccaccaccaccaaaacctccagcgccacggtttctagtcatgccacctctgtttacgctctgtgcaggcctccgctgtgcgtcaatctgtgacgtgacaagctgaatgtactgaagatggcggctgctgtaggacggttgctccgagcgtcggttgcccgacatgtgagtgccattccttggggcatttctgccactgcagccctcaggcctgctgcatgtggaagaacgagcttgacaaatttattgtgttctggttccagtcaagcaaaattattcagcaccagttcctcatgccatgcacctgctgtcacccagcatgcaccctattttaagggtacagccgttgtcaatggagagttcaaagacctaagccttgatgactttaaggggaaatatttggtgcttttcttctatcctttggatttcacctttgtgtgtcctacagaaattgttgcttttagtgacaaagctaacgaatttcacgatgtgaactgtgaagttgtcgcagtctcagtggattcccactttagccatcttgcctggataaatacaccaagaaagaatggtggtttgggccacatgaacatcgcactcttgtcagacttaactaagcagatttcccgagactacggtgtgctgttagaaggttctggtcttgcactaagaggtctcttcataattgaccccaatggagtcatcaagcatttgagcgtcaacgatctcccagtgggccgaagcgtggaagaaaccctccgcttggtgaaggcgttccagtatgtagaaacacatggagaagtctgcccagcgaactggacaccggattctcctacgatcaagccaagtccagctgcttccaaagagtactttcagaaggtaaatcagtagatcacccatgtgtatctgcaccttctcaactgagagaagaaccacagttgaaacctgcttttatcattttcaagatggttatttgtagaaggcaaggaaccaattatgcttgtattcataagtattactctaaatgttttgtttttgtaattctggctaagaccttttaaacatggttagttgctagtacaaggaatcctttattggtaacatcttggtggctggctagctagtttctacagaacataatttgcctctatagaaggctattcttagatcatgtctcaatggaaacactcttctttcttagccttacttgaatcttgcctataataaagtagagcaacacacattgaaagcttctgatcaacggtcctgaaattttcatcttgaatgtctttgtattaaactgaattttcttttaagctaacaaagatcataattttcaatgattagccgtgtaactcctgcaatgaatgtttatgtgattgaagcaaatgtgaatcgtattattttaaaaagtggcagagtgacttaactgatcatgcatgatccctcatccctgaaattgagtttatgtagtcattttacttattttattcattagctaactttgtctatgtatatttctagatattgattagtgtaatcgattataaaggatatttatcaaatccagggattgcattttgaaattataattagtatgtcttacaatgaatacttcagcaaagaaaataattataatt

SEQ ID NO: 311070 - DNA, 874 bp, Homo sapiens
  misc_feature (12)..(12): n is a, c, g, or t
  misc_feature (837)..(837): n is a, c, g, or t
  misc_feature (841)..(841): n is a, c, g, or t
actgtaggctangtacgggctggtgggcactgaagatggcggctgctgtaggacggttgctccgagcgtcggttgcccgacatgtgagtgccattccttggggcatttctgccactgcagccctcaggcctgctgcatgtggaagaacgagcttgacaaatttattgtgttctggttccagtcaagcaaaattattcagcaccagttcctcatgccatgcacctgctgtcacccagcatgcaccctattttaagggtacagccgttgtcaatggagagttcaaagacctaagccttgatgactttaaggggaaatatttggtgcttttcttctatcctttggatttcacctttgtgtgtcctacagaaattgttgcttttagtgacaaagctaacgaatttcacgatgtgaactgtgaagttgtcgcagtctcagtggattcccactttagccatcttgcctggataaatacaccaagaaagaatggtggtttgggccacatgaacatcgcactcttgtcagacttaactaagcagatttcccgagactacggtgtgctgttagaaggttctggtcttgcactaagaggtctcttcataattgaccccaatggagtcatcaagcatttgagcgtcaacgatctcccagtgggccgaagcgtggaagaaaccctccgcttggtgaaggcgtccagtatgttgaaccctggggaagtctgccgaatggacggaatggaccggtttcctagataagcagtcagtgttccaaagcttcgaagggatcggatacccggtttggctttcaggggaaacaccggagaccgcttatccaggttgnggcngcccccgtctcacatcacatcggtgtgggacca

SEQ ID NO: 311071 - DNA, 1504 bp, Homo sapiens
  misc_feature (12)..(12): n is a, c, g, or t
actgtaggctangtacgggctggtgggcactgaagatggcggctgctgtaggacggttgctccgagcgtcggttgcccgacatgtgagtgccattccttggggcatttctgccactgcagccctcaggcctgctgcatgtggaagaacgagcttgacaaatttattgtgttctggttccagtcaagcaaaattattcagcaccagttcctcatgccatgcacctgctgtcacccagcatgcaccctattttaagggtacagccgttgtcaatggagagttcaaagacctaagccttgatgactttaaggggaaatatttggtgcttttcttctatcctttggatttcacctttgtgtgtcctacagaaattgttgcttttagtgacaaagctaacgaatttcacgatgtgaactgtgaagttgtcgcagtctcagtggattcccactttagccatcttgcctggataaatacaccaagaaagaatggtggtttgggccacatgaacatcgcactcttgtcagacttaactaagcagatttcccgagactacggtgtgctgttagaaggttctggtcttgcactaagaggtctcttcataattgaccccaatggagtcatcaagcatttgagcgtcaacgatctcccagtgggccgaagcgtggaagaaaccctccgcttggtgaaggcgtccagtatgttgaaccctggggaagtctgccgaatggacatcaagccaagtccagctgcttccaaagagtactttcagaaggtaaatcagtagatcacccatgtgtatctgcaccttctcaactgagagaagaaccacagttgaaacctgcttttatcattttcaagatggttatttgtagaaggcaaggaaccaattatgcttgtattcataagtattactctaaatgttttgtttttgtaattctggctaagaccttttaaacatggttagttgctagtacaaggaatcctttattggtaacatcttggtggctggctagctagtttctacagaacataatttgcctctatagaaggctattcttagatcatgtctcaatggaaacactcttctttcttagccttacttgaatcttgcctataataaagtagagcaacacacattgaaagcttctgatcaacggtcctgaaattttcatcttgaatgtctttgtattaaactgaattttcttttaagctaacaaagatcataattttcaatgattagccgtgtaactcctgcaatgaatgtttatgtgattgaagcaaatgtgaatcgtattattttaatttatgtagtcattttacttattttattcattagctaactttgtctatgtatatttctagatattgattagtgtaatcgattataaaggatatttatcaaatccagggattgcattttgaaattataattattttctttgctgaagtattcattgtaaaacatacaaaataaacatattttaaaacatttgcattttaccacca

SEQ ID NO: 311072 - DNA, 1338 bp, Homo sapiens
  misc_feature (12)..(12): n is a, c, g, or t
  misc_feature (1338)..(1338): n is a, c, g, or t
actgtaggctangtacgggctggtgggcactgaagatggcggctgctgtaggacggttgctccgagcgtcggttgcccgacatgtgagtgccattccttggggcatttctgccactgcagccctcaggcctgctgcatgtggaagaacgagcttgacaaatttattgtgttctggttccagtcaagcaaaattattcagcaccagttcctcatgccatgcacctgctgtcacccagcatgcaccctattttaagggtacagccgttgtcaatggagagttcaaagacctaagccttgatgactttaaggggaaatatttggtgcttttcttctatcctttggatttcacctttgtgtgtcctacagaaattgttgcttttagtgacaaagctaacgaatttcacgatgtgaactgtgaagttgtcgcagtctcagtggattcccactttagccatcttgcctggataaatacaccaagaaagaatggtggtttgggccacatgaacatcgcactcttgtcagacttaactaagcagatttcccgagactacggtgtgctgttagaaggttctggtcttgcactaagaggtctcttcataattgaccccaatggagtcatcaagcatttgagcgtcaacgatctcccagtgggccgaagcgtggaagaaaccctccgcttggtgaaggcgtccagtatgttgaaccctggggaagtctgccgaatggacatcaagccaagtccagctgcttccaaagagtactttcagaaggtaaatcagtagatcacccatgtgtatctgcaccttctcaactgagagaagaaccacagttgaaacctgcttttatcattttcaagatggttatttgtagaaggcaaggaaccaattatgcttgtattcataagtattactctaaatgttttgtttttgtaattctggctaagaccttttaaacatggttagttgctagtacaaggaatcctttattggtaacatcttggtggctggctagctagtttctacagaacataatttgcctctatagaaggctattcttagatcatgtctcaatggaaacactcttctttcttagccttacttgaatcttgcctataataaagtagagcaacacacattgaaagcttctgatcaacggtcctgaaattttcatcttgaatgtctttgtattaaactgaattttcttttaagctaacaaagatcataattttcaatgattagccgtgtaactcctgcaatgaatgtttatgtgattgaagcaaatgtgaatcgtattattttaacatttacttatttattaatagtcttggtatgatattcn

SEQ ID NO: 311073 - DNA, 1945 bp, Homo sapiens
ggcacgaggctttacatgagtttttaaatcctattttaaaacataaaagaaacaaatccatcattggccgcacagccccagccaccgccccccaaccagggagcaagaggagacgcctgggtcctgttccgcacgcggatttgctggtctgtttaactggtgtccattctcgcattataggcgtccagctgggcatccagctcctctgccgaaagctgctgctttgaattcctgccggcacctctgcctcttccacgggcgcctccgcgggtgcctctccgggtgcctccaccaccaccaaaacctccagcgccacggtttctagtcatgccacctctgtttacgctctgtgcaggcctccgctgtgcgtcaatctgtgacgtgacaagctgaatgtactgaagatggcggctgctgtaggacggttgctccgagcgtcggttcctcatgccatgcacctgctgtcacccagcatgcaccctattttaagggtacagccgttgtcaatggagagttcaaagacctaagccttgatgactttaaggggaaatatttggtgcttttcttctatcctttggatttcacctttgtgtgtcctacagaaattgttgcttttagtgacaaagctaacgaatttcacgatgtgaactgtgaagttgtcgcagtctcagtggattcccactttagccatcttgcctggataaatacaccaagaaagtagagacggggtgtctccatgttggtcacgctggtctcgaactcctgacctcaggtgatccgcccaccttggcctcccaaagtgccggaattacaggcatgagccaccacacctggcctactcaagaatggtggtttgggccacatgaacatcgcactcttgtcagacttaactaagcagatttcccgagactacggtgtgctgttagaaggttctggtcttgcactaagaggtctcttcataattgaccccaatggagtcatcaagcatttgagcgtcaacgatctcccagtgggccgaagcgtggaagaaaccctccgcttggtgaaggcgttccagtatgtagaaacacatggagaagtctgcccagcgaactggacaccggattctcctacgatcaagccaagtccagctgcttccaaagagtactttcagaaggtaaatcagtagatcacccatgtgtatctgcaccttctcaactgagagaagaaccacagttgaaacctgcttttatcattttcaagatggttatttgtagaaggcaaggaaccaattatgcttgtattcataagtattactctaaatgttttgtttttgtaattctggctaagaccttttaaacatggttagttgctagtacaaggaatcctttattggtaacatcttggtggctggctagctagtttctacagaacataatttgcctctatagaaggctattcttagatcatgtctcaatggaaacactcttctttcttagccttacttgaatcttgcctataataaagtagagcaacacacattgaaagcttctgatcaacggtcctgaaattttcatcttgaatgtctttgtattaaactgaattttcttttaagctaacaaagatcataattttcaatgattagccgtgtaactcctgcaatgaatgtttatgtgattgaagcaaatgtgaatcgtattattttaaaaagtggcagagtgacttaactgatcatgcatgatccctcatccctgaaattgagtttatgtagtcattttacttattttattcattagctaactttgtctatgtatatttctagatattgattagtgtaatcgattataaaggatatttatcaaatccagggattgcattttgaaattataattattttctttgctgaagtattcattgtaaaacatacaaaataaacatattttaaaacatttgcattttaccacca

SEQ ID NO: 311074 - DNA, 1786 bp, Homo sapiens
ggcacgaggctttacatgagtttttaaatcctattttaaaacataaaagaaacaaatccatcattggccgcacagccccagccaccgccccccaaccagggagcaagaggagacgcctgggtcctgttccgcacgcggatttgctggtctgtttaactggtgtccattctcgcattataggcgtccagctgggcatccagctcctctgccgaaagctgctgctttgaattcctgccggcacctctgcctcttccacgggcgcctccgcgggtgcctctccgggtgcctccaccaccaccaaaacctccagcgccacggtttctagtcatgccacctctgtttacgctctgtgcaggcctccgctgtgcgtcaatctgtgacgtgacaagctgaatgtactgaagatggcggctgctgtaggacggttgctccgagcgtcggttgcccgacatgtgagtgccattccttggggcatttctgccactgcagccctcaggcctgctgcatgtggaagaacgagcttgacaaatttattgtgttctggttccagtcaagcaaaattattcagcaccagttcctcatgccatgcacctgctgtcacccagcatgcaccctattttaagggtacagccgttgtcaatggagagttcaaagacctaagccttgatgactttaaggggaaatatttggtgcttttcttctatcctttggatttcacctttgtgtgtcctacagaaattgttgcttttagtgacaaagctaacgaatttcacgatgtgaactgtgaagttgtcgcagtctcagtggattcccactttagccatcttgcctggataaatacaccaagaaagaatggtggtttgggccacatgaacatcgcactcttgtcagacttaactaagcagatttcccgagactacggtgtgctgttagaaggttctggtcttgcactaagatcaagccaagtccagctgcttccaaagagtactttcagaaggtaaatcagtagatcacccatgtgtatctgcaccttctcaactgagagaagaaccacagttgaaacctgcttttatcattttcaagatggttatttgtagaaggcaaggaaccaattatgcttgtattcataagtattactctaaatgttttgtttttgtaattctggctaagaccttttaaacatggttagttgctagtacaaggaatcctttattggtaacatcttggtggctggctagctagtttctacagaacataatttgcctctatagaaggctattcttagatcatgtctcaatggaaacactcttctttcttagccttacttgaatcttgcctataataaagtagagcaacacacattgaaagcttctgatcaacggtcctgaaattttcatcttgaatgtctttgtattaaactgaattttcttttaagctaacaaagatcataattttcaatgattagccgtgtaactcctgcaatgaatgtttatgtgattgaagcaaatgtgaatcgtattattttaaaaagtggcagagtgacttaactgatcatgcatgatccctcatccctgaaattgagtttatgtagtcattttacttattttattcattagctaactttgtctatgtatatttctagatattgattagtgtaatcgattataaaggatatttatcaaatccagggattgcattttgaaattataattattttctttgctgaagtattcattgtaaaacatacaaaataaacatattttaaaacatttgcattttaccacca

SEQ ID NO: 311075 - DNA, 1896 bp, Homo sapiens
ggcacgaggctttacatgagtttttaaatcctattttaaaacataaaagaaacaaatccatcattggccgcacagccccagccaccgccccccaaccagggagcaagaggagacgcctgggtcctgttccgcacgcggatttgctggtctgtttaactggtgtccattctcgcattataggcgtccagctgggcatccagctcctctgccgaaagctgctgctttgaattcctgccggcacctctgcctcttccacgggcgcctccgcgggtgcctctccgggtgcctccaccaccaccaaaacctccagcgccacggtttctagtcatgccacctctgtttacgctctgtgcaggcctccgctgtgcgtcaatctgtgacgtgacaagctgaatgtactgaagatggcggctgctgtaggacggttgctccgagcgtcggttgcccgacatgtgagtgccattccttggggcatttctgccactgcagccctcaggcctgctgcatgtggaagaacgagcttgacaaatttattgtgttctggttccagtcaagcaaaattattcagcaccacatgcaccctattttaagggtacagccgttgtcaatggagagttcaaagacctaagccttgatgactttaaggggaaatatttggtgcttttcttctatcctttggatttcacctttgtgtgtcctacagaaattgttgcttttagtgacaaagctaacgaatttcacgatgtgaactgtgaagttgtcgcagtctcagtggattcccactttagccatcttgcctggataaatacaccaagaaagaatggtggtttgggccacatgaacatcgcactcttgtcagacttaactaagcagatttcccgagactacggtgtgctgttagaaggttctggtcttgcactaagaggtctcttcataattgaccccaatggagtcatcaagcatttgagcgtcaacgatctcccagtgggccgaagcgtggaagaaaccctccgcttggtgaaggcgtccagtatgttgaaccctggggaagtctgccgaatggacatcaagccaagtccagctgcttccaaagagtactttcagaaggtaaatcagtagatcacccatgtgtatctgcaccttctcaactgagagaagaaccacagttgaaacctgcttttatcattttcaagatggttatttgtagaaggcaaggaaccaattatgcttgtattcataagtattactctaaatgttttgtttttgtaattctggctaagaccttttaaacatggttagttgctagtacaaggaatcctttattggtaacatcttggtggctggctagctagtttctacagaacataatttgcctctatagaaggctattcttagatcatgtctcaatggaaacactcttctttcttagccttacttgaatcttgcctataataaagtagagcaacacacattgaaagcttctgatcaacggtcctgaaattttcatcttgaatgtctttgtattaaactgaattttcttttaagctaacaaagatcataattttcaatgattagccgtgtaactcctgcaatgaatgtttatgtgattgaagcaaatgtgaatcgtattattttaaaaagtggcagagtgacttaactgatcatgcatgatccctcatccctgaaattgagtttatgtagtcattttacttattttattcattagctaactttgtctatgtatatttctagatattgattagtgtaatcgattataaaggatatttatcaaatccagggattgcattttgaaattataattattttctttgctgaagtattcattgtaaaacatacaaaataaacatattttaaaacatttgcattttaccacca

SEQ ID NO: 311076 - DNA, 1459 bp, Homo sapiens
  misc_feature (12)..(12): n is a, c, g, or t
actgtaggctangtacgggctggtgggcactgaagatggcggctgctgtaggacggttgctccgagcgtcggttgcccgacatgtgagtgccattccttggggcatttctgccactgcagccctcaggcctgctgcatgtggaagaacgagcttgacaaatttattgtgttctggttccagtcaagcaaaattattcagcaccagttcctcatgccatgcacctgctgtcacccagcatgcaccctattttaagggtacagccgttgtcaatggagagttcaaagacctaagccttgatgactttaaggggaaatatttggtgcttttcttctatcctttggatttcacctttgtgtgtcctacagaaattgttgcttttagtgacaaagctaacgaatttcacgatgtgaactgtgaagttgtcgcagtctcagtggattcccactttagccatcttgcctggataaatacaccaagaaagaatggtggtttgggccacatgaacatcgcactcttgtcagacttaactaagcagatttcccgagactacggtgtgctgttagaaggttctggtcttgcactaagaggtctcttcataattgaccccaatggagtcatcaagcatttgagcgtcaacgatctcccagtgggccgaagcgtggaagaaaccctccgcttggtgaaggcgtccagtatgttgaaccctggggaagtctgccgaatggacatcaagccaagtccagctgcttccaaagagtactttcagaaggtaaatcagtagatcacccatgtgtatctgcaccttctcaactgagagaagaaccacagttgaaacctgcttttatcattttcaagatggttatttgtagaaggcaaggaaccaattatgcttgtattcataagtattactctaaatgttttgtttttgtaattctggctaagaccttttaaacatggttagttgctagtacaaggaatcctttattggtaacatcttggtggctggctagctagtttctacagaacataatttgcctctatagaaggctattcttagatcatgtctcaatggaaacactcttctttcttagccttacttgaatcttgcctataataaagtagagcaacacacattgaaagcttcggctggaagatggttctggcttcattttccatacaaactttttcaaatagctagtcaagtaaaaatttacctgttctaaagatgaggccaggcacggtggctcatgcccgtaatcccagcactttgagagcgtaaggtgggaggatcgcttgagcccaggaggtggaggctgcagtgagccgcgattgcaccactgcactccagcctgggtgacagagcaagactctgtctcaaaaaaactagttttcttttttataatatttattgggtactatccttttaaaatgtcccgttgaaaagctggggtcccgagc

SEQ ID NO: 311077 - DNA, 1563 bp, Homo sapiens
  misc_feature (12)..(12): n is a, c, g, or t
actgtaggctangtacgggctggtgggcactgaagatggcggctgctgtaggacggttgctccgagcgtcggttgcccgacatgtgagtgccattccttggggcatttctgccactgcagccctcaggcctgctgcatgtggaagaacgagcttgacaaatttattgtgttctggttccagtcaagcaaaattattcagcaccagttcctcatgccatgcacctgctgtcacccagcatgcaccctattttaagggtacagccgttgtcaatggagagttcaaagacctaagccttgatgactttaaggggaaatatttggtgcttttcttctatcctttggatttcacctttgtgtgtcctacagaaattgttgcttttagtgacaaagctaacgaatttcacgatgtgaactgtgaagttgtcgcagtctcagtggattcccactttagccatcttgcctggataaatacaccaagaaagaatggtggtttgggccacatgaacatcgcactcttgtcagacttaactaagcagatttcccgagactacggtgtgctgttagaaggttctggtcttgcactaagaggtctcttcataattgaccccaatggagtcatcaagcatttgagcgtcaacgatctcccagtgggccgaagcgtggaagaaaccctccgcttggtgaaggcgtccagtatgttgaaccctggggaagtctgccgaatggacatcaagccaagtccagctgcttccaaagagtactttcagaaggtaaatcagtagatcacccatgtgtatctgcaccttctcaactgagagaagaaccacagttgaaacctgcttttatcattttcaagatggttatttgtagaaggcaaggaaccaattatgcttgtattcataagtattactctaaatgttttgtttttgtaattctggctaagaccttttaaacatggttagttgctagtacaaggaatcctttattggtaacatcttggtggctggctagctagtttctacagaacataatttgcctctatagaaggctattcttagatcatgtctcaatggaaacactcttctttcttagccttacttgaatcttgcctatcatcttgaatgtctttgtattaaactgaattttcttttaagctaacaaagatcataattttcaatgattagccgtgtaactcctgcaatgaatgtttatgtgattgaagcaaatgtgaatcgtattattttaaaaagtggcagagtgacttaactgatcatgcatgatccctcatccctgaaattgagtttatgtagtcattttacttattttattcattagctaactttgtctatgtatatttctagatattgattagtgtaatcgattataaaggatatttatcaaatccagggattgcattttgaaattataattattttctttgctgaagtattcattgtaaaacatacaaaataaacatattttaaaacatttgcattttaccaccatttctataagtaatattgtacttcaaaatacaaaaaatatctcgagactagttctctc

SEQ ID NO: 311078 - DNA, 870 bp, Homo sapiens
  misc_feature (12)..(12): n is a, c, g, or t
  misc_feature (804)..(804): n is a, c, g, or t
actgtaggctangtacgggctggtgggcactgaagatggcggctgctgtaggacggttgctccgagcgtcggttgcccgacatgtgagtgccattccttggggcatttctgccactgcagccctcaggcctgctgcatgtggaagaacgagcttgacaaatttattgtgttctggttccagtcaagcaaaattattcagcaccagttcctcatgccatgcacctgctgtcacccagcatgcaccctattttaagggtacagccgttgtcaatggagagttcaaagacctaagccttgatgactttaaggggaaatatttggtgcttttcttctatcctttggatttcacctttgtgtgtcctacagaaattgttgcttttagtgacaaagctaacgaatttcacgatgtgaactgtgaagttgtcgcagtctcagtggattcccactttagccatcttgcctggataaatacaccaagaaagaatggtggtttgggccacatgaacatcgcactcttgtcagacttaactaagcagatttcccgagactacggtgtgctgttagaaggttctggtcttgcactaagaggtctcttcataattgaccccaatggagtcatcaagcatttgagcgtcaacgatctcccagtgggccgaagcgtggaagaaaccctccgcttggtgaaggcgtccagtatgttgaaccctggggaagtctgccgaatggaccggatttctagataagcagtcagtgttccaagagtcttcgagggaacggaaccccggttttgctttccacgggaanacccgggaccggttcactcagaggtggaagggcccgtttccccagggggcggacccaagggggacc

SEQ ID NO: 311079 - DNA, 1384 bp, Homo sapiens
ggcacgaggctttacatgagtttttaaatcctattttaaaacataaaagaaacaaatccatcattggccgcacagccccagccaccgccccccaaccagggagcaagaggagacgcctgggtcctgttccgcacgcggatttgctggtctgtttaactggtgtccattctcgcattataggcgtccagctgggcatccagctcctctgccgaaagctgctgctttgaattcctgccggcacctctgcctcttccacgggcgcctccgcgggtgcctctccgggtgcctccaccaccaccaaaacctccagcgccacggtttctagtcatgccacctctgtttacgctctgtgcaggcctccgctgtgcgtcaatctgtgacgtgacaagctgaatgtactgaagatggcggctgctgtaggacggttgctccgagcgtcgtcatcaagcatttgagcgtcaacgatctcccagtgggccgaagcgtggaagaaaccctccgcttggtgaaggcgtccagtatgttgaaccctggggaagtctgccgaatggacatcaagccaagtccagctgcttccaaagagtactttcagaaggtaaatcagtagatcacccatgtgtatctgcaccttctcaactgagagaagaaccacagttgaaacctgcttttatcattttcaagatggttatttgtagaaggcaaggaaccaattatgcttgtattcataagtattactctaaatgttttgtttttgtaattctggctaagaccttttaaacatggttagttgctagtacaaggaatcctttattggtaacatcttggtggctggctagctagtttctacagaacataatttgcctctatagaaggctattcttagatcatgtctcaatggaaacactcttctttcttagccttacttgaatcttgcctataataaagtagagcaacacacattgaaagcttctgatcaacggtcctgaaattttcatcttgaatgtctttgtattaaactgaattttcttttaagctaacaaagatcataattttcaatgattagccgtgtaactcctgcaatgaatgtttatgtgattgaagcaaatgtgaatcgtattattttaaaaagtggcagagtgacttaactgatcatgcatgatccctcatccctgaaattgagtttatgtagtcattttacttattttattcattagctaactttgtctatgtatatttctagatattgattagtgtaatcgattataaaggatatttatcaaatccagggattgcattttgaaattataattattttctttgctgaagtattcattgtaaaacatacaaaataaacatattttaaaacatttgcattttaccacca

SEQ ID NO: 311080 - DNA, 863 bp, Homo sapiens
  misc_feature (20)..(21): n is a, c, g, or t
ggtcgactctcgaggatttnncgatcggctagatcaagccaagtccagctgcttccaaagagtactttcagaaggtaaatcagtagatcacccatgtgtatctgcaccttctcaactgagagaagaaccacagttgaaacctgcttttatcattttcaagatggttatttgtagaaggcaaggaaccaattatgcttgtattcataagtattactctaaatgttttgtttttgtaattctggctaagaccttttaaacatggttagttgctagtacaaggaatcctttattggtaacatcttggtggctggctagctagtttctacagaacataatttgcctctatagaaggctattcttagatcatgtctcaatggaaacactcttctttcttagccttacttgaatcttgcctataataaagtagagcaacacacattgaaagcttctgatcaacggtcctgaaattttcatcttgaatgtctttgtattaaactgaattttcttttaagctaacaaagatcataattttcaatgattagccgtgtaactcctgcaatgaatgtttatgtgattgaagcaaatgtgaatcgtattattttaaaaagtggcagagtgacttaactgatcatgcatgatccctcatccctgaaattgagtttatgtagtcattttacttattttattcattagctaactttgtctatgtatatttctagatattgattagtgtaatcgattataaaggatatttatcaaatccagggattgcattttgaaattataattattttctttgctgaagtattcattgtaaaacatacaaaataaacatattttaaaacatttgcattttaccacca

SEQ ID NO: 311081 - DNA, 987 bp, Homo sapiens
ggcacgaggctttacatgagtttttaaatcctattttaaaacataaaagaaacaaatccatcattggccgcacagccccagccaccgccccccaaccagggagcaagaggagacgcctgggtcctgttccgcacgcggatttgctggtctgtttaactggtgtccattctcgcattataggcgtccagctgggcatccagctcctctgccgaaagctgctgctttgaattcctgccggcacctctgcctcttccacgggcgcctccgcgggtgcctctccgggtgcctccaccaccaccaaaacctccagcgccacggtttctagtcatgccacctctgtttacgctctgtgcaggcctccgctgtgcgtcaatctgtgacgtgacaagctgaatgtactgaagatggcggctgctgtaggacggttgctccgagcgtcggttgcccgacatgtgagtgccattccttggggcatttctgccactgcagccctcaggcctgctgcatgtggaagaacgagcttgacaaatttattgtgttctggttccagtcaagcaaaattattcagcaccagttcctcatgccatgcacctgctgtcacccagcatgcaccctattttaagggtacagccgttgtcaatggagagttcaaagacctaagccttgatgactttaaggggaaatatttggtgcttttcttctatcctttggatttcacctttgtgtgtcctacagaaattgttgcttttagtgacaaagctaacgaatttcacgatgtgaactgtgaagttgtcgcagtctcagtggattcccactttagccatcttgcctggataaatacaccaagaaagaatggtggtttgggccacatgaacatcgcactcttgtcagacttaactaagcagatttcccgagactacggtgtgctgttagaaggttctggtcttgcactaagactggctctcataattgccctggagtcatcgc

SEQ ID NO: 311082 - DNA, 1133 bp, Homo sapiens
ggcacgaggctttacatgagtttttaaatcctattttaaaacataaaagaaacaaatccatcattggccgcacagccccagccaccgccccccaaccagggagcaagaggagacgcctgggtcctgttccgcacgcggatttgctggtctgtttaactggtgtccattctcgcattataggcgtccagctgggcatccagctcctctgccgaaagctgctgctttgaattcctgccggcacctctgcctcttccacgggcgcctccgcgggtgcctctccgggtgcctccaccaccaccaaaacctccagcgccacggtttctagtcatgccacctctgtttacgctctgtgcaggcctccgctgtgcgtcaatctgtgacgtgacaagctgaatgtactgaagatggcggctgctgtaggacggttgctccgagcgtcggttgcccgacatgtgagtgccattccttggggcatttctgccactgcagccctcaggcctgctgcatgtggaagaacgagcttgacaaatttattgtgttctggttccagtcaagcaaaattattcagcaccacatgcaccctattttaagggtacagccgttgtcaatggagagttcaaagacctaagccttgatgactttaaggggaaatatttggtgcttttcttctatcctttggatttcacctttgtgtgtcctacagaaattgttgcttttagtgacaaagctaacgaatttcacgatgtgaactgtgaagttgtcgcagtctcagtggattcccactttagccatcttgcctggataaatacaccaagaaagaatggtggtttgggccacatgaacatcgcactcttgtcagacttaactaagcagatttcccgagactacggtgtgctgttagaaggttctggtcttgcactaagaggtctcttcataattgaccccaatggagtcatcaagcatttgagcgtcaacgatctcccagtgggccgaagcgtggaagaaaccctccgcttggtgaaggcgtccagtatgttgaaccctggggaagtctgccgaatggacgaatttcttcaacgtcctgggcaccgtttctcctcgagcaagcaagtcaagtttttcaaagagacttg

SEQ ID NO: 311083 - DNA, 1100 bp, Homo sapiens
ggcacgaggctttacatgagtttttaaatcctattttaaaacataaaagaaacaaatccatcattggccgcacagccccagccaccgccccccaaccagggagcaagaggagacgcctgggtcctgttccgcacgcggatttgctggtctgtttaactggtgtccattctcgcattataggcgtccagctgggcatccagctcctctgccgaaagctgctgctttgaattcctgccggcacctctgcctcttccacgggcgcctccgcgggtgcctctccgggtgcctccaccaccaccaaaacctccagcgccacggtttctagtcatgccacctctgtttacgctctgtgcaggcctccgctgtgcgtcaatctgtgacgtgacaagctgaatgtactgaagatggcggctgctgtaggacggttgctccgagcgtcggttgcccgacatgtgagtgccattccttggggcatttctgccactgcagccctcaggcctgctgcatgtggaagaacgagcttgacaaatttattgtgttctggttccagtcaagcaaaattattcagcaccacatgcaccctattttaagggtacagccgttgtcaatggagagttcaaagacctaagccttgatgactttaaggggaaatatttggtgcttttcttctatcctttggatttcacctttgtgtgtcctacagaaattgttgcttttagtgacaaagctaacgaatttcacgatgtgaactgtgaagttgtcgcagtctcagtggattcccactttagccatcttgcctggataaatacaccaagaaagaatggtggtttgggccacatgaacatcgcactcttgtcagacttaactaagcagatttcccgagactacggtgtgctgttagaaggttctggtcttgcactaagaggtttctcaatatccgacccccaaggaggaatcaagccattgaagcggtaacgctctccagtgcgctcgggggggctagcaacccgtcgcctcgtggaggttgtcccttttgttaaacatatgtgtattctgcccagcgccttgcccacggttcttttacttccatccttttcatt

SEQ ID NO: 311084 - DNA, 1080 bp, Homo sapiens
ggcacgaggctttacatgagtttttaaatcctattttaaaacataaaagaaacaaatccatcattggccgcacagccccagccaccgccccccaaccagggagcaagaggagacgcctgggtcctgttccgcacgcggatttgctggtctgtttaactggtgtccattctcgcattataggcgtccagctgggcatccagctcctctgccgaaagctgctgctttgaattcctgccggcacctctgcctcttccacgggcgcctccgcgggtgcctctccgggtgcctccaccaccaccaaaacctccagcgccacggtttctagtcatgccacctctgtttacgctctgtgcaggcctccgctgtgcgtcaatctgtgacgtgacaagctgaatgtactgaagatggcggctgctgtaggacggttgctccgagcgtcggttgcccgacatgtgagtgccattccttggggcatttctgccactgcagccctcaggcctgctgcatgtggaagaacgagcttgacaaatttattgtgttctggttccagtcaagcaaaattattcagcaccacatgcaccctattttaagggtacagccgttgtcaatggagagttcaaagacctaagccttgatgactttaaggggaaatatttggtgcttttcttctatcctttggatttcacctttgtgtgtcctacagaaattgttgcttttagtgacaaagctaacgaatttcacgatgtgaactgtgaagttgtcgcagtctcagtggattcccactttagccatcttgcctggataaatacaccaagaaagaatggtggtttgggccacatgaacatcgcactcttgtcagacttaactaagcagatttcccgagactacggtgtgctgttagaaggttctggtcttgcactaagtcaaccgctcggtcctcgtctaaatggtctttttacagctttacctacggcatcttacagcatttcgtctccatgtgctccaaatggtctatcctgtcacaaatcttcgcttgcccatccgtccccgctcccatgctccctatactctagctacctc

SEQ ID NO: 311085 - DNA, 1113 bp, Homo sapiens
ggcacgaggctttacatgagtttttaaatcctattttaaaacataaaagaaacaaatccatcattggccgcacagccccagccaccgccccccaaccagggagcaagaggagacgcctgggtcctgttccgcacgcggatttgctggtctgtttaactggtgtccattctcgcattataggcgtccagctgggcatccagctcctctgccgaaagctgctgctttgaattcctgccggcacctctgcctcttccacgggcgcctccgcgggtgcctctccgggtgcctccaccaccaccaaaacctccagcgccacggtttctagtcatgccacctctgtttacgctctgtgcaggcctccgctgtgcgtcaatctgtgacgtgacaagctgaatgtactgaagatggcggctgctgtaggacggttgctccgagcgtcggttgcccgacatgtgagtgccattccttggggcatttctgccactgcagccctcaggcctgctgcatgtggaagaacgagcttgacaaatttattgtgttctggttccagtcaagcaaaattattcagcaccagttcctcatgccatgcacctgctgtcacccagcatgcaccctattttaagggtacagccgttgtcaatggagagttcaaagacctaagccttgatgactttaaggggccagttgtcgcttttagtgccaacgctaacgcctttcactgatgtgatctgtgtagtttgttgtagtttcattggattcccactttagcccttccgcctggttacactcaccaggactgaatgttggtttgagccctttgtaccattgactattttcaggcgttagctagtcgattttcctgagcctccggcctttcgtcctccatggtctcccccccttgcctccatgagtccctctccattctttcccccacctggcggcgctcagccttttgatcgcgccactcatcctctacctgccccccaactcttcttgatacctctccgcttgtttatggttttttcaattttccactctcttgacgctggcttctcatagaatctattctttttgtcttttcgcgtatagcttattcgttcctctcacctccca

SEQ ID NO: 311086 - DNA, 611 bp, Homo sapiens
  misc_feature (588)..(588): n is a, c, g, or t
  misc_feature (598)..(598): n is a, c, g, or t
ggcacgaggctttacatgagtttttaaatcctattttaaaacataaaagaaacaaatccatcattggccgcacagccccagccaccgccccccaaccagggagcaagaggagacgcctgggtcctgttccgcacgcggatttgctggtctgtttaactggtgtccattctcgcattataggcgtccagctgggcatccagctcctctgccgaaagctgctgctttgaattcctgccggcacctctgcctcttccacgggcgcctccgcgggtgcctctccgggtgcctccaccaccaccaaaacctccagcgccacggtttctagtcatgccacctctgtttacgctctgtgcaggcctccgctgtgcgtcaatctgtgacgtgacaagctgaatgtactgaagatggcggctgctgtaggacggttgctccgagcgtcggttgcccgacatgtgagtgccattccttggggcatttctgccactgcagccctcaggcctgctgcatgtggaagaacgagcttgacaaatttattgtgttctggttccagtcaagcaaaattattcagcaccaggccgcttttttttntttttttttnttttttttttttg

SEQ ID NO: 311087 - DNA, 1899 bp, Homo sapiens
ggcacgaggctttacatgagtttttaaatcctattttaaaacataaaagaaacaaatccatcattggccgcacagccccagccaccgccccccaaccagggagcaagaggagacgcctgggtcctgttccgcacgcggatttgctggtctgtttaactggtgtccattctcgcattataggcgtccagctgggcatccagctcctctgccgaaagctgctgctttgaattcctgccggcacctctgcctcttccacgggcgcctccgcgggtgcctctccgggtgcctccaccaccaccaaaacctccagcgccacggtttctagtcatgccacctctgtttacgctctgtgcaggcctccgctgtgcgtcaatctgtgacgtgacaagctgaatgtactgaagatggcggctgctgtaggacggttgctccgagcgtcggttgcccgacatgtgagtgccattccttggggcatttctgccactgcagccctcaggcctgctgcatgtggaagaacgagcttgacaaatttattgtgttctggttccagtcaagcaaaattattcagcaccagttcctcatgccatgcacctgctgtcacccagcatgcaccctattttaagggtacagccgttgtcaatggagagttcaaagacctaagccttgatgactttaaggggaaatatttggtgcttttcttctatcctttggatttcacctttgtgtgtcctacagaaattgttgcttttagtgacaaagctaacgaatttcacgatgtgaactgtgaagttgtcgcagtctcagtggattcccactttagccatcttgcctggataaatacaccaagaaagaatggtggtttgggccacatgaacatcgcactcttgtcagacttaactaagcagatttcccgagactacggtgtgctgttagaaggttctggtcttgcactaagtcatcaagcatttgagcgtcaacgatctcccagtgggccgaagcgtggaagaaaccctccgcttggtgaaggcgtccagtatgttgaaccctggggaagtctgccgaatggacatcaagccaagtccagctgcttccaaagagtactttcagaaggtaaatcagtagatcacccatgtgtatctgcaccttctcaactgagagaagaaccacagttgaaacctgcttttatcattttcaagatggttatttgtagaaggcaaggaaccaattatgcttgtattcataagtattactctaaatgttttgtttttgtaattctggctaagaccttttaaacatggttagttgctagtacaaggaatcctttattggtaacatcttggtggctggctagctagtttctacagaacataatttgcctctatagaaggctattcttagatcatgtctcaatggaaacactcttctttcttagccttacttgaatcttgcctataataaagtagagcaacacacattgaaagcttctgatcaacggtcctgaaattttcatcttgaatgtctttgtattaaactgaattttcttttaagctaacaaagatcataattttcaatgattagccgtgtaactcctgcaatgaatgtttatgtgattgaagcaaatgtgaatcgtattattttaaaaagtggcagagtgacttaactgatcatgcatgatccctcatccctgaaattgagtttatgtagtcattttacttattttattcattagctaactttgtctatgtatatttctagatattgattagtgtaatcgattataaaggatatttatcaaatccagggattgcattttgaaattataattattttctttgctgaagtattcattgtaaaacatacaaaataaacatattttaaaacatttgcattttaccacca

SEQ ID NO: 311088 - DNA, 1423 bp, Homo sapiens
  misc_feature (12)..(12): n is a, c, g, or t
actgtaggctangtacgggctggtgggcactgaagatggcggctgctgtaggacggttgctccgagcgtcggttgcccgacatgtgagtgccattccttggggcatttctgccactgcagccctcaggcctgctgcatgtggaagaacgagcttgacaaatttattgtgttctggttccagtcaagcaaaattattcagcaccagttcctcatgccatgcacctgctgtcacccagcatgcaccctattttaagggtacagccgttgtcaatggagagttcaaagacctaagccttgatgactttaaggggaaatatttggtgcttttcttctatcctttggatttcacctttgtgtgtcctacagaaattgttgcttttagtgacaaagctaacgaatttcacgatgtgaactgtgaagttgtcgcagtctcagtggattcccactttagccatcttgcctggataaatacaccaagaaagaatggtggtttgggccacatgaacatcgcactcttgtcagacttaactaagcagatttcccgagactacggtgtgctgttagaaggttctggtcttgcactaagaggtctcttcataattgaccccaatggagtcatcaagcatttgagcgtcaacgatctcccagtgggccgaagcgtggaagaaaccctccgcttggtgaaggcgtccagtatgttgaaccctggggaagtctgccgaatggacatcaagccaagtccagctgcttccaaagagtactttcagaaggtaaatcagtagatcacccatgtgtatctgcaccttctcaactgagagaagaaccacagttgaaacctgcttttatcattttcaagatggttatttgtagaaggcaaggaaccaattatgcttgtattcataagtattactctaaatgttttgtttttgtaattctggctaagaccttttaaacatggttagttgctagtacaaggaatcctttattggtaacatcttggtggctggctagctagtttctacagaacataatttgcctctatagaaggctattcttagatcatgtctcaatggaaacactcttctttcttagccttacttgaatcttgcctataataaagtagagcaacacacattgaaagcttcaagcttctcaacgcttggtcttgtcccattcttcacgaatttatttattctttgtctaaacaggtataggatcttcttagtctaacaggtatagttaagggttttcattctcttgtgaaggctcctatatatatttaaaaattaggcaagatttgaatgctttttttctaggtcttgtccaattcttcacgactttatttattcttagtctaaaaggtataggatcttctttgtctaaaaggtatagttcacggtttacattctcttgtgaaggctcc

SEQ ID NO: 311089 - DNA, 2054 bp, Homo sapiens
ggcacgaggctttacatgagtttttaaatcctattttaaaacataaaagaaacaaatccatcattggccgcacagccccagccaccgccccccaaccagggagcaagaggagacgcctgggtcctgttccgcacgcggatttgctggtctgtttaactggtgtccattctcgcattataggcgtccagctgggcatccagctcctctgccgaaagctgctgctttgaattcctgccggcacctctgcctcttccacgggcgcctccgcgggtgcctctccgggtgcctccaccaccaccaaaacctccagcgccacggtttctagtcatgccacctctgtttacgctctgtgcaggcctccgctgtgcgtcaatctgtgacgtgacaagctgaatgtactgaagatggcggctgctgtaggacggttgctccgagcgtcggttgcccgacatgtgagtgccattccttggggcatttctgccactgcagccctcaggcctgctgcatgtggaagaacgagcttgacaaatttattgtgttctggttccagtcaagcaaaattattcagcaccagttcctcatgccatgcacctgctgtcacccagcatgcaccctattttaagggtacagccgttgtcaatggagagttcaaagacctaagccttgatgactttaaggggaaatatttggtgcttttcttctatcctttggatttcacctttgtgtgtcctacagaaattgttgcttttagtgacaaagctaacgaatttcacgatgtgaactgtgaagttgtcgcagtctcagtggattcccactttagccatcttgcctggataaatacaccaagaaagtagagacggggtgtctccatgttggtcacgctggtctcgaactcctgacctcaggtgatccgcccaccttggcctcccaaagtgccggaattacaggcatgagccaccacacctggcctactcaagaatggtggtttgggccacatgaacatcgcactcttgtcagacttaactaagcagatttcccgagactacggtgtgctgttagaaggttctggtcttgcactaagaggtctcttcataattgaccccaatggagtcatcaagcatttgagcgtcaacgatctcccagtgggccgaagcgtggaagaaaccctccgcttggtgaaggcgtccagtatgttgaaccctggggaagtctgccgaatggacatcaagccaagtccagctgcttccaaagagtactttcagaaggtaaatcagtagatcacccatgtgtatctgcaccttctcaactgagagaagaaccacagttgaaacctgcttttatcattttcaagatggttatttgtagaaggcaaggaaccaattatgcttgtattcataagtattactctaaatgttttgtttttgtaattctggctaagaccttttaaacatggttagttgctagtacaaggaatcctttattggtaacatcttggtggctggctagctagtttctacagaacataatttgcctctatagaaggctattcttagatcatgtctcaatggaaacactcttctttcttagccttacttgaatcttgcctataataaagtagagcaacacacattgaaagcttctgatcaacggtcctgaaattttcatcttgaatgtctttgtattaaactgaattttcttttaagctaacaaagatcataattttcaatgattagccgtgtaactcctgcaatgaatgtttatgtgattgaagcaaatgtgaatcgtattattttaaaaagtggcagagtgacttaactgatcatgcatgatccctcatccctgaaattgagtttatgtagtcattttacttattttattcattagctaactttgtctatgtatatttctagatattgattagtgtaatcgattataaaggatatttatcaaatccagggattgcattttgaaattataattattttctttgctgaagtattcattgtaaaacatacaaaataaacatattttaaaacatttgcattttaccacca

SEQ ID NO: 311090 - DNA, 1795 bp, Homo sapiens
ggcacgaggctttacatgagtttttaaatcctattttaaaacataaaagaaacaaatccatcattggccgcacagccccagccaccgccccccaaccagggagcaagaggagacgcctgggtcctgttccgcacgcggatttgctggtctgtttaactggtgtccattctcgcattataggcgtccagctgggcatccagctcctctgccgaaagctgctgctttgaattcctgccggcacctctgcctcttccacgggcgcctccgcgggtgcctctccgggtgcctccaccaccaccaaaacctccagcgccacggtttctagtcatgccacctctgtttacgctctgtgcaggcctccgctgtgcgtcaatctgtgacgtgacaagctgaatgtactgaagatggcggctgctgtaggacggttgctccgagcgtcggttcctcatgccatgcacctgctgtcacccagcatgcaccctattttaagggtacagccgttgtcaatggagagttcaaagacctaagccttgatgactttaaggggaaatatttggtgcttttcttctatcctttggatttcacctttgtgtgtcctacagaaattgttgcttttagtgacaaagctaacgaatttcacgatgtgaactgtgaagttgtcgcagtctcagtggattcccactttagccatcttgcctggataaatacaccaagaaagaatggtggtttgggccacatgaacatcgcactcttgtcagacttaactaagcagatttcccgagactacggtgtgctgttagaaggttctggtcttgcactaagaggtctcttcataattgaccccaatggagtcatcaagcatttgagcgtcaacgatctcccagtgggccgaagcgtggaagaaaccctccgcttggtgaaggcgtccagtatgttgaaccctggggaagtctgccgaatggacatcaagccaagtccagctgcttccaaagagtactttcagaaggtaaatcagtagatcacccatgtgtatctgcaccttctcaactgagagaagaaccacagttgaaacctgcttttatcattttcaagatggttatttgtagaaggcaaggaaccaattatgcttgtattcataagtattactctaaatgttttgtttttgtaattctggctaagaccttttaaacatggttagttgctagtacaaggaatcctttattggtaacatcttggtggctggctagctagtttctacagaacataatttgcctctatagaaggctattcttagatcatgtctcaatggaaacactcttctttcttagccttacttgaatcttgcctataataaagtagagcaacacacattgaaagcttctgatcaacggtcctgaaattttcatcttgaatgtctttgtattaaactgaattttcttttaagctaacaaagatcataattttcaatgattagccgtgtaactcctgcaatgaatgtttatgtgattgaagcaaatgtgaatcgtattattttaaaaagtggcagagtgacttaactgatcatgcatgatccctcatccctgaaattgagtttatgtagtcattttacttattttattcattagctaactttgtctatgtatatttctagatattgattagtgtaatcgattataaaggatatttatcaaatccagggattgcattttgaaattataattattttctttgctgaagtattcattgtaaaacatacaaaataaacatattttaaaacatttgcattttaccacca

SEQ ID NO: 311091 - DNA, 1653 bp, Homo sapiens
ggcacgaggctttacatgagtttttaaatcctattttaaaacataaaagaaacaaatccatcattggccgcacagccccagccaccgccccccaaccagggagcaagaggagacgcctgggtcctgttccgcacgcggatttgctggtctgtttaactggtgtccattctcgcattataggcgtccagctgggcatccagctcctctgccgaaagctgctgctttgaattcctgccggcacctctgcctcttccacgggcgcctccgcgggtgcctctccgggtgcctccaccaccaccaaaacctccagcgccacggtttctagtcatgccacctctgtttacgctctgtgcaggcctccgctgtgcgtcaatctgtgacgtgacaagctgaatgtactgaagatggcggctgctgtaggacggttgctccgagcgtcgcacctttgtgtgtcctacagaaattgttgcttttagtgacaaagctaacgaatttcacgatgtgaactgtgaagttgtcgcagtctcagtggattcccactttagccatcttgcctggataaatacaccaagaaagaatggtggtttgggccacatgaacatcgcactcttgtcagacttaactaagcagatttcccgagactacggtgtgctgttagaaggttctggtcttgcactaagaggtctcttcataattgaccccaatggagtcatcaagcatttgagcgtcaacgatctcccagtgggccgaagcgtggaagaaaccctccgcttggtgaaggcgtccagtatgttgaaccctggggaagtctgccgaatggacatcaagccaagtccagctgcttccaaagagtactttcagaaggtaaatcagtagatcacccatgtgtatctgcaccttctcaactgagagaagaaccacagttgaaacctgcttttatcattttcaagatggttatttgtagaaggcaaggaaccaattatgcttgtattcataagtattactctaaatgttttgtttttgtaattctggctaagaccttttaaacatggttagttgctagtacaaggaatcctttattggtaacatcttggtggctggctagctagtttctacagaacataatttgcctctatagaaggctattcttagatcatgtctcaatggaaacactcttctttcttagccttacttgaatcttgcctataataaagtagagcaacacacattgaaagcttctgatcaacggtcctgaaattttcatcttgaatgtctttgtattaaactgaattttcttttaagctaacaaagatcataattttcaatgattagccgtgtaactcctgcaatgaatgtttatgtgattgaagcaaatgtgaatcgtattattttaaaaagtggcagagtgacttaactgatcatgcatgatccctcatccctgaaattgagtttatgtagtcattttacttattttattcattagctaactttgtctatgtatatttctagatattgattagtgtaatcgattataaaggatatttatcaaatccagggattgcattttgaaattataattattttctttgctgaagtattcattgtaaaacatacaaaataaacatattttaaaacatttgcattttaccacca

SEQ ID NO: 311092 - DNA, 993 bp, Homo sapiens
ggcacgaggctttacatgagtttttaaatcctattttaaaacataaaagaaacaaatccatcattggccgcacagccccagccaccgccccccaaccagggagcaagaggagacgcctgggtcctgttccgcacgcggatttgctggtctgtttaactggtgtccattctcgcattataggcgtccagctgggcatccagctcctctgccgaaagctgctgctttgaattcctgccggcacctctgcctcttccacgggcgcctccgcgggtgcctctccgggtgcctccaccaccaccaaaacctccagcgccacggtttctagtcatgccacctctgtttacgctctgtgcaggcctccgctgtgcgtcaatctgtgacgtgacaagctgaatgtactgaagatggcggctgctgtaggacggttgctccgagcgtcggttgcccgacatgtgagtgccattccttggggcatttctgccactgcagccctcaggcctgctgcatgtggaagaacgagcttgacaaatttattgtgttctggttccagtcaagcaaaattattcagcaccagttcctcatgccatgcacctgctgtcacccagcatgcaccctattttaagggtacagccgttgtcaatggagagttcaaagacctaagccttgatgactttaaggggaaatatttggtgcttttcttctatcctttggatttcacctttgtgtgtcctacagaaattgttgcttttagtgacaaagctaacgaatttcacgatgtgaactgtgaagttgtcgcagtctcagtggattcccactttagccatcttgcctggataaatacaccaagaaagaatggtggtttgggccacatgaacatcgcactcttgtcagacttaactaagcagatttcccgagactacggtgtgctgttagaaggttctggtcttgcactaaggcaccgagcatttgagccccaactatttcccagtgggc

SEQ ID NO: 311093 - DNA, 1084 bp, Homo sapiens
ggcacgaggctttacatgagtttttaaatcctattttaaaacataaaagaaacaaatccatcattggccgcacagccccagccaccgccccccaaccagggagcaagaggagacgcctgggtcctgttccgcacgcggatttgctggtctgtttaactggtgtccattctcgcattataggcgtccagctgggcatccagctcctctgccgaaagctgctgctttgaattcctgccggcacctctgcctcttccacgggcgcctccgcgggtgcctctccgggtgcctccaccaccaccaaaacctccagcgccacggtttctagtcatgccacctctgtttacgctctgtgcaggcctccgctgtgcgtcaatctgtgacgtgacaagctgaatgtactgaagatggcggctgctgtaggacggttgctccgagcgtcggttgcccgacatgtgagtgccattccttggggcatttctgccactgcagccctcaggcctgctgcatgtggaagaacgagcttgacaaatttattgtgttctggttccagtcaagcaaaattattcagcaccagttcctcatgccatgcacctgctgtcacccagcatgcaccctattttaagggtacagccgttgtcaatggagagttcaaagacctaagccttgatgactttaaggggaaatatttggtgcttttcttctatcctttggatttcacctttgtgtgtcctacagaaattgttgcttttagtgacaaagctaacgaatttcacgatgtgaactgtgaagttgtcgcagtctcagtggattcccactttagccatcttgcctggataaatacaccaagaaagaatggtggtttgggccacatgaacatcgcactcttgtcagacttaactaagcagatttcccgagactacggtgtgctgttagaaggttctggtcttgcactaagaaggtaagatcctgtttctgatgaacttaagattatttttcatgtttagtatcattctgcttcttaggggatttatgtagaccttggtaaagcatttttaaaaccagaagatcctggctgggcatggtg

SEQ ID NO: 311094 - DNA, 1200 bp, Homo sapiens
ggcacgaggctttacatgagtttttaaatcctattttaaaacataaaagaaacaaatccatcattggccgcacagccccagccaccgccccccaaccagggagcaagaggagacgcctgggtcctgttccgcacgcggatttgctggtctgtttaactggtgtccattctcgcattataggcgtccagctgggcatccagctcctctgccgaaagctgctgctttgaattcctgccggcacctctgcctcttccacgggcgcctccgcgggtgcctctccgggtgcctccaccaccaccaaaacctccagcgccacggtttctagtcatgccacctctgtttacgctctgtgcaggcctccgctgtgcgtcaatctgtgacgtgacaagctgaatgtactgaagatggcggctgctgtaggacggttgctccgagcgtcggttgcccgacatgtgagtgccattccttggggcatttctgccactgcagccctcaggcctgctgcatgtggaagaacgagcttgacaaatttattgtgttctggttccagtcaagcaaaattattcagcaccagttcctcatgccatgcacctgctgtcacccagcatgcaccctattttaagggtacagccgttgtcaatggagagttcaaagacctaagccttgatgactttaaggggaaatatttggtgcttttcttctatcctttggatttcacctttgtgtgtcctacagaaattgttgcttttagtgacaaagctaacgaatttcacgatgtgaactgtgaagttgtcgcagtctcagtggattcccactttagccatcttgcctggataaatacaccaagaaagggtatggcattgtacccctagcttttgctcttataaacttgtttggaagaatctaaatttctagctatgctgctggactatcaagatcaaattacgcaagggttgggttttttttgttttttttttttgagacggagcttcactccagcctgggcgacagagcgagactccatctcaaaataaataaataaataaataaaataataaagaattagaaaaagcatctgtagtcccagctactcaggagactggggtaggatgattgcatgagcccaggagtttgaggctgctgtgagctgtgattgcatcactgcattccagcctggtgacagcgagactctgtgtctta

SEQ ID NO: 311095 - DNA, 989 bp, Homo sapiens
ggcacgaggctttacatgagtttttaaatcctattttaaaacataaaagaaacaaatccatcattggccgcacagccccagccaccgccccccaaccagggagcaagaggagacgcctgggtcctgttccgcacgcggatttgctggtctgtttaactggtgtccattctcgcattataggcgtccagctgggcatccagctcctctgccgaaagctgctgctttgaattcctgccggcacctctgcctcttccacgggcgcctccgcgggtgcctctccgggtgcctccaccaccaccaaaacctccagcgccacggtttctagtcatgccacctctgtttacgctctgtgcaggcctccgctgtgcgtcaatctgtgacgtgacaagctgaatgtactgaagatggcggctgctgtaggacggttgctccgagcgtcggttgcccgacatgtgagtgccattccttggggcatttctgccactgcagccctcaggcctgctgcatgtggaagaacgagcttgacaaatttattgtgttctggttccagtcaagcaaaattattcagcaccacatgcaccctattttaagggtacagccgttgtcaatggagagttcaaagacctaagccttgatgactttaaggggaaatatttggtgcttttcttctatcctttggatttcacctttgtgtgtcctacagaaattgttgcttttagtgacaaagctaacgaatttcacgatgtgaactgtgaagttgtcgcagtctcagtggattcccactttagccatcttgcctggataaatacaccaagaaagtgacaagatggcggtttggtccatatttacattcgacttcttgcagacttacctaagaacatttccgggacctagtttagctggtagatggtttagtcttgaacttaaaggttgcttcataatgtccctattgtggtcatatatcattttaccgtaccgttttcaattat

SEQ ID NO: 311096 - DNA, 982 bp, Homo sapiens
ggcacgaggctttacatgagtttttaaatcctattttaaaacataaaagaaacaaatccatcattggccgcacagccccagccaccgccccccaaccagggagcaagaggagacgcctgggtcctgttccgcacgcggatttgctggtctgtttaactggtgtccattctcgcattataggcgtccagctgggcatccagctcctctgccgaaagctgctgctttgaattcctgccggcacctctgcctcttccacgggcgcctccgcgggtgcctctccgggtgcctccaccaccaccaaaacctccagcgccacggtttctagtcatgccacctctgtttacgctctgtgcaggcctccgctgtgcgtcaatctgtgacgtgacaagctgaatgtactgaagatggcggctgctgtaggacggttgctccgagcgtcggttgcccgacatgtgagtgccattccttggggcatttctgccactgcagccctcaggcctgctgcatgtggaagaacgagcttgacaaatttattgtgttctggttccagtcaagcaaaattattcagcaccattattcatgcccagttcctcatgccatgcacctgctgtcacccatcatgcactctatattcagggttcacttcgttgttccggggcagttttcgatcgtttcgcccgtttgctgcttctggggtactctatccccgcgatgcccccgcaccgttgttgatttggtggtggtgttttagggtgggttttgttgtttgtttgagttttagctctatgatgggttgtcctgttgttttgtcgaataaggacggtatcttcctccttttcctatttttttctccatcctcctctcacacatccctctcctccactccgccgcccgccctcctaccccttttctctcctcgctcctttgtccttcttttgatctttattcacattcttcctctcctccattctccttctctttt

SEQ ID NO: 311097 - DNA, 913 bp, Homo sapiens
ggcggcgagcggaatgcagcggcccgaggcctggccacgtccgcacccgggggagggggccgcggcggcccaggccgggggcccggcgccgcctgctcgagccggggagccctcggggctgcggttgcaggaaccttccctctacaccatcaaggctgttttcatcctagataatgacgggcgccggctgctggccaagtattatgatgacacattcccctccatgaaggagcagatggttttcgagaaaaatgtcttcaacaagaccagccggactgagagtgagattgcattttttgggggtatgaccatcgtctacaagaacagcattgacctcttcctatacgtggtgggctcatcctacgagaatgagctgatgctcatgtctgttctcacctgcctgtttgagtctctgaaccacatgttaaggaagaacgtggagaagcgctggttgctggagaacatggacggagccttcttggtgctggacgagattgtggatggcggtgtgattctggagagtgacccccagcaagtgatccagaaggtgaattttagggcagatgatggcggcttgactgaacagagtgtggcccaggttcttcagtctgccaaggaacaaattaaatggtcgttattgaaatgaaggctgtggattcaaggctccctgccccccagatcatttccccaatcctggcaaaagcccaaagatcccagggtcaggagagacccctctgtatccccaggtccctcccagaactgactcctaaggtctccagccagggcttctgagatgcaaaggtttggcctcaggagagtcaccttttctcacggccctggccttaactcatatcttaggcattcctggccccagggccctaataaacctgcttttgtcttctgaaaaaaaaaa

SEQ ID NO: 311098 - DNA, 725 bp, Homo sapiens
tctccttcccagtccttgtttggtgaggggtgaatgaggcagtctttggagagtggggtcagcctcacctaggcagggactcagttcctcccagccacagggaggctcaggagcttgtgtccaccttcaggaagaacgtggagaagcgctggttgctggagaacatggacggagccttcttggtgctggacgagattgtggatggcgggtgaggaggggacagtcagggacactcacagcaggagtgcctttgataatcatcagccccagatggcacccagcatggctagaactctgaccaacttctcactcccttcccccagcatattcccagggatcccattcccctagcccttccccttactagcgccccactcatgaagatagaagttgatttcaatgttagccaaagtcaagccaaacaagagactaacctgatgtcaaactatgggagactgttgaataggcagggtttggggaaaatccagtttggtctccaatgcccaggggaagcactggcacagatgctggccctctctggaaggacttcagacagtcccaccagccccacatgtcctgctcttagggctcaattccaacacaagctagatgcgtgacctgggtcaattactgaccctccccgaggcttactttctccatctttaggatggaggtaataagggattgtggggattaaatacatgtgtgagaagataaatgtgaag

SEQ ID NO: 311099 - DNA, 566 bp, Homo sapiens
ggcggcgagcggaatgcagcggcccgaggcctggccacgtccgcacccgggggagggggccgcggcggcccaggccgggggcccggcgccgcctgctcgagccggggagccctcggggctgcggttgcaggaaccttccctctacaccatcaaggctgttttcatcctagataatgacgggcgccggctgctggccaagtgtgattctggagagtgacccccagcaagtgatccagaaggtgaattttagggttcttcagtctgccaaggaacaaattaaatggtcgttattgaaatgaaggctgtggattcaaggctccctgccccccagatcatttccccaatcctggcaaaagcccaaagatcccagggtcaggagagacccctctgtatccccaggtccctcccagaactgactcctaaggtctccagccagggcttctgagatgcaaaggtttggcctcaggagagtcaccttttctcacggccctggccttaactcatatcttaggcattcctggccccagggccctaataaacctgcttttgtcttctgaaaaaaaaaa

SEQ ID NO: 311100 - DNA, 409 bp, Homo sapiens
  misc_feature (46)..(46): n is a, c, g, or t
ccagtggtccgtgtggatctggcacatgacccccacagtgatccanaagtgaattttagggcagatgatggcggcttgactgaacagagtgtgggttcttcagtctgccaaggaacaaattaaatggtcgttattgaaatgaaggctgtggattcaaggctccctgccccccagatcatttccccaatcctggcaaaagcccaaagatcccagggtcaggagagacccctctgtatccccaggtccctcccagaactgactcctaaggtctccagccagggcttctgagatgcaaaggtttggcctcaggagagtcaccttttctcacggccctggccttaactcatatcttaggcattcctggccccagggccctaataaacctgcttttgtcttctgaaaaaaaaaa

SEQ ID NO: 311101 - DNA, 375 bp, Homo sapiens
  misc_feature (46)..(46): n is a, c, g, or t
ccagtggtccgtgtggatctggcacatgacccccacagtgatccanaagtgaattttagggttcttcagtctgccaaggaacaaattaaatggtcgttattgaaatgaaggctgtggattcaaggctccctgccccccagatcatttccccaatcctggcaaaagcccaaagatcccagggtcaggagagacccctctgtatccccaggtccctcccagaactgactcctaaggtctccagccagggcttctgagatgcaaaggtttggcctcaggagagtcaccttttctcacggccctggccttaactcatatcttaggcattcctggccccagggccctaataaacctgcttttgtcttctgaaaaaaaaaa

SEQ ID NO: 311102 - DNA, 1576 bp, Homo sapiens
gccttcgcggcgggcgatgttagtgggcttgggcgttgggtgaagtatccaggttgggcgcttccagcgctttctgtggcgggggaatgaaggcctaggtcagggaataggaaggtgtatcgccgccagagtgcggaacaccctcgccttgagggttcccacagtgacttgcaaaagtctagtgagacccgagaatgctgaggcgggacacgaagcatgtggttcttgtggttgcgacgctcgtgccgccatcttgggtgctggcggcggaaaccggtaccccaacttcccctcggtgcgaacctggagaagccaccccagctgtgagggacggttgcgcctcatggcccaggcaagggtaccttcgctggagcagtaccgcggacggatatcatgagggtggtgggacgttggcggaacgttggcggaacgttggcggtgtgagaggtgtggggtaatggcgattttgtcatggtagaaacagcccaaaggacccccctcgtttggcctcccacgcagcttagtcttgcttttttagggatgtttctcattttttaatttctccagtcccatctggttatattgccaaaacatgtttgtgactctcaaacgttagtttactcccagcatcacttggggagcttgctaagctacgaattccgaggtcccactggagagtctgatttaatgaccctggagtggcggccggataacctgcctgctggggtgattttaacgcagctgatgcgaagaccccatttagggaatcattgggttggcgtttgcaatgcgttcctcccagctataggacaaagaggtgtcaactcaactgtgtcttcttagaagagcccattatttatagtattatgatgacacattcccctccatgaaggagcagatggttttcgagaaaaatgtcttcaacaagaccagccggactgagagtgagattgcattttttgggggtatgaccatcgtctacaagaacagcattgacctcttcctatacgtggtgggctcatcctacgagaatgagctgatgctcatgtctgttctcacctgcctgtttgagtctctgaaccacatgttaaggaagaacgtggagaagcgctggttgctggagaacatggacggagccttcttggtgctggacgagattgtggatggcggtgtgattctggagagtgacccccagcaagtgatccagaaggtgaattttagggcagatgatggcggcttgactgaacagagtgtggcccaggttcttcagtctgccaaggaacaaattaaatggtcgttattgaaatgaaggctgtggattcaaggctccctgccccccagatcatttccccaatcctggcaaaagcccaaagatcccagggtcaggagagacccctctgtatccccaggtccctcccagaactgactcctaaggtctccagccagggcttctgagatgcaaaggtttggcctcaggagagtcaccttttctcacggccctggccttaactcatatcttaggcattcctggccccagggccctaataaacctgcttttgtcttctgaaaaaaaaaa

SEQ ID NO: 311103 - DNA, 1520 bp, Homo sapiens
gccttcgcggcgggcgatgttagtgggcttgggcgttgggtgaagtatccaggttgggcgcttccagcgctttctgtggcgggggaatgaaggcctaggtcagggaataggaaggtgtatcgccgccagagtgcggaacaccctcgccttgagggttcccacagtgacttgcaaaagtctagtgagacccgagaatgctgaggcgggacacgaagcatgtggttcttgtggttgcgacgctcgtgccgccatcttgggtgctggcggcggaaaccggtaccccaacttcccctcggtgcgaacctggagaagccaccccagctgtgagggacggttgcgcctcatggcccaggcaagggtaccttcgctggagcagtaccgcggacggatatcatgagggtggtgggacgttggcggaacgttggcggaacgttggcggtgtgagaggtgtggggtaatggcgattttgtcatggtagaaacagcccaaaggacccccctcgtttggcctcccacgcagcttagtcttgcttttttagggatgtttctcattttttaatttctccagtcccatctggttatattgccaaaacatgtttgtgactctcaaacgttagtttactcccagcatcacttggggagcttgctaagctacgaattccgaggtcccactggagagtctgatttaatgaccctggagtggcggccggataacctgcctgctggggtgattttaacgcagctgatgcgaagaccccatttagggaatcattgggttggcgtttgcaatgcgttcctcccagctataggacaaagaggtgtcaactcaactgtgtcttcttagaagagcccattatttatagtattatgatgacacattcccctccatgaaggagcagatggttttcgagaaaaatgtcttcaacaagaccagccggactgagagtgagattgcattttttgggggtatgaccatcgtctacaagaacagcattgacctcttcctatacgtggtgggctcatcctacgagaatgaggaagaacgtggagaagcgctggttgctggagaacatggacggagccttcttggtgctggacgagattgtggatggcggtgtgattctggagagtgacccccagcaagtgatccagaaggtgaattttagggcagatgatggcggcttgactgaacagagtgtggcccaggttcttcagtctgccaaggaacaaattaaatggtcgttattgaaatgaaggctgtggattcaaggctccctgccccccagatcatttccccaatcctggcaaaagcccaaagatcccagggtcaggagagacccctctgtatccccaggtccctcccagaactgactcctaaggtctccagccagggcttctgagatgcaaaggtttggcctcaggagagtcaccttttctcacggccctggccttaactcatatcttaggcattcctggccccagggccctaataaacctgcttttgtcttctgaaaaaaaaaa

SEQ ID NO: 311104 - DNA, 1690 bp, Homo sapiens
gccttcgcggcgggcgatgttagtgggcttgggcgttgggtgaagtatccaggttgggcgcttccagcgctttctgtggcgggggaatgaaggcctaggtcagggaataggaaggtgtatcgccgccagagtgcggaacaccctcgccttgagggttcccacagtgacttgcaaaagtctagtgagacccgagaatgctgaggcgggacacgaagcatgtggttcttgtggttgcgacgctcgtgccgccatcttgggtgctggcggcggaaaccggtaccccaacttcccctcggtgcgaacctggagaagccaccccagctgtgagggacggttgcgcctcatggcccaggcaagggtaccttcgctggagcagtaccgcggacggatatcatgagggtggtgggacgttggcggaacgttggcggaacgttggcggtgtgagaggtgtggggtaatggcgattttgtcatggtagaaacagcccaaaggacccccctcgtttggcctcccacgcagcttagtcttgcttttttagggatgtttctcattttttaatttctccagtcccatctggttatattgccaaaacatgtttgtgactctcaaacgttagtttactcccagcatcacttggggagcttgctaagctacgaattccgaggtcccactggagagtctgatttaatgaccctggagtggcggccggataacctgcctgctggggtgattttaacgcagctgatgcgaagaccccatttagggaatcattgggttggcgtttgcaatgcgttcctcccagctataggacaaagaggtgtcaactcaactgtgtcttcttagaagagcccattatttatagtattatgatgacacattcccctccatgaaggagcagatggttttcgagaaaaatgtcttcaacaagaccagccggactgagagtgagattgcattttttgggggtatgaccatcgtctacaagaacagcattgacctcttcctatacgtggtgggctcatcctacgagaatgagctgatgctcatgtctgttctcacctgcctgtttgagtctctgaaccacatgttaaggaagaacgtggagaagcgctggttgctggagaacatggacggagccttcttggtgctggacgagattgtggatggcggtgtgattctggagagtgacccccagcaagtgatccagaaggtgaattttagggcagatgatggcggcttgactgaacagagtgtggcccaggtctctctgctcagactaatcctgcttgtatggaacttcccgccctggcgctaactcctcgtgctgtggtggccctaccgagatgagcctgtgctgtctcgtgtggagtcccaggttcttcagtctgccaaggaacaaattaaatggtcgttattgaaatgaaggctgtggattcaaggctccctgccccccagatcatttccccaatcctggcaaaagcccaaagatcccagggtcaggagagacccctctgtatccccaggtccctcccagaactgactcctaaggtctccagccagggcttctgagatgcaaaggtttggcctcaggagagtcaccttttctcacggccctggccttaactcatatcttaggcattcctggccccagggccctaataaacctgcttttgtcttctgaaaaaaaaaa

SEQ ID NO: 311105 - DNA, 687 bp, Homo sapiens
ggcggcgagcggaatgcagcggcccgaggcctggccacgtccgcacccgggggagggggccgcggcggcccaggccgggggcccggcgccgcctgctcgagccggggagccctcggggctgcggttgcaggaaccttccctctacaccatcaaggctgttttcatcctagataatgacgggcgccggctgctggccaagtattatgatgacacattcccctccatgaaggagcagatggttttcgagaaaaatgtcttcaacaagaccagccggactgagatgtgattctggagagtgacccccagcaagtgatccagaaggtgaattttagggcagatgatggcggcttgactgaacagagtgtggcccaggttcttcagtctgccaaggaacaaattaaatggtcgttattgaaatgaaggctgtggattcaaggctccctgccccccagatcatttccccaatcctggcaaaagcccaaagatcccagggtcaggagagacccctctgtatccccaggtccctcccagaactgactcctaaggtctccagccagggcttctgagatgcaaaggtttggcctcaggagagtcaccttttctcacggccctggccttaactcatatcttaggcattcctggccccagggccctaataaacctgcttttgtcttctgaaaaaaaaaa

SEQ ID NO: 311106 - DNA, 593 bp, Homo sapiens
ttggcaaggagaaggggcggaggggaggattgtgccactgatttgcctcctggtttttcctctcatcttgtagtgtgattctggagagtgacccccagcaagtgatccagaaggtgaattttagggcagatgatggcggcttgactgaacagagtgtggcccaggtctctctgctcagactaatcctgcttgtatggaacttcccgccctggcgctaactcctcgtgctgtggtggccctaccgagatgagcctgtgctgtctcgtgtggagtcccaggttcttcagtctgccaaggaacaaattaaatggtcgttattgaaatgaaggctgtggattcaaggctccctgccccccagatcatttccccaatcctggcaaaagcccaaagatcccagggtcaggagagacccctctgtatccccaggtccctcccagaactgactcctaaggtctccagccagggcttctgagatgcaaaggtttggcctcaggagagtcaccttttctcacggccctggccttaactcatatcttaggcattcctggccccagggccctaataaacctgcttttgtcttctgaaaaaaaaaa

SEQ ID NO: 311107 - DNA, 857 bp, Homo sapiens
ggcggcgagcggaatgcagcggcccgaggcctggccacgtccgcacccgggggagggggccgcggcggcccaggccgggggcccggcgccgcctgctcgagccggggagccctcggggctgcggttgcaggaaccttccctctacaccatcaaggctgttttcatcctagataatgacgggcgccggctgctggccaagtattatgatgacacattcccctccatgaaggagcagatggttttcgagaaaaatgtcttcaacaagaccagccggactgagactgatgctcatgtctgttctcacctgcctgtttgagtctctgaaccacatgttaagtgtgattctggagagtgacccccagcaagtgatccagaaggtgaattttagggcagatgatggcggcttgactgaacagagtgtggcccaggtctctctgctcagactaatcctgcttgtatggaacttcccgccctggcgctaactcctcgtgctgtggtggccctaccgagatgagcctgtgctgtctcgtgtggagtcccaggttcttcagtctgccaaggaacaaattaaatggtcgttattgaaatgaaggctgtggattcaaggctccctgccccccagatcatttccccaatcctggcaaaagcccaaagatcccagggtcaggagagacccctctgtatccccaggtccctcccagaactgactcctaaggtctccagccagggcttctgagatgcaaaggtttggcctcaggagagtcaccttttctcacggccctggccttaactcatatcttaggcattcctggccccagggccctaataaacctgcttttgtcttctgaaaaaaaaaa

SEQ ID NO: 311108 - DNA, 979 bp, Homo sapiens
ggcggcgagcggaatgcagcggcccgaggcctggccacgtccgcacccgggggagggggccgcggcggcccaggccgggggcccggcgccgcctgctcgagccggggagccctcggggctgcggttgcaggaaccttccctctacaccatcaaggctgttttcatcctagataatgacgggcgccggctgctggccaagtattatgatgacacattcccctccatgaaggagcagatggttttcgagaaaaatgtcttcaacaagaccagccggactgagagtgagattgcattttttgggggtatgaccatcgtctacaagaacagcattgacctcttcctatacgtggtgggctcatcctacgagaatgagctgatgctcatgtctgttctcacctgcctgtttgagtctctgaaccacatgttaaggaagaacgtggagaagcgctggttgctggagaacatggacggagccttcttggtgctggacgagattgtggatggcgggtgaggaggggacagtcagggacactcacagcaggagtgcctttgataatcatcagccccagatggcacccagcatggctagaactctgaccaacttctcactcccttcccccacgccccactcatgaagatagaagttgatttcaatgttagccaaagtcaagccaaacaagagactaacctgatgtcaaactatgggagactgttgaataggcagggtttggggaaaatccagtttggtctccaatgcccaggggaagcactggcacagatgctggccctctctggaaggacttcagacagtcccaccagccccacatgtcctgctcttagggctcaattccaacacaagctagatgcgtgacctgggtcaattactgaccctccccgaggcttactttctccatctttaggatggaggtaataagggattgtggggattaaatacatgtgtgagaagataaatgtgaag

SEQ ID NO: 311109 - DNA, 209 bp, Homo sapiens
atgaccatcgtctacaagaacagcattgacctcttcctatacgtggtgggctcatcctacgagaatgaggtgaattcaggaggttggggcagtaagaagggtctgtctatggggaaatgttgttatttggaatctgggcttgaggctgggacctggaggctcaccattggaccccttcttttaggctccatggggtagaggagggcagc

SEQ ID NO: 311110 - DNA, 1289 bp, Homo sapiens
  misc_feature (1127)..(1129): n is a, c, g, or t
  misc_feature (1131)..(1131): n is a, c, g, or t
  misc_feature (1135)..(1135): n is a, c, g, or t
  misc_feature (1137)..(1137): n is a, c, g, or t
  misc_feature (1139)..(1139): n is a, c, g, or t
  misc_feature (1165)..(1165): n is a, c, g, or t
  misc_feature (1172)..(1172): n is a, c, g, or t
  misc_feature (1179)..(1179): n is a, c, g, or t
  misc_feature (1185)..(1185): n is a, c, g, or t
  misc_feature (1190)..(1191): n is a, c, g, or t
  misc_feature (1197)..(1197): n is a, c, g, or t
  misc_feature (1205)..(1205): n is a, c, g, or t
  misc_feature (1215)..(1215): n is a, c, g, or t
  misc_feature (1232)..(1232): n is a, c, g, or t
  misc_feature (1234)..(1234): n is a, c, g, or t
  misc_feature (1265)..(1265): n is a, c, g, or t
gataatagagaaattaacagcttgaagaaataacaaaaagttcagtgagttagcatgaaactatacctgaaagttattgcaaggttaagtgagaggaaccttaaaattaaagggagcagcatttgtaaagaaaagctagaatcatgaaaagacctaagataagatcaaatgaaattacgtagaagtgtaaaattcttaactgttagtatctgaaaatcatgcattccttgctaggaaggcatggcattagtgctgtcggaatcctgataaaacatcacaaacttctgttcgttggtattagggacagtatagagtgagtgcttgaagaactgccttggcttaccaatctctctctccacaacttccaatcatctctagggaacctagcagaaacacttccacagagcaaaagttataatacagaaagtgatgaaaggaggacgcaggctctcaatgacgtcaggtattcccgggacccgcccaccgtgggcgttttccacctacaggcaggcgtctccgggggcggggcttgctcagggttaacgtcactactgagcgccgggcgcgttccgttggcggcggattcgaacgttcggactgaggtttttctgcctgaagaagcgtcatacggaccggattgttttcgctggcccagtgtccccggagcttgtgtgcgatacagagagcacctcggaagctgaggcagctggtacttgacagagaggatggcgctgtcgaccatagtctcccagaggaagcagataaagcggaaggctccccgtggctttctaaagcgagtcttcaagcgaaagaagcctcaacttcgtctggagaaaagtggtgacttattggtccatctgaactgtttactgtttgttcatcgattagcagaagagtccaggacaaacgcttgtgcgagtaaatgtagagtcattaacaaggagcatgtactggccgcagcaaaggtaattctaaagaagagcagaggttagaagtcaaagaacatattcttgaaagttatgatgcattcttttgggtggtaacagatcataaagacattttttacacatcagttaatatgggattattaaatattggctataagtgaaaaaaaaaaaaaaaaaaannngngggngntnttttttcgggggggggaaaaaggggnttggaangggcctngggcanaagtnngtttcntggacccnagtttttttngtcaagggggaaaaatngngggggcccccaaaaaggggggcgggaaaaanttcggaaaacccgggtaaaccggt

SEQ ID NO: 311111 - DNA, 1262 bp, Homo sapiens
gataatagagaaattaacagcttgaagaaataacaaaaagttcagtgagttagcatgaaactatacctgaaagttattgcaaggttaagtgagaggaaccttaaaattaaagggagcagcatttgtaaagaaaagctagaatcatgaaaagacctaagataagatcaaatgaaattacgtagaagtgtaaaattcttaactgttagtatctgaaaatcatgcattccttgctaggaaggcatggcattagtgctgtcggaatcctgataaaacatcacaaacttctgttcgttggtattagggacagtatagagtgagtgcttgaagaactgccttggcttaccaatctctctctccacaacttccaatcatctctagggaacctagcagaaacacttccacagagcaaaagttataatacagaaagtgatgaaaggaggacgcaggctctcaatgacgtcaggtattcccgggacccgcccaccgtgggcgttttccacctacaggcaggcgtctccgggggcggggcttgctcagggttaacgtcactactgagcgccgggcgcgttccgttggcggcggattcgaacgttcggactgaggtttttctgcctgaagaagcgtcatacggaccggattgttttcgctggcccagtgtccccggagcttgtgtgcgatacagagagcacctcggaagctgaggcagctggtacttgacagagaggatggcgctgtcgaccatagtctcccagaggaagcagataaagcggaaggctccccgtggctttctaaagcgagtcttcaagcgaaagaagcctcaacttcgtctggagaaaagtggtgacttattggtccatctgaactgtttactgtttgttcatcgattagcagaagagtccaggacaaacgcttgtgcgagtaaatgtagagtcattaacaaggagcatgtactggccgcagcaaaggtaattctaaagaagagcagaggttagaagtcaaagaacatattcttgaaagttatgatgcattcttttgggtggtaacagatcataaagacattttttacacatcagttaatatgggattattaaatattggctataagtgagtgatgtgtgtgtttgtattttttttctggcatgaaatatctcaagtaaatgcataggactatttaacccttttatgggaattactattatttttattttaaatgtcctctagttcagtttgcttttgttttgttgctgctgcaaatattttat

SEQ ID NO: 311112 - DNA, 1334 bp, Homo sapiens
  misc_feature (1172)..(1174): n is a, c, g, or t
  misc_feature (1176)..(1176): n is a, c, g, or t
  misc_feature (1180)..(1180): n is a, c, g, or t
  misc_feature (1182)..(1182): n is a, c, g, or t
  misc_feature (1184)..(1184): n is a, c, g, or t
  misc_feature (1210)..(1210): n is a, c, g, or t
  misc_feature (1217)..(1217): n is a, c, g, or t
  misc_feature (1224)..(1224): n is a, c, g, or t
  misc_feature (1230)..(1230): n is a, c, g, or t
  misc_feature (1235)..(1236): n is a, c, g, or t
  misc_feature (1242)..(1242): n is a, c, g, or t
  misc_feature (1250)..(1250): n is a, c, g, or t
  misc_feature (1260)..(1260): n is a, c, g, or t
  misc_feature (1277)..(1277): n is a, c, g, or t
  misc_feature (1279)..(1279): n is a, c, g, or t
  misc_feature (1310)..(1310): n is a, c, g, or t
gataatagagaaattaacagcttgaagaaataacaaaaagttcagtgagttagcatgaaactatacctgaaagttattgcaaggttaagtgagaggaaccttaaaattaaagggagcagcatttgtaaagaaaagctagaatcatgaaaagacctaagataagatcaaatgaaattacgtagaagtgtaaaattcttaactgttagtatctgaaaatcatgcattccttgctaggaaggcatggcattagtgctgtcggaatcctgataaaacatcacaaacttctgttcgttggtattagggacagtatagagtgagtgcttgaagaactgccttggcttaccaatctctctctccacaacttccaatcatctctagggaacctagcagaaacacttccacagagcaaaagttataatacagaaagtgatgaaaggaggacgcaggctctcaatgacgtcaggtattcccgggacccgcccaccgtgggcgttttccacctacaggcaggcgtctccgggggcggggcttgctcagggttaacgtcactactgagcgccgggcgcgttccgttggcggcggattcgaacgttcggactgaggtttttctgcctgaagaagcgtcatacggaccggattgttttcgctggcccagtgtccccggagcttgtgtgcgatacagagagcacctcggaagctgaggcagctggtacttgacagagaggatggcgctgtcgaccatagtctcccagaggaagcagataaagcggaaggctccccgtggctttctaaagcgagtcttcaagcgaaagaagcctcaacttcgtctggagaaaagtggtgacttattggtgagattccatcccttctcgggctgggaatggggcacgggagaggtccatctgaactgtttactgtttgttcatcgattagcagaagagtccaggacaaacgcttgtgcgagtaaatgtagagtcattaacaaggagcatgtactggccgcagcaaaggtaattctaaagaagagcagaggttagaagtcaaagaacatattcttgaaagttatgatgcattcttttgggtggtaacagatcataaagacattttttacacatcagttaatatgggattattaaatattggctataagtgaaaaaaaaaaaaaaaaaaannngngggngntnttttttcgggggggggaaaaaggggnttggaangggcctngggcanaagtnngtttcntggacccnagtttttttngtcaagggggaaaaatngngggggcccccaaaaaggggggcgggaaaaanttcggaaaacccgggtaaaccggt

SEQ ID NO: 311113 - DNA, 870 bp, Homo sapiens
gaaaatgcctcatgacgttagatttgggaataatttattggatatgataccaaaagcacaggcagcataagcagaaatagacaagtgggattacatcaaactttgaaacttctgctcggcaaagaaaacagcagagtgaaaagacaacctagaatggaagcaaaccgtatctctgataaggggatagcacaaggggctaatatatacaatatatacgcaactcctgcaacttaacaaatgaaaacaaaccaattaaaaaatacgcaaagggcttgaatcaacagttttctaaagaagatatacacatgaccaatgagcgtatgaaaactgctccacagccagagctgtggcatgcacctgtatgtaggcccagctacttgggaggctgaggtggaaggaccacatgagcccaggagttccaggccaggctgggcaaaagagaccccatctctaaaaaagaaaaaagatgctcactgacactaatctttagagaaatgcaaatcaaaactacaccttttaggatggctgctgtcaaaggaaaaaaaaaaaaaaccaggaaataaatgttggcgaggatgtggagaaattggaagtcttgtacacttttggtgggaatgtaaaatgctgcagttgctatggaaaatagtatagaggttcctcagaaaactaaaaattgatccagcaatcccactgctggttataccaccaaaagaattgaaaacaggattgcccagtggtacttttacacttatgtccagtctagcatttttcacaagagccaagaggtggaagccacctcaatattcatcaacagatgaatggaaaaagaaaatctggtatgtatctaacagtggaatattatccagcttt

SEQ ID NO: 311114 - DNA, 959 bp, Homo sapiens
cggctaggtcacagaagcagtgggtcagaagccagaggggacgtggggagtgccaccctggagcctaccggcacacctgctgagatggaggcctcagatgggcaagggggtgaaggggacaagccactagagcaggtgacaaatgtgtcatgcctggagacaagctccagcgccagccctgctagagactcgctcatgcgccatgccaagggcctggatcaggacaccttcaaaacttgtaaagaatacctaagaccgctgaagaagttcctgcgaaagttgcacctgcccagggaccttccccagaagaagaagctgaagtacatgaagcagagccttgtggtcctaggggaccacatcaacacctttctgcagcattactgccaagcctgggaaatcaaacactggagaaagatgctctggcggttcatctccctcttctcggagctggaagcaaagcagcttcgccgactttacaagtacaccaagagcagccagccggccaagttcctggtgacattctgcgcctcggatgcgccggagaggtccttgctggccgaccgggaagacagtctgcccaagctctgccatgcatgggggctgcacagcaacatcagcggcatgaaggagcggctgtccaacatgcagaccccaggtcaagggagccccctgcctgggcagccaagatcccaggaccatgtcaagaaagattctttaagggagctttctcaaaaaccaaaactcaagaggaagaggataaaggaagccccagaaactccagagactgaaccgtaagaagaccaactgggacaaagggcccgcttgtcctggctctcagagcacggggaatggagaccaaaaagggaaaagaattgtccttatcaaaaagattctcaggtcttaattaggaataaatgaggtgggaaataaacattcttatgacagttctaccttaaaga

SEQ ID NO: 311115 - DNA, 872 bp, Homo sapiens
gcccaccgcgtttccgccctcggcctcgggtccctggagggctcgcgggtgacaaatgtgtcatgcctggagacaagctccagcgccagccctgctagagactcgctcatgcgccatgccaagggcctggatcaggacaccttcaaaacttgtaaagaatacctaagaccgctgaagaagttcctgcgaaagttgcacctgcccagggaccttccccagaagaagaagctgaagtacatgaagcagagccttgtggtcctaggggaccacatcaacacctttctgcagcattactgccaagcctgggaaatcaaacactggagaaagatgctctggcggttcatctccctcttctcggagctggaagcaaagcagcttcgccgactttacaagtacaccaagagcagccagccggccaagttcctggtgacattctgcgcctcggatgcgccggagaggtccttgctggccgaccgggaagacagtctgcccaagctctgccatgcatgggggctgcacagcaacatcagcggcatgaaggagcggctgtccaacatgcagaccccaggtcaagggagccccctgcctgggcagccaagatcccaggaccatgtcaagaaagattctttaagggagctttctcaaaaaccaaaactcaagaggaagaggataaaggaagccccagaaactccagagactgaaccgtaagaagaccaactgggacaaagggcccgcttgtcctggctctcagagcacggggaatggagaccaaaaagggaaaagaattgtccttatcaaaaagattctcaggtcttaattaggaataaatgaggtgggaaataaacattcttatgacagttctaccttaaaga

SEQ ID NO: 311116 - DNA, 330 bp, Homo sapiens
agatatgagaagttgtagctctgatgtctagctgtagtctccttgatctgctgattgcattattttaatttgcttttctgggaaagcagttttgctaaaagctgtacagactttttcttttgtacctagcagtactttatatagtatagctttgggccatgtagcattttaagactcaattttaaaaaattattaatctgttgctgactcttaattcctatttcaatatgtgtttccttgaagaattcaggatacaacttcttgtgtatgacagctttccttcacacactatttttgtgggtgtgtatatatctgatttgggaagaattt

SEQ ID NO: 311117 - DNA, 335 bp, Homo sapiens
taaagtgctgtactaaatggccgttacctaaaaggctgctggattgggcgatcacgagtgccatttaggtacagccattaggtacagccatttaggacctaaatggctgtacagactttttcttttgtacctagcagtactttatatagtatagctttgggccatgtagcattttaagactcaattttaaaaaattattaatctgttgctgactcttaattcctatttcaatatgtgtttccttgaagaattcaggatacaacttcttgtgtatgacagctttccttcacacactatttttgtgggtgtgtatatatctgatttgggaagaattt

SEQ ID NO: 311118 - DNA, 372 bp, Homo sapiens
ggataaataggattttctgacacagatatgagaagttgtagctctgatgtctagctgtagtctccttgatctgctgattgcattattttaatttgcttttctgggaaagcagttttgctaaaagctgtacagactttttcttttgtacctagcagtactttatatagtatagctttgggccatgtagcattttaagactcaattttaaaaaattattaatctgttgctgactcttaattcctatttcaatatgtgtttccttgaagaattcaggatacaacttcttgtgtatgacagctttccttcacacactatttttgtgggtgtgtatatatctgatttgggaagaatttaaaaaacacatagcttttt

SEQ ID NO: 311119 - DNA, 587 bp, Homo sapiens
aggtaacaaagcaccacattagatactgaagatagaaatttgcttaagatatggtctcagcattcaacaggctggtgttctggttgagaaggagtacatggatctttctttctcctacccctggagactagttcaagcgattctcctgcctcagcctctcaagtagctgggactacagtatcctgcataaaactgcattaaaaaccagtaacatcagacccgggatggggacggaaggtccaaatcagaacctccatggaatgcatctctacatattttcacatctgttttcaagcaaggagcaagaccagcaagaaagtgaggacttcctctgatgcacaaacctgggatgtgctgtgcaaatcagctacctgggcttcccacctgtggatgctcactgacctggggccgcaccaggtgatttcaggacttcctcagagaaaacccaggcaagacaccagcaacagagctaccctgataattattaaattagctctatgtggagaagccatatttgaataagttattagtggaggtcctttgtaaaccatgctccattatataaatggcagatgtcattatttata

SEQ ID NO: 311120 - DNA, 555 bp, Homo sapiens
actaagcaagacaaacacaaagcagcaagtgcagtgaatcagagatagtatcccagcaaccagccccagaggaccagctgtggtttggaggtgacaggagcagcagccatccacacctgccatccaaacctgccatccacagctacttgagttctccagacctaggaaagacaaagtctcactctgctgtccaggctggagtgcagtggcgcgatctcggctcactgcaacctctgcctcccaggttcaagcgattctcctgcctcagcctctcaagtagctgggactacagacttcctctgatgcacaaacctgggatgtgctgtgcaaatcagctacctgggcttcccacctgtggatgctcactgacctggggccgcaccaggtgatttcaggacttcctcagagaaaacccaggcaagacaccagcaacagagctaccctgataattattaaattagctctatgtggagaagccatatttgaataagttattagtggaggtcctttgtaaaccatgctccattatataaatggcagatgtcattatttata

SEQ ID NO: 311121 - DNA, 515 bp, Homo sapiens
aggtaacaaagcaccacattagatactgaagatagaaatttgcttaagatatggtctcagcattcaacaggctggtgttctggttgagaaggagtacatggatctttctttctcctacccctggagactaacaaagtctcactctgctgtccaggctggagtgcagtggcgcgatctcggctcactgcaacctctgcctcccaggttcaagcgattctcctgcctcagcctctcaagtagctgggactacagacttcctctgatgcacaaacctgggatgtgctgtgcaaatcagctacctgggcttcccacctgtggatgctcactgacctggggccgcaccaggtgatttcaggacttcctcagagaaaacccaggcaagacaccagcaacagagctaccctgataattattaaattagctctatgtggagaagccatatttgaataagttattagtggaggtcctttgtaaaccatgctccattatataaatggcagatgtcattatttata

SEQ ID NO: 311122 - DNA, 620 bp, Homo sapiens
aggtaacaaagcaccacattagatactgaagatagaaatttgcttaagatatggtctcagcattcaacaggctggtgttctggttgagaaggagtacatggatctttctttctcctacccctggagactagttcaagcgattctcctgcctcagcctctcaagtagctgggactacaggaacaaacgaattgtttttttcaacttgacaagtatcctgcataaaactgcattaaaaaccagtaacatcagacccgggatggggacggaaggtccaaatcagaacctccatggaatgcatctctacatattttcacatctgttttcaagcaaggagcaagaccagcaagaaagtgaggacttcctctgatgcacaaacctgggatgtgctgtgcaaatcagctacctgggcttcccacctgtggatgctcactgacctggggccgcaccaggtgatttcaggacttcctcagagaaaacccaggcaagacaccagcaacagagctaccctgataattattaaattagctctatgtggagaagccatatttgaataagttattagtggaggtcctttgtaaaccatgctccattatataaatggcagatgtcattatttata

SEQ ID NO: 311123 - DNA, 241 bp, Homo sapiens
atctgcagacttaatgctttttctttttgcttatttcttttctctttgatgctactcataagtttcttcttccctctctgtttctgtgccaactttaggttgagttgagacaatgtgcttgacaggtaaacctgtaatttgtgattggataataaagcattattatctgaaacttgttcttacagatacctttagaaaatgcttgaagaggccaggtgcggtggctcacgcctgtaatcac

SEQ ID NO: 311124 - DNA, 2766 bp, Homo sapiens
ccgcagccggggctgctcgctgcttgtcgcgcgctcacacacacacagacacacacgcacacacacacatgcacacattttctcgcgctctctccggctctcctttgtttattttctaatctatatttttactggaagatttcctctttattctctcccgccctcctacaagcgctcttgctggccgtctgggtgcacacaccgctccctcgatcaccccagcccccttcctggtctcccgagcgcggggtttgaaggtcacctcctttccagtccccgtgcgagccgcgctgccgccgcctcctccagccagagtcggtgggactggctgcgctgccctgaagtggttctccaagcagcgcggagggtggcggacggcggacggagcccaggggccgcgtcgggtggggaaacccgaactcgcggaggggaatccctcccccttcgccccagccccccagcagcacccgcggtggggcgggggcgctctgccagccccgggaacagcagaggcggcggcactggctggacccacgcgcgcgcctccggggctgaagaaggaaggagtgagccgagccgagcaccccacatctggaggggacagccagccgtgggccccgccccggcgtccggagcaggagaactccgagcttcttgcccaggcagagagagcaggagcggaccgcgcgcccgggattgagagtccttgcgctccagacccccacccagtggccgccagggtccccgcctgtccggaccctcgccgcgcccaggcaggcgcgccagggcggggctgacctgcccgcgaagttgcggacagtgcgtgagaaaccagcacccccttccgccgcctccagcttatggtgagtgtggctgggggtgcagagagcgcacgggaattcgggggtctggggccgagaacgtgaccgcagccgggctcgccgggagttctaggaaactggtcaaagaactcatgcaagtggaacttacagcttccttgatcggactcagcattcagatatcaaagcagactgcaatacctgcgtggaaatagaagacagaaaggtttcaagacaacagatgaattgtgaaagagagcagctaaggggtaatcaggaagcagccgctgcccctgacacaatggctcagccttacgcttcggcccagtttgctcccccgcagaacggtatccccgcggaatacacggcccctcatccccaccccgcgccagagtacacaggccagaccacggttcccgagcacacattaaacctgtaccctcccgcccagacgcactccgagcagagcccggcggacacgagcgctcagaccgtctctggcaccgccacacagacagatgacgcagcaccgacggatggccagccccagacacaaccttctgaaaacacggaaaacaagtctcagcccaagcggctgcatgtctccaatatccccttcaggttccgggatccggacctcagacaaatgtttggtcaatttggtaaaatcttagatgttgaaattatttttaatgagcgaggctcaaagggatttggtttcgtaactttcgaaaatagtgccgatgcggacagggcgagggagaaattacacggcaccgtggtagagggccgtaaaatcgaggtaaataatgccacagcacgtgtaatgacaaataaaaagaccgtcaacccttatacaaatggctggaaattgaatccagttgtgggtgcagtctacagtcccgaattctatgcaggcacggtcctgttgtgccaggccaaccaggagggatcttccatgtacagtgcccccagttcacttgtatatacttctgcaatgccaggcttcccgtatccagcagccaccgccgcggccgcctaccgaggggcgcacctgcgaggccgcggtcgcaccgtgtacaacaccttcagggccgcggcgcccccgcccccgatcccggcctacggcggtgttgtttaccaggatggattttatggtgcagacatttatggtggttatgctgcataccgctacgcccagcctacccctgccactgccgctgcctacagtgacagttacggacgagtttatgctgccgacccctaccaccacgcacttgctccagcccccacctacggcgttggtgccatgaatgcttttgcacctttgactgatgccaagactaggagccatgctgatgatgtgggtctcgttctttcttcattgcaggctagtatataccgagggggatacaaccgttttgctccatactaaatgacaaaaccataaaaaccttccaatgtggggagaaaggaagctttccgaggcctgagtattgcaatacatgcagtagtacatcattttagcaactctaaaaaaaaaaaaaatacaaataaaaaggaaaaaaaattacattttttatcttatacctcagatattttgttctgtgtattttaatattgtgggtctttaatttctgaaggttccgtagtttggttgctggctgtaggagtttttgtggttgatctagacagatgctagataatgaataaaaactggtttagggccatatccagagtgctatattatgtaaatgaattatatatgctgaatattaagctactggggttatcagctgtttgggaagagtgtaagtgactacagtagtcatttttttctgcacctgcattattttattttgtgaaaggggaggttgggaggggcttaggggattggaactggggtttggctgaaagaaaaaaaaaa

SEQ ID NO: 311125 - DNA, 1906 bp, Homo sapiens
gtgcatttgtgttgtgggggcatggggtgcatttgtgtgtatatatgtgtggatgtagggtgcgtttgtctgtgtgtatttgtgtgggcatggagtgcatttgcgttgcgggggtgtggagtgtgtttgtgtgtgtgcacacgcacatggttctcatggtcctcccgttttcaactgaacctgtaattagctcctcagagaccaggtttcaagacaacagatgaattgtgaaagagagcagctaaggggtaatcaggaagcagccgctgcccctgacacaatggctcagccttacgcttcggcccagtttgctcccccgcagaacggtatccccgcggaatacacggcccctcatccccaccccgcgccagagtacacaggccagaccacggttcccgagcacacattaaacctgtaccctcccgcccagacgcactccgagcagagcccggcggacacgagcgctcagaccgtctctggcaccgccacacagacagatgacgcagcaccgacggatggccagccccagacacaaccttctgaaaacacggaaaacaagtctcagcccaagcggctgcatgtctccaatatccccttcaggttccgggatccggacctcagacaaatgtttggtcaatttggtaaaatcttagatgttgaaattatttttaatgagcgaggctcaaagggatttggtttcgtaactttcgaaaatagtgccgatgcggacagggcgagggagaaattacacggcaccgtggtagagggccgtaaaatcgaggtaaataatgccacagcacgtgtaatgacaaataaaaagaccgtcaacccttatacaaatggctggaaattgaatccagttgtgggtgcagtctacagtcccgaattctatgcaggcacggtcctgttgtgccaggccaaccaggagggatcttccatgtacagtgcccccagttcacttgtatatacttctgcaatgccaggcttcccgtatccagcagccaccgccgcggccgcctaccgaggggcgcacctgcgaggccgcggtcgcaccgtgtacaacaccttcagggccgcggcgcccccgcccccgatcccggcctacggcggtgttgtttaccaggatggattttatggtgcagacatttatggtggttatgctgcataccgctacgcccagcctacccctgccactgccgctgcctacagtgacagttacggacgagtttatgctgccgacccctaccaccacgcacttgctccagcccccacctacggcgttggtgccatgaatgcttttgcacctttgactgatgccaagactaggagccatgctgatgatgtgggtctcgttctttcttcattgcaggctagtatataccgagggggatacaaccgttttgctccatactaaatgacaaaaccataaaaaccttccaatgtggggagaaaggaagctttccgaggcctgagtattgcaatacatgcagtagtacatcattttagcaactctaaaaaaaaaaaaaatacaaataaaaaggaaaaaaaattacattttttatcttatacctcagatattttgttctgtgtattttaatattgtgggtctttaatttctgaaggttccgtagtttggttgctggctgtaggagtttttgtggttgatctagacagatgctagataatgaataaaaactggtttagggccatatccagagtgctatattatgtaaatgaattatatatgctgaatattaagctactggggttatcagctgtttgggaagagtgtaagtgactacagtagtcatttttttctgcacctgcattattttattttgtgaaaggggaggttgggaggggcttaggggattggaactggggtttggctgaaagaaaaaaaaaa

SEQ ID NO: 311126 - DNA, 2685 bp, Homo sapiens
ccgcagccggggctgctcgctgcttgtcgcgcgctcacacacacacagacacacacgcacacacacacatgcacacattttctcgcgctctctccggctctcctttgtttattttctaatctatatttttactggaagatttcctctttattctctcccgccctcctacaagcgctcttgctggccgtctgggtgcacacaccgctccctcgatcaccccagcccccttcctggtctcccgagcgcggggtttgaaggtcacctcctttccagtccccgtgcgagccgcgctgccgccgcctcctccagccagagtcggtgggactggctgcgctgccctgaagtggttctccaagcagcgcggagggtggcggacggcggacggagcccaggggccgcgtcgggtggggaaacccgaactcgcggaggggaatccctcccccttcgccccagccccccagcagcacccgcggtggggcgggggcgctctgccagccccgggaacagcagaggcggcggcactggctggacccacgcgcgcgcctccggggctgaagaaggaaggagtgagccgagccgagcaccccacatctggaggggacagccagccgtgggccccgccccggcgtccggagcaggagaactccgagcttcttgcccaggcagagagagcaggagcggaccgcgcgcccgggattgagagtccttgcgctccagacccccacccagtggccgccagggtccccgcctgtccggaccctcgccgcgcccaggcaggcgcgccagggcggggctgacctgcccgcgaagttgcggacagtgcgtgagaaaccagcacccccttccgccgcctccagcttatggtgagtgtggctgggggtgcagagagcgcacgggaattcgggggtctggggccgagaacgtgaccgcagccgggctcgccgggagttctaggaaactggtcaaagaactcatgcaagtggaacttacagcttccttgatcggactcagcattcagatatcaaagcagactgcaatacctgcgtggaaatagaagacagaaaggtttcaagacaacagatgaattgtgaaagagagcagctaaggggtaatcaggaagcagccgctgcccctgacacaatggctcagccttacgcttcggcccagtttgctcccccgcagaacggtatccccgcggaatacacggcccctcatccccaccccgcgccagagtacacaggccagaccacggttcccgagcacacattaaacctgtaccctcccgcccagacgcactccgagcagagcccggcggacacgagcgctcagaccgtctctggcaccgccacacagacagatgacgcagcaccgacggatggccagccccagacacaaccttctgaaaacacggaaaacaagtctcagcccaagcggctgcatgtctccaatatccccttcaggttccgggatccggacctcagacaaatgtttggtcaatttggtaaaatcttagatgttgaaattatttttaatgagcgaggctcaaagggatttggtttcgtaactttcgaaaatagtgccgatgcggacagggcgagggagaaattacacggcaccgtggtagagggccgtaaaatcgaggtaaataatgccacagcacgtgtaatgacaaataaaaagaccgtcaacccttatacaaatggctggaaattgaatccagttgtgggtgcagtctacagtcccgaattctatgcagtgccaggcttcccgtatccagcagccaccgccgcggccgcctaccgaggggcgcacctgcgaggccgcggtcgcaccgtgtacaacaccttcagggccgcggcgcccccgcccccgatcccggcctacggcggtgttgtttaccaggatggattttatggtgcagacatttatggtggttatgctgcataccgctacgcccagcctacccctgccactgccgctgcctacagtgacagttacggacgagtttatgctgccgacccctaccaccacgcacttgctccagcccccacctacggcgttggtgccatgaatgcttttgcacctttgactgatgccaagactaggagccatgctgatgatgtgggtctcgttctttcttcattgcaggctagtatataccgagggggatacaaccgttttgctccatactaaatgacaaaaccataaaaaccttccaatgtggggagaaaggaagctttccgaggcctgagtattgcaatacatgcagtagtacatcattttagcaactctaaaaaaaaaaaaaatacaaataaaaaggaaaaaaaattacattttttatcttatacctcagatattttgttctgtgtattttaatattgtgggtctttaatttctgaaggttccgtagtttggttgctggctgtaggagtttttgtggttgatctagacagatgctagataatgaataaaaactggtttagggccatatccagagtgctatattatgtaaatgaattatatatgctgaatattaagctactggggttatcagctgtttgggaagagtgtaagtgactacagtagtcatttttttctgcacctgcattattttattttgtgaaaggggaggttgggaggggcttaggggattggaactggggtttggctgaaagaaaaaaaaaa

SEQ ID NO: 311127 - DNA, 2532 bp, Homo sapiens
cgcgctcagacgccccagctccgccgagaggccgctcgcgccgggtccttcctcttccccaagtgcaggcagagcccccggagccatggccagcccttccggcagctccgaagccactggcaagccccgaggcaggatggccggcccaggagggaggaggacgacgtccctcccgaagagaagaggctgcggctggggctggaggggggaagcgcacagcccgaggactgcgaggacgggaaggacgcgccgcggccgggcagggaggagaccggcacccagacaggtggcgacggcagaggagatctactgtgcctgccatacagcctggttgagggtcaggactacaagtctgaaaattcaaccctcctccccggtgccaagaacagcctgcaagactccgtttcggcaagtcaggctacaggcaaagctgaggaaactggtcaaagaactcatgcaagtggaacttacagcttccttgatcggactcagcattcagatatcaaagcagactgcaatacctgcgtggaaatagaagacagaaaggttgaaccagcaaacgggtgacagtgagaggaaggaacaagcatgtgaacaaatgcgtgaaccacagtcagtctctgaatggaaatccatgtgtcttatgaaaatcagttatgttgaaagccatttgcaaagcttccacgatcctcgctttggctggtgcacggctgtgaagtgctttctttccaagctctcctgtgggtgacgggggaatggggtaaccagggcatttgtgttcacaggcatatcgattccaagtctgatcacagccacaaatttctttcccaggtttcaagacaacagatgaattgtgaaagagagcagctaaggggtaatcaggaagcagccgctgcccctgacacaatggctcagccttacgcttcggcccagtttgctcccccgcagaacggtatccccgcggaatacacggcccctcatccccaccccgcgccagagtacacaggccagaccacggttcccgagcacacattaaacctgtaccctcccgcccagacgcactccgagcagagcccggcggacacgagcgctcagaccgtctctggcaccgccacacagacagatgacgcagcaccgacggatggccagccccagacacaaccttctgaaaacacggaaaacaagtctcagcccaagcggctgcatgtctccaatatccccttcaggttccgggatccggacctcagacaaatgtttggtcaatttggtaaaatcttagatgttgaaattatttttaatgagcgaggctcaaagggatttggtttcgtaactttcgaaaatagtgccgatgcggacagggcgagggagaaattacacggcaccgtggtagagggccgtaaaatcgaggtaaataatgccacagcacgtgtaatgacaaataaaaagaccgtcaacccttatacaaatggctggaaattgaatccagttgtgggtgcagtctacagtcccgaattctatgcaggcacggtcctgttgtgccaggccaaccaggagggatcttccatgtacagtgcccccagttcacttgtatatacttctgcaatgccaggcttcccgtatccagcagccaccgccgcggccgcctaccgaggggcgcacctgcgaggccgcggtcgcaccgtgtacaacaccttcagggccgcggcgcccccgcccccgatcccggcctacggcggtgttgtttaccaggatggattttatggtgcagacatttatggtggttatgctgcataccgctacgcccagcctacccctgccactgccgctgcctacagtgacagttacggacgagtttatgctgccgacccctaccaccacgcacttgctccagcccccacctacggcgttggtgccatgaatgcttttgcacctttgactgatgccaagactaggagccatgctgatgatgtgggtctcgttctttcttcattgcaggctagtatataccgagggggatacaaccgttttgctccatactaaatgacaaaaccataaaaaccttccaatgtggggagaaaggaagctttccgaggcctgagtattgcaatacatgcagtagtacatcattttagcaactctaaaaaaaaaaaaaatacaaataaaaaggaaaaaaaattacattttttatcttatacctcagatattttgttctgtgtattttaatattgtgggtctttaatttctgaaggttccgtagtttggttgctggctgtaggagtttttgtggttgatctagacagatgctagataatgaataaaaactggtttagggccatatccagagtgctatattatgtaaatgaattatatatgctgaatattaagctactggggttatcagctgtttgggaagagtgtaagtgactacagtagtcatttttttctgcacctgcattattttattttgtgaaaggggaggttgggaggggcttaggggattggaactggggtttggctgaaagaaaaaaaaaa

SEQ ID NO: 311128 - DNA, 2726 bp, Homo sapiens
ccgcagccggggctgctcgctgcttgtcgcgcgctcacacacacacagacacacacgcacacacacacatgcacacattttctcgcgctctctccggctctcctttgtttattttctaatctatatttttactggaagatttcctctttattctctcccgccctcctacaagcgctcttgctggccgtctgggtgcacacaccgctccctcgatcaccccagcccccttcctggtctcccgagcgcggggtttgaaggtcacctcctttccagtccccgtgcgagccgcgctgccgccgcctcctccagccagagtcggtgggactggctgcgctgccctgaagtggttctccaagcagcgcggagggtggcggacggcggacggagcccaggggccgcgtcgggtggggaaacccgaactcgcggaggggaatccctcccccttcgccccagccccccagcagcacccgcggtggggcgggggcgctctgccagccccgggaacagcagaggcggcggcactggctggacccacgcgcgcgcctccggggctgaagaaggaaggagtgagccgagccgagcaccccacatctggaggggacagccagccgtgggccccgccccggcgtccggagcaggagaactccgagcttcttgcccaggcagagagagcaggagcggaccgcgcgcccgggattgagagtccttgcgctccagacccccacccagtggccgccagggtccccgcctgtccggaccctcgccgcgcccaggcaggcgcgccagggcggggctgacctgcccgcgaagttgcggacagtgcgtgagaaaccagcacccccttccgccgcctccagcttatggtgagtgtggctgggggtgcagagagcgcacgggaattcgggggtctggggccgagaacgtgaccgcagccgggctcgccgggagttctaggaaactggtcaaagaactcatgcaagtggaacttacagcttccttgatcggactcagcattcagatatcaaagcagactgcaatacctgcgtggaaatagaagacagaaaggtttcaagacaacagatgaattgtgaaagagagcagctaaggggtaatcaggaagcagccgctgcccctgacacaatggctcagccttacgcttcggcccagtttgctcccccgcagaacggtatccccgcggaatacacggcccctcatccccaccccgcgccagagtacacaggccagaccacggttcccgagcacacattaaacctgtaccctcccgcccagacgcactccgagcagagcccggcggacacgagcgctcagaccgtctctggcaccgccacacagacagatgacgcagcaccgacggatggccagccccagacacaaccttctgaaaacacggaaaacaagtctcagcccaagcggctgcatgtctccaatatccccttcaggttccgggatccggacctcagacaaatgtttggtcaatttggtaaaatcttagatgttgaaattatttttaatgagcgaggctcaaagggatttggtttcgtaactttcgaaaatagtgccgatgcggacagggcgagggagaaattacacggcaccgtggtagagggccgtaaaatcgaggtaaataatgccacagcacgtgtaatgacaaataaaaagaccgtcaacccttatacaaatggctggaaattgaatccagttgtgggtgcagtctacagtcccgaattctatgcaggcacggtcctgttgtgccaggccaaccaggagggatcttccatgtacagtgcccccagttcacttgtatatacttctgcaatgccaggcttcccgtatccagcagccaccgccgcggccgcctaccgaggggcgcacctgcgaggccgcggtcgcaccgtgtacaacaccttcagggccgcggcgcccccgcccccgatcccggcctacggcggggtggttatgctgcataccgctacgcccagcctacccctgccactgccgctgcctacagtgacagttacggacgagtttatgctgccgacccctaccaccacgcacttgctccagcccccacctacggcgttggtgccatgaatgcttttgcacctttgactgatgccaagactaggagccatgctgatgatgtgggtctcgttctttcttcattgcaggctagtatataccgagggggatacaaccgttttgctccatactaaatgacaaaaccataaaaaccttccaatgtggggagaaaggaagctttccgaggcctgagtattgcaatacatgcagtagtacatcattttagcaactctaaaaaaaaaaaaaatacaaataaaaaggaaaaaaaattacattttttatcttatacctcagatattttgttctgtgtattttaatattgtgggtctttaatttctgaaggttccgtagtttggttgctggctgtaggagtttttgtggttgatctagacagatgctagataatgaataaaaactggtttagggccatatccagagtgctatattatgtaaatgaattatatatgctgaatattaagctactggggttatcagctgtttgggaagagtgtaagtgactacagtagtcatttttttctgcacctgcattattttattttgtgaaaggggaggttgggaggggcttaggggattggaactggggtttggctgaaagaaaaaaaaaa

SEQ ID NO: 311129 - DNA, 1888 bp, Homo sapiens
cggcgttgatgagtgcttggctcctgacagaagggatttggctcccagctttgtagttcggaagaagttgggtctatagatttccccctaactctccattgatgtgttgagcttcagagggaataataactctacgtaaagcatgctggcgtctcaaggagttctcctgcatccttatggcgtgcctatgattgtaccggcagctccttaccttcctggactgattcagggtaatcaggaagcagccgctgcccctgacacaatggctcagccttacgcttcggcccagtttgctcccccgcagaacggtatccccgcggaatacacggcccctcatccccaccccgcgccagagtacacaggccagaccacggttcccgagcacacattaaacctgtaccctcccgcccagacgcactccgagcagagcccggcggacacgagcgctcagaccgtctctggcaccgccacacagacagatgacgcagcaccgacggatggccagccccagacacaaccttctgaaaacacggaaaacaagtctcagcccaagcggctgcatgtctccaatatccccttcaggttccgggatccggacctcagacaaatgtttggtcaatttggtaaaatcttagatgttgaaattatttttaatgagcgaggctcaaagggatttggtttcgtaactttcgaaaatagtgccgatgcggacagggcgagggagaaattacacggcaccgtggtagagggccgtaaaatcgaggtaaataatgccacagcacgtgtaatgacaaataaaaagaccgtcaacccttatacaaatggctggaaattgaatccagttgtgggtgcagtctacagtcccgaattctatgcaggcacggtcctgttgtgccaggccaaccaggagggatcttccatgtacagtgcccccagttcacttgtatatacttctgcaatgccaggcttcccgtatccagcagccaccgccgcggccgcctaccgaggggcgcacctgcgaggccgcggtcgcaccgtgtacaacaccttcagggccgcggcgcccccgcccccgatcccggcctacggcggtgttgtttaccaggatggattttatggtgcagacatttatggtggttatgctgcataccgctacgcccagcctacccctgccactgccgctgcctacagtgacagttacggacgagtttatgctgccgacccctaccaccacgcacttgctccagcccccacctacggcgttggtgccatgaatgcttttgcacctttgactgatgccaagactaggagccatgctgatgatgtgggtctcgttctttcttcattgcaggctagtatataccgagggggatacaaccgttttgctccatactaaatgacaaaaccataaaaaccttccaatgtggggagaaaggaagctttccgaggcctgagtattgcaatacatgcagtagtacatcattttagcaactctaaaaaaaaaaaaaatacaaataaaaaggaaaaaaaattacattttttatcttatacctcagatattttgttctgtgtattttaatattgtgggtctttaatttctgaaggttccgtagtttggttgctggctgtaggagtttttgtggttgatctagacagatgctagataatgaataaaaactggtttagggccatatccagagtgctatattatgtaaatgaattatatatgctgaatattaagctactggggttatcagctgtttgggaagagtgtaagtgactacagtagtcatttttttctgcacctgcattattttattttgtgaaaggggaggttgggaggggcttaggggattggaactggggtttggctgaaagaaaaaaaaaa

SEQ ID NO: 311130 - DNA, 1802 bp, Homo sapiens
ctttccaagagaacccaggaggaagaagatgctgtgacaggcatttcttatcagggagaggctcccctgcttgcacttcgaatccacaatgatgaaggaattttccttcctgggcgtatttgcttatgttcttggatgtgctgggtaatcaggaagcagccgctgcccctgacacaatggctcagccttacgcttcggcccagtttgctcccccgcagaacggtatccccgcggaatacacggcccctcatccccaccccgcgccagagtacacaggccagaccacggttcccgagcacacattaaacctgtaccctcccgcccagacgcactccgagcagagcccggcggacacgagcgctcagaccgtctctggcaccgccacacagacagatgacgcagcaccgacggatggccagccccagacacaaccttctgaaaacacggaaaacaagtctcagcccaagcggctgcatgtctccaatatccccttcaggttccgggatccggacctcagacaaatgtttggtcaatttggtaaaatcttagatgttgaaattatttttaatgagcgaggctcaaagggatttggtttcgtaactttcgaaaatagtgccgatgcggacagggcgagggagaaattacacggcaccgtggtagagggccgtaaaatcgaggtaaataatgccacagcacgtgtaatgacaaataaaaagaccgtcaacccttatacaaatggctggaaattgaatccagttgtgggtgcagtctacagtcccgaattctatgcaggcacggtcctgttgtgccaggccaaccaggagggatcttccatgtacagtgcccccagttcacttgtatatacttctgcaatgccaggcttcccgtatccagcagccaccgccgcggccgcctaccgaggggcgcacctgcgaggccgcggtcgcaccgtgtacaacaccttcagggccgcggcgcccccgcccccgatcccggcctacggcggtgttgtttaccaggatggattttatggtgcagacatttatggtggttatgctgcataccgctacgcccagcctacccctgccactgccgctgcctacagtgacagttacggacgagtttatgctgccgacccctaccaccacgcacttgctccagcccccacctacggcgttggtgccatgaatgcttttgcacctttgactgatgccaagactaggagccatgctgatgatgtgggtctcgttctttcttcattgcaggctagtatataccgagggggatacaaccgttttgctccatactaaatgacaaaaccataaaaaccttccaatgtggggagaaaggaagctttccgaggcctgagtattgcaatacatgcagtagtacatcattttagcaactctaaaaaaaaaaaaaatacaaataaaaaggaaaaaaaattacattttttatcttatacctcagatattttgttctgtgtattttaatattgtgggtctttaatttctgaaggttccgtagtttggttgctggctgtaggagtttttgtggttgatctagacagatgctagataatgaataaaaactggtttagggccatatccagagtgctatattatgtaaatgaattatatatgctgaatattaagctactggggttatcagctgtttgggaagagtgtaagtgactacagtagtcatttttttctgcacctgcattattttattttgtgaaaggggaggttgggaggggcttaggggattggaactggggtttggctgaaagaaaaaaaaaa

SEQ ID NO: 311131 - DNA, 2819 bp, Homo sapiens
ccgcagccggggctgctcgctgcttgtcgcgcgctcacacacacacagacacacacgcacacacacacatgcacacattttctcgcgctctctccggctctcctttgtttattttctaatctatatttttactggaagatttcctctttattctctcccgccctcctacaagcgctcttgctggccgtctgggtgcacacaccgctccctcgatcaccccagcccccttcctggtctcccgagcgcggggtttgaaggtcacctcctttccagtccccgtgcgagccgcgctgccgccgcctcctccagccagagtcggtgggactggctgcgctgccctgaagtggttctccaagcagcgcggagggtggcggacggcggacggagcccaggggccgcgtcgggtggggaaacccgaactcgcggaggggaatccctcccccttcgccccagccccccagcagcacccgcggtggggcgggggcgctctgccagccccgggaacagcagaggcggcggcactggctggacccacgcgcgcgcctccggggctgaagaaggaaggagtgagccgagccgagcaccccacatctggaggggacagccagccgtgggccccgccccggcgtccggagcaggagaactccgagcttcttgcccaggcagagagagcaggagcggaccgcgcgcccgggattgagagtccttgcgctccagacccccacccagtggccgccagggtccccgcctgtccggaccctcgccgcgcccaggcaggcgcgccagggcggggctgacctgcccgcgaagttgcggacagtgcgtgagaaaccagcacccccttccgccgcctccagcttatggtgagtgtggctgggggtgcagagagcgcacgggaattcgggggtctggggccgagaacgtgaccgcagccgggctcgccgggagttctaggaaactggtcaaagaactcatgcaagtggaacttacagcttccttgatcggactcagcattcagatatcaaagcagactgcaatacctgcgtggaaatagaagacagaaaggtttcaagacaacagatgaattgtgaaagagagcagctaaggggtaatcaggaagcagccgctgcccctgacacaatggctcagccttacgcttcggcccagtttgctcccccgcagaacggtatccccgcggaatacacggcccctcatccccaccccgcgccagagtacacaggccagaccacggttcccgagcacacattaaacctgtaccctcccgcccagacgcactccgagcagagcccggcggacacgagcgctcagaccgtctctggcaccgccacacagacagatgacgcagcaccgacggatggccagccccagacacaaccttctgaaaacacggaaaacaagtctcagcccaagcggctgcatgtctccaatatccccttcaggttccgggatccggacctcagacaaatgtttggtcaatttggtaaaatcttagatgttgaaattatttttaatgagcgaggctcaaagggatttggtttcgtaactttcgaaaatagtgccgatgcggacagggcgagggagaaattacacggcaccgtggtagagggccgtaaaatcgaggtaaataatgccacagcacgtgtaatgacaaataaaaagaccgtcaacccttatacaaatggctggaaattgaatccagttgtgggtgcagtctacagtcccgaattctatgcaggcacggtcctgttgtgccaggccaaccaggagggatcttccatgtacagtgcccccagttcacttgtatatacttctgcaatgccaggcttcccgtatccagcagccaccgccgcggccgcctaccgaggggcgcacctgcgaggccgcggtcgcaccgtgtacaacaccttcagggccgcggcgcccccgcccccgatcccggcctacggcggtgttgtttaccaggatggattttatggtgcagacatttatggtggttatgctgcataccgctacgcccagcctacccctgccactgccgctgcctacagtgacagaaatcagttcgtcttcgttgcagcagatgaaatttcttgtaacacctctgcagttacggacgagtttatgctgccgacccctaccaccacgcacttgctccagcccccacctacggcgttggtgccatgaatgcttttgcacctttgactgatgccaagactaggagccatgctgatgatgtgggtctcgttctttcttcattgcaggctagtatataccgagggggatacaaccgttttgctccatactaaatgacaaaaccataaaaaccttccaatgtggggagaaaggaagctttccgaggcctgagtattgcaatacatgcagtagtacatcattttagcaactctaaaaaaaaaaaaaatacaaataaaaaggaaaaaaaattacattttttatcttatacctcagatattttgttctgtgtattttaatattgtgggtctttaatttctgaaggttccgtagtttggttgctggctgtaggagtttttgtggttgatctagacagatgctagataatgaataaaaactggtttagggccatatccagagtgctatattatgtaaatgaattatatatgctgaatattaagctactggggttatcagctgtttgggaagagtgtaagtgactacagtagtcatttttttctgcacctgcattattttattttgtgaaaggggaggttgggaggggcttaggggattggaactggggtttggctgaaagaaaaaaaaaa

SEQ ID NO: 311132 - DNA, 1194 bp, Homo sapiens
ccgcagccggggctgctcgctgcttgtcgcgcgctcacacacacacagacacacacgcacacacacacatgcacacattttctcgcgctctctccggctctcctttgtttattttctaatctatatttttactggaagatttcctctttattctctcccgccctcctacaagcgctcttgctggccgtctgggtgcacacaccgctccctcgatcaccccagcccccttcctggtctcccgagcgcggggtttgaaggtcacctcctttccagtccccgtgcgagccgcgctgccgccgcctcctccagccagagtcggtgggactggctgcgctgccctgaagtggttctccaagcagcgcggagggtggcggacggcggacggagcccaggggccgcgtcgggtggggaaacccgaactcgcggaggggaatccctcccccttcgccccagccccccagcagcacccgcggtggggcgggggcgctctgccagccccgggaacagcagaggcggcggcactggctggacccacgcgcgcgcctccggggctgaagaaggaaggagtgagccgagccgagcaccccacatctggaggggacagccagccgtgggccccgccccggcgtccggagcaggagaactccgagcttcttgcccaggcagagagagcaggagcggaccgcgcgcccgggattgagagtccttgcgctccagacccccacccagtggccgccagggtccccgcctgtccggaccctcgccgcgcccaggcaggcgcgccagggcggggctgacctgcccgcgaagttgcggacagtgcgtgagaaaccagcacccccttccgccgcctccagcttatggtgagtgtggctgggggtgcagagagcgcacgggaattcgggggtctggggccgagaacgtgaccgcagccgggctcgccgggagttctaggaaactggtcaaagaactcatgcaagtggaacttacagcttccttgatcggactcagcattcagatatcaaagcagactgcaatacctgcgtggaaatagaagacagaaaggtttcaagacaacagatgaattgtgaaagagagcagctaaggcctctccagccctcttttcctcctgtgggccacacttttgcccaatgagatatccactagtcctttagcctgacacctggccaccca

SEQ ID NO: 311133 - DNA, 803 bp, Homo sapiens
atagagtagtgtatcaagagcctgtgtatggcaataaattgctgcagggtggttatgctgcataccgctacgcccagcctacccctgccactgccgctgcctacagtgacagttacggacgagtttatgctgccgacccctaccaccacgcacttgctccagcccccacctacggcgttggtgccatgaatgcttttgcacctttgactgatgccaagactaggagccatgctgatgatgtgggtctcgttctttcttcattgcaggctagtatataccgagggggatacaaccgttttgctccatactaaatgacaaaaccataaaaaccttccaatgtggggagaaaggaagctttccgaggcctgagtattgcaatacatgcagtagtacatcattttagcaactctaaaaaaaaaaaaaatacaaataaaaaggaaaaaaaattacattttttatcttatacctcagatattttgttctgtgtattttaatattgtgggtctttaatttctgaaggttccgtagtttggttgctggctgtaggagtttttgtggttgatctagacagatgctagataatgaataaaaactggtttagggccatatccagagtgctatattatgtaaatgaattatatatgctgaatattaagctactggggttatcagctgtttgggaagagtgtaagtgactacagtagtcatttttttctgcacctgcattattttattttgtgaaaggggaggttgggaggggcttaggggattggaactggggtttggctgaaagaaaaaaaaaa

SEQ ID NO: 311134 - DNA, 1884 bp, Homo sapiens
ctagcacgtgggtgccgtttgctgttgcctcggacttctcccgtgctgtgttttcccggtgaggaaacaggaggcactttgcagccgacaatgaaatcttggcagctaattgcagtcgtgggagatgcccttcaggatatcaaagcagactgcaatacctgcgtggaaatagaagacagaaaggtttcaagacaacagatgaattgtgaaagagagcagctaaggggtaatcaggaagcagccgctgcccctgacacaatggctcagccttacgcttcggcccagtttgctcccccgcagaacggtatccccgcggaatacacggcccctcatccccaccccgcgccagagtacacaggccagaccacggttcccgagcacacattaaacctgtaccctcccgcccagacgcactccgagcagagcccggcggacacgagcgctcagaccgtctctggcaccgccacacagacagatgacgcagcaccgacggatggccagccccagacacaaccttctgaaaacacggaaaacaagtctcagcccaagcggctgcatgtctccaatatccccttcaggttccgggatccggacctcagacaaatgtttggtcaatttggtaaaatcttagatgttgaaattatttttaatgagcgaggctcaaagggatttggtttcgtaactttcgaaaatagtgccgatgcggacagggcgagggagaaattacacggcaccgtggtagagggccgtaaaatcgaggtaaataatgccacagcacgtgtaatgacaaataaaaagaccgtcaacccttatacaaatggctggaaattgaatccagttgtgggtgcagtctacagtcccgaattctatgcaggcacggtcctgttgtgccaggccaaccaggagggatcttccatgtacagtgcccccagttcacttgtatatacttctgcaatgccaggcttcccgtatccagcagccaccgccgcggccgcctaccgaggggcgcacctgcgaggccgcggtcgcaccgtgtacaacaccttcagggccgcggcgcccccgcccccgatcccggcctacggcggtgttgtttaccaggatggattttatggtgcagacatttatggtggttatgctgcataccgctacgcccagcctacccctgccactgccgctgcctacagtgacagttacggacgagtttatgctgccgacccctaccaccacgcacttgctccagcccccacctacggcgttggtgccatgaatgcttttgcacctttgactgatgccaagactaggagccatgctgatgatgtgggtctcgttctttcttcattgcaggctagtatataccgagggggatacaaccgttttgctccatactaaatgacaaaaccataaaaaccttccaatgtggggagaaaggaagctttccgaggcctgagtattgcaatacatgcagtagtacatcattttagcaactctaaaaaaaaaaaaaatacaaataaaaaggaaaaaaaattacattttttatcttatacctcagatattttgttctgtgtattttaatattgtgggtctttaatttctgaaggttccgtagtttggttgctggctgtaggagtttttgtggttgatctagacagatgctagataatgaataaaaactggtttagggccatatccagagtgctatattatgtaaatgaattatatatgctgaatattaagctactggggttatcagctgtttgggaagagtgtaagtgactacagtagtcatttttttctgcacctgcattattttattttgtgaaaggggaggttgggaggggcttaggggattggaactggggtttggctgaaagaaaaaaaaaa

SEQ ID NO: 311135 - DNA, 1279 bp, Homo sapiens
ttttgttatgcacctactgccttttataaattaaaatgcattttactttttagttttcttttttaataagtaatcacggtcataatgcatgcaactaattgaattgggagctggccctagaatatgtgcttacttgagttttctatgtacataggtaaataatgccacagcacgtgtaatgacaaataaaaagaccgtcaacccttatacaaatggctggaaattgaatccagttgtgggtgcagtctacagtcccgaattctatgcaggcacggtcctgttgtgccaggccaaccaggagggatcttccatgtacagtgcccccagttcacttgtatatacttctgcaatgccaggcttcccgtatccagcagccaccgccgcggccgcctaccgaggggcgcacctgcgaggccgcggtcgcaccgtgtacaacaccttcagggccgcggcgcccccgcccccgatcccggcctacggcggtgttgtttaccaggatggattttatggtgcagacatttatggtggttatgctgcataccgctacgcccagcctacccctgccactgccgctgcctacagtgacagttacggacgagtttatgctgccgacccctaccaccacgcacttgctccagcccccacctacggcgttggtgccatgaatgcttttgcacctttgactgatgccaagactaggagccatgctgatgatgtgggtctcgttctttcttcattgcaggctagtatataccgagggggatacaaccgttttgctccatactaaatgacaaaaccataaaaaccttccaatgtggggagaaaggaagctttccgaggcctgagtattgcaatacatgcagtagtacatcattttagcaactctaaaaaaaaaaaaaatacaaataaaaaggaaaaaaaattacattttttatcttatacctcagatattttgttctgtgtattttaatattgtgggtctttaatttctgaaggttccgtagtttggttgctggctgtaggagtttttgtggttgatctagacagatgctagataatgaataaaaactggtttagggccatatccagagtgctatattatgtaaatgaattatatatgctgaatattaagctactggggttatcagctgtttgggaagagtgtaagtgactacagtagtcatttttttctgcacctgcattattttattttgtgaaaggggaggttgggaggggcttaggggattggaactggggtttggctgaaagaaaaaaaaaa

SEQ ID NO: 311136 - DNA, 1821 bp, Homo sapiens
aggtcaggtgacgcggccggcgtcccaagatggcggcggcggcggctcccggaaggccgcggcggcgtcccggctgctaaggcgggccccacgcggctggcagcggacaggccggacctacggccggaggacgggcggcagccgcctctgcgcggaccggggctgggccgtgcggcggcagcggcgccaggggatgctcttgctgggcctggcctctcccttctcaacttagggcggcggcgggcccgcgcccctggctcccgggccatggcgctgagggagctcaaagtgtgtctgctcggggatacaggtgtaggtaaatcgagtattgtgtggcggtttgtggaagacagttttgatccaaacatcaacccaacaataggggcatcttttatgaccaagactgtccagtaccaaaatgagctacataaattcctaatctgggatacagctggacaagaacgatttcgtgccttagcaccaatgtactatcgagggtcggctgcagctataatcgtttatgatatcacaaaagaagagacattttcaacattaaagaattgggtgaaagagcttcgacagcatggcccacctaatattgtagttgccattgcaggaaataaatgtgatcttatcgatgtaagagaagtcatggagagagatgcaaaggactacgccgactctattcatgcaatttttgtagagaccagcgcaaaaaacgcgataaacataaatgaactctttatagaaattagtcgaagaattccatccactgacgccaacctgccatctggcggtaagggcttcaaactccgaagacagccttcagagccaaagcggagctgctgctgaccgaacctcagcctctcagacttgatgatgaagtaggtggtcctgaaagttaacaggagggctggggtccctgccaccagttttcacctagccagtcttgagtcttctccgtgcaaaaaggattcacagaaatggaccagttctgttctccaaagactgcagcaatgatatttcagtctgtgaacttctattatgtaaagaatctctagtgtacaaagggactacatcgttggcttttgaccttgctgaaaaggaacatataattgtatggatggtaggattaagttgttgagtagttttgtaatcaagattttatgtaacatttgtaaagggaaaattagcacttttgtggttcttaagggaaaagaaacagaccttgtggagattataatttccttggtttctgttaccactgttagagggagttgtatcatttaacatatagtaggatagtttaagtgtagggaggacaattattgtctgaagctaaaatgggttatttataggactgatggaaatgatttcatctctgccatctctaaagcacttttcattgaacatgttagcctaggatacgtacagtaaattaacaatgatagcagcagatgcctagctcatcctgggtttgcttctgaccttgtcatgtgtgtgccaccaaacacgttattggcacctttttaaataagctctcatgatcaagatggtgatggtagagaagctgcccggaataaactgaatttcatatgttctaaaatgactagcaatggtttaaaaaggaagaagagtggaagtgaagaaggtggtataaatgctgtcaatttttttttaacccaagtattttggtggggaaaagcaagtatctattgcttagcatatgtaaagttgtagtctatatttatggggccattgcttaaagattataaattatgtaaatacattaataaattctaagtttcatttgacattcca

SEQ ID NO: 311137 - DNA, 2445 bp, Homo sapiens
aggtcaggtgacgcggccggcgtcccaagatggcggcggcggcggctcccggaaggccgcggcggcgtcccggctgctaaggcgggccccacgcggctggcagcggacaggccggacctacggccggaggacgggcggcagccgcctctgcgcggaccggggctgggccgtgcggcggcagcggcgccaggggatgctcttgctgggcctggcctctcccttctcaacttagggcggcggcgggcccgcgcccctggctcccgggccatggcgctgagggagctcaaagtgtgtctgctcggggatacaggtgtaggtaaatcgagtattgtgtggcggtttgtggaagacagttttgatccaaacatcaacccaacaataggggcatcttttatgaccaagactgtccagtaccaaaatgagctacataaattcctaatctgggatacagctggacaagaacgatttcgtgccttagcaccaatgtactatcgagggtcggctgcagctataatcgtttatgatatcacaaaagaagagacattttcaacattaaagaattgggtgaaagagcttcgacagcatggcccacctaatattgtagttgccattgcaggaaataaatgtgatcttatcgatgtaagagaagtcatggagagagatgcaaaggactacgccgactctattcatgcaatttttgtagagaccagcgcaaaaaacgcgataaacataaatgaactctttatagaaattagtcgaagaattccatccactgacgccaacctgccatctggcggtaagggcttcaaactccgaagacagccttcagagccaaagcggagctgctgctgaccgaacctcagcctctcagacttgatgatgaagtaggtggtcctgaaagttaacaggagggctggggtccctgccaccagttttcacctagccagtcttgagtcttctccgtgcaaaaaggattcacagaaatggaccagttctgttctccaaagactgcagcaatgatatttcagtctgtgaacttctattatgtaaagaatctctagtgtacaaagggactacatcgttggcttttgaccttgctgaaaaggaacatataattgtatggatggtaggattaagttgttgagtagttttgtaatcaagattttatgtaacatttgtaaagggaaaattagcacttttgtggttcttaagggaaaagaaacagaccttgtggagattataatttccttggtttctgttaccactgttagagggagttgtatcatttaacatatagtaggatagtttaagtgtagggaggacaattattgtctgaagctaaaatgggttatttataggactgatggaaatgatttcatctctgccatctctaaagcacttttcattgaacatgttagcctaggatacgtacagtaaattaacaatgatagcagcagatgcctagctcatcctgggtttgcttctgaccttgtcatgtgtgtgccaccaaacacgttattggcacctttttaaataagctctcatgatcaagatggtgatggtagagaagctgcccggaataaactgaatttcatatgttctaaaatgactagcaatggtttaaaaaggaagaagagtggaagtgaagaaggtggtataaatgctgtcaatttttttttaacccaagtattttggtggggaaaagcaagtatctattgcttagcatatgtaaagttgtagtctatatttatggggccattgcttaaagattataaattatgtaaatacattaataaattctaagtttcatttgacattccattgaatctcgcacccagtcttgcgtatgcctgcccagttttcagcctcttaacgggagactcaagcacattggtattgtataaaggtatagagcacttagcttacaatctttaaaggtttctctgccttcccttctacccacccgcctcccaccagatcccatctggaaatcataataaagacatatgccactttgacaaacctgactagtccttactagcctgagggtaaaagattaagctccaacctcaagtcatttacctggtcttggtaataagtttcttttagcttgtacagcatcctcagaccaactgaggagctttccttgttaacaatttagcttatctttctgtttcctttatttttcccctgcctctgttagtggttaacactcttttccctcagggagcctaatgaggtttttaatatcatctaaaaataaagcattgaagtgaagttggtgaaaatttgttcctggtctaatttggcacccttccaacctgagtattgtaggggaaggaaatttacaagatttaataggaaatgaaacagcttgaatttcaaactaaattgtattttcagagctatcctgaaactgaacagctgaaactttaaaaaataatt

SEQ ID NO: 311138 - DNA, 1252 bp, Homo sapiens
  misc_feature (320)..(320): n is a, c, g, or t
aggtcaggtgacgcggccggcgtcccaagatggcggcggcggcggctcccggaaggccgcggcggcgtcccggctgctaaggcgggccccacgcggctggcagcggacaggccggacctacggggcttgtactagtcaggaaccggctctctagcgtctagtggcgattagtggagtccgaaacgttgtggcgaatgagcatcgcagggatatgcttctttagtctgggtctctaggctctctgccctgcgtcgtctatagtggcgtgctgagcggggcccggcgccccgtgtgctccctggagcctaagagttgcttanagggatatattacgaaattaagggagaggggcgataagaaacgttgtaaggatttgagagtacgattgaagatatggaggcgtagaagaggatttaattacttgttgagaataccagaactacaggctccattctgataagtagtgatcagacgttgaggtataagagcgcggggtatatctagagtctggggaagcgttggattgggaatatttctatatctattaattgcagactcgaggattatcaagagtgcacgatcagaccaaggagcgggagtagaacgtagaagttcgggagatcgctaaaggtgatctcaaattgaaggacctaagtacctttagaagtagggacttagggaaagtctgggggtatataacagtagtctgtttttaagcagaacatattggttagtccagataaatttagttgtcagattagccagagtgtttaccaggccgttaagtttgggggttagtataaggagagtgttgaatgtgggttaagtggcaaggggcatgatcggagagactaaaagaatttcctttgggccctggagaagaaggttggtatattatggggaagaaggtttccgaaaagaaatttgagaaatctatcattagaggggagtgagagattttagtagcgtgatttataaccgataaggggagagaaagagaagatgaagcttaatctggagagagccaacttaatgggggagttaagttatttgaactaagggcactgggtagttagatttatggagttggatccgttgcgggcaggaatcgcaaccttgagagaggcctgggagaggtgtcgagttatttattaattttggggaaggagagcggattgtgatcgtttcgaaggggttgattccagtttgagattgaaatgcgtatcggtgattaggggagattgcgaggaag

SEQ ID NO: 311139 - DNA, 1739 bp, Homo sapiens
aggtcaggtgacgcggccggcgtcccaagatggcggcggcggcggctcccggaaggccgcggcggcgtcccggctgctaaggcgggccccacgcggctggcagcggacaggccggacctacggccggaggacgggcggcagccgcctctgcgcggaccggggctgggccgtgcggcggcagcggcgccaggggatgctcttgctgggcctggcctctcccttctcaacttagggcggcggcgggcccgcgcccctggctcccgggccatggcgctgagggagctcaaagtgtgtctgctcggggatacaggtgtaggtaaatcgagtattgtgtggcggtttgtggaagacagttttgatccaaacatcaacccaacaataggtttcgtgccttagcaccaatgtactatcgagggtcggctgcagctataatcgtttatgatatcacaaaagaagagacattttcaacattaaagaattgggtgaaagagcttcgacagcatggcccacctaatattgtagttgccattgcaggaaataaatgtgatcttatcgatgtaagagaagtcatggagagagatgcaaaggactacgccgactctattcatgcaatttttgtagagaccagcgcaaaaaacgcgataaacataaatgaactctttatagaaattagtcgaagaattccatccactgacgccaacctgccatctggcggtaagggcttcaaactccgaagacagccttcagagccaaagcggagctgctgctgaccgaacctcagcctctcagacttgatgatgaagtaggtggtcctgaaagttaacaggagggctggggtccctgccaccagttttcacctagccagtcttgagtcttctccgtgcaaaaaggattcacagaaatggaccagttctgttctccaaagactgcagcaatgatatttcagtctgtgaacttctattatgtaaagaatctctagtgtacaaagggactacatcgttggcttttgaccttgctgaaaaggaacatataattgtatggatggtaggattaagttgttgagtagttttgtaatcaagattttatgtaacatttgtaaagggaaaattagcacttttgtggttcttaagggaaaagaaacagaccttgtggagattataatttccttggtttctgttaccactgttagagggagttgtatcatttaacatatagtaggatagtttaagtgtagggaggacaattattgtctgaagctaaaatgggttatttataggactgatggaaatgatttcatctctgccatctctaaagcacttttcattgaacatgttagcctaggatacgtacagtaaattaacaatgatagcagcagatgcctagctcatcctgggtttgcttctgaccttgtcatgtgtgtgccaccaaacacgttattggcacctttttaaataagctctcatgatcaagatggtgatggtagagaagctgcccggaataaactgaatttcatatgttctaaaatgactagcaatggtttaaaaaggaagaagagtggaagtgaagaaggtggtataaatgctgtcaatttttttttaacccaagtattttggtggggaaaagcaagtatctattgcttagcatatgtaaagttgtagtctatatttatggggccattgcttaaagattataaattatgtaaatacattaataaattctaagtttcatttgacattcca

SEQ ID NO: 311140 - DNA, 1163 bp, Homo sapiens
ttttacttcagtgaaacctgtcaaattgcatctgcaaaattgttgtgtctgagaaagttaaagctcactcccttcccttttctcatcttggtttaggtcgaagaattccatccactgacgccaacctgccatctggcggtaagggcttcaaactccgaagacagccttcagagccaaagcggagctgctgctgaccgaacctcagcctctcagacttgatgatgaagtaggtggtcctgaaagttaacaggagggctggggtccctgccaccagttttcacctagccagtcttgagtcttctccgtgcaaaaaggattcacagaaatggaccagttctgttctccaaagactgcagcaatgatatttcagtctgtgaacttctattatgtaaagaatctctagtgtacaaagggactacatcgttggcttttgaccttgctgaaaaggaacatataattgtatggatggtaggattaagttgttgagtagttttgtaatcaagattttatgtaacatttgtaaagggaaaattagcacttttgtggttcttaagggaaaagaaacagaccttgtggagattataatttccttggtttctgttaccactgttagagggagttgtatcatttaacatatagtaggatagtttaagtgtagggaggacaattattgtctgaagctaaaatgggttatttataggactgatggaaatgatttcatctctgccatctctaaagcacttttcattgaacatgttagcctaggatacgtacagtaaattaacaatgatagcagcagatgcctagctcatcctgggtttgcttctgaccttgtcatgtgtgtgccaccaaacacgttattggcacctttttaaataagctctcatgatcaagatggtgatggtagagaagctgcccggaataaactgaatttcatatgttctaaaatgactagcaatggtttaaaaaggaagaagagtggaagtgaagaaggtggtataaatgctgtcaatttttttttaacccaagtattttggtggggaaaagcaagtatctattgcttagcatatgtaaagttgtagtctatatttatggggccattgcttaaagattataaattatgtaaatacattaataaattctaagtttcatttgacattcca

SEQ ID NO: 311141 - DNA, 1075 bp, Homo sapiens
aggtcaggtgacgcggccggcgtcccaagatggcggcggcggcggctcccggaaggccgcggcggcgtcccggctgctaaggcgggccccacgcggctggcagcggacaggccggacctacggccggaggacgggcggcagccgcctctgcgcggaccggggctgggccgtgcggcggcagcggcgccaggggatgctcttgctgggcctggcctctcccttctcaacttagggcggcggcgggcccgcgcccctggctcccgggccatggcgctgagggagctcaaagtgtgtctgctcggggatacaggtgtaggtaaatcgagtattgtgtggcggtttgtggaagacagttttgatccaaacatcaacccaacaataggggcatcttttatgaccaagactgtccagtaccaaaatgagctacataaattcctaatctgggatacagctggacaagaacgatttcgtgccttagcaccaatgtactatcgagggtcggctgcagctataatcgtttatgatatcacaaaagaagagacattttcaacattaaagaattgggtgaaagagcttcgacagcatggcccacctaatattgtagttgccattgcaggaaataaatgtgatcttatcgatgtaagagaagtcatggagagagatgcaaaggactacgccgactctattcatgcaatttttgtagagaccagcgcaaaaaacgcgataaacataaatgaactctttatagaaattagtcgaagaattccatccactgacgccaacctgccatctggcggtaagggcttcaaactccgaagacagccttcagagccaaagcggagctgctgctgaccgaacctcagcctctcagacttgatgatgaagtaggtggtcctgaaagttaacaggagggctggggtccctgccaccagttttcacctagccagtcttgagtcttctccgtgcaaaaaggattcacagaaatggaccagttctgttctccaaagactgcagcaatgatatttcagtctgtgaacttcaagttatatattcccttttcaggggaacctctagg

SEQ ID NO: 311142 - DNA, 1428 bp, Homo sapiens
cggcagctgttcgcctgcgtcgctccgggagctgccgacggacggagcgcccccgcccccgcccggccgcccgcccgccgccgccatgcccttctccaacagccacaacgcactgaagctgcgcttcccggccgaggacgagttccccgacctgagcgcccacaacaaccacatggccaaggtgctgacccccgagctgtacgcggagctgcgcgccaagagcacgccgagcggcttcacgctggacgacgtcatccagacaggcgtggacaacccgggccacccgtacatcatgaccgtgggctgcgtggcgggcgacgaggagtcctacgaagtgttcaaggatctcttcgaccccatcatcgaggaccggcacggcggctacaagcccagcgatgagcacaagaccgacctcaaccccgacaacctgcagggcggcgacgacctggaccccaactacgtgctgagctcgcgggtgcgcacgggccgcagcatccgtggcttctgcctccccccgcactgcagccgcggggagcgccgcgccatcgagaagctcgcggtggaagccctgtccagcctggacggcgacctggcgggccgatactacgcgctcaagagcatgacggaggcggagcagcagcagctcatcgacgaccacttcctcttcgacaagcccgtgtcgcccctgctgctggcctcgggcatggcccgcgactggcccgacgcccgcggtatctggcacaatgacaataagaccttcctggtgtgggtcaacgaggaggaccacctgcgggtcatctccatgcagaaggggggcaacatgaaggaggtgttcacccgcttctgcaccggcctcacccagattgaaactctcttcaagtctaaggactatgagttcatgtggaaccctcacctgggctacatcctcacctgcccatccaacctgggcaccgggctgcgggcaggtgtgcatatcaagctgcccaacctgggcaagcatgagaagttctcggaggtgcttaagcggctgcgacttcagaagcgaggcacaggcggtgtggacacggctgcggtgggcggggtcttcgacgtctccaacgctgaccgcctgggcttctcagaggtggagctggtgcagatggtggtggacggagtgaagctgctcatcgagatggaacagcggctggagcagggccaggccatcgacgacctcatgcctgcccagaaatgaagcccggcccacacccgacaccagccctgctgcttcctaacttattgcctgggcagtgcccaccatgcacccctgatgttcgccgtctggcgagcccttagccttgctgtagagacttccgtcacccttggtagagtttatttttttgatggctaagatactgctgatgctgaaataaactagggttttggcctgcc

SEQ ID NO: 311143 - DNA, 624 bp, Homo sapiens
ccacgcgtacgcccacgcgtccgggtgttcacccgcgttctgcaccggcctcacccagattgaaactctcttcaagtctaaggactatgagttcatgtggaaccctcacctgggctacatcctcacctgcccatccaacctgggcaccgggctgcgggcaggtgtgcatatcaagctgcccaacctgggcaagcatgagaagttctcggaggtgcttaagcggctgcgacttcagaagcgaggcacaggcggtgtggacacggctgcggtgggcggggtcttcgacgtctccaacgctgaccgcctgggcttctcagaggtggagctggtgcagatggtggtggacggagtgaagctgctcatcgagatggaacagcggctggagcagggccaggccatcgacgacctcatgcctgcccagaaatgaagcccggcccacacccgacaccagccctgctgcttcctaacttattgcctgggcagtgcccaccatgcacccctgatgttcgccgtctggcgagcccttagccttgctgtagagacttccgtcacccttggtagagtttatttttttgatggctaagatactgctgatgctgaaataaactagggttttggcctgcc

SEQ ID NO: 311144 - DNA, 732 bp, Homo sapiens
  misc_feature (699)..(699): n is a, c, g, or t
cggcagctgttcgcctgcgtcgctccgggagctgccgacggacggagcgcccccgcccccgcccggccgcccgcccgccgccgccatgcccttctccaacagccacaacgcactgaagctgcgcttcccggccgaggacgagttccccgacctgagcgcccacaacaaccacatggccaaggtgctgacccccgagctgtacgcggagctgcgcgccaagagcacgccgagcggcttcacgctggacgacgtcatccagacaggcgtggacaacccgggccacccgtacatcatgaccgtgggctgcgtggcgggcgacgaggagtcctacgaagtgttcaaggatctcttcgaccccatcatcgaggaccggcacggcggctacaagcccagcgatgagcacaagaccgacctcaaccccgacaacctgcagggcggcgacgacctggaccccaactacgtgctgagctcgcgggtgcgcacgggccgcagcatccgtggcttctgcctccccccgcactgcagccgcggggagcgccgcgccatcgagaagctcgcggtggaagccctgtccagcctggacggcgacctggcgggccgatactacgcgctcaagagcatgacggaggcggagcagcagcagctcatcgacgaccacttcctcttcgacaagcccgtgtcccgccgccgcatgccttntcaacagccacaacgcactgaactgccttccgg

SEQ ID NO: 311145 - DNA, 413 bp, Homo sapiens
tatacggctgttagaagacgacagaagggaggcacaggcggtgtggacacggctgcggtgggcggggtcttcgacgtctccaacgctgaccgcctgggcttctcagaggtggagctggtgcagatggtggtggacggagtgaagctgctcatcgagatggaacagcggctggagcagggccaggccatcgacgacctcatgcctgcccagaaatgaagcccggcccacacccgacaccagccctgctgcttcctaacttattgcctgggcagtgcccaccatgcacccctgatgttcgccgtctggcgagcccttagccttgctgtagagacttccgtcacccttggtagagtttatttttttgatggctaagatactgctgatgctgaaataaactagggttttggcctgcc

SEQ ID NO: 311146 - DNA, 494 bp, Homo sapiens
gctgacggcggttggatacagcgtgttctggctcagtctggcgtctggcggggctcgagtggacgaatactactgtcgtccgcacaacgagcgcgtggtggcggtggcgagagttctgcaaagtgcatctcttccagatacgccgtgcgctcgtgccaagtcgcccgagctcgcatgtactggggggcacacgggagacacacttgaccagcgtacgattcacgcacgacaactcgcacctcgtactcgcatgggctgcgataaggacgccagaattttccagtggccgagtgctggagcagctagggcgcgtcggctggggccgtgacgcccatcgcgtcgcgcgtcatcggaaccacccatgcacccctgatgttcgccgtctggcgagcccttagccttgctgtagagacttccgtcacccttggtagagtttatttttttgatggctaagatactgctgatgctgaaataaactagggttttggcctgcc

SEQ ID NO: 311147 - DNA, 1568 bp, Homo sapiens
cggcagctgttcgcctgcgtcgctccgggagctgccgacggacggagcgcccccgcccccgcccggccgcccgcccgccgccgccatgcccttctccaacagccacaacgcactgaagctgcgcttcccggccgaggacgagttccccgacctgagcgcccacaacaaccacatggccaaggtgctgacccccgagctgtacgcggagctgcgcgccaagagcacgccgagcggcttcacgctggacgacgtcatccagacaggcgtggacaacccgggccacccgtacatcatgaccgtgggctgcgtggcgggcgacgaggagtcctacgaagtgttcaaggatctcttcgaccccatcatcgaggaccggcacggcggctacaagcccagcgatgagcacaagaccgacctcaaccccgacaacctgcagggcggcgacgacctggaccccaactacgtgctgagctcgcgggtgcgcacgggccgcagcatccgtggcttctgcctccccccgcactgcagccgcggggagcgccgcgccatcgagaagctcgcggtggaagccctgtccagcctggacggcgacctggcgggccgatactacgcgctcaagagcatgacggaggcggagcagcagcagctcatcgacgaccacttcctcttcgacaagcccgtgtcgcccctgctgctggcctcgggcatggcccgcgactggcccgacgcccgcggtatctggcacaatgacaataagaccttcctggtgtgggtcaacgaggaggaccacctgcgggtcatctccatgcagaaggggggcaacatgaaggaggtgttcacccgcttctgcaccggcctcacccagattgaaactctcttcaagtctaaggactatgagttcatgtggaaccctcacctgggctacatcctcacctgcccatccaacctgggcaccgggctgcgggcaggtgtgcatatcaagctgcccaacctgggcaagcatgagaagttctcggaggtgcttaagcggctgcgacttcagaagcgaggcacaggcggtgtggacacggctgcggtgggcggggtcttcgacgtctccaacgctgaccgcctgggcttctcagaggtggagctggtgcagatggtggtggacggagtgaagctgctcatcgagatggaacagcggctggagcagggccaggccatcgacgacctcatgcctgcccagaaatgaagcccggcccacacccgacaccagccctgctgcttcctaacttattgcctgggcagtgcccaccatgcacccctgatgttcgccgtctggcgagcccttagccttgctgtagagacttccgtcacccttggtagagtttatttttttgatggctaagatactgctgatgctgaaataaactagggttttggcctgccaaaaaaaaaaaaaaaaaaaaaaaaaatggggggtttattgggggggggaaaaggggttgaagggaatgggatgggtttgggaccattttgtgaagggggattggggggtcccaaggggggggaattatgaaagcggtacg

SEQ ID NO: 311148 - DNA, 1997 bp, Homo sapiens
cggcagctgttcgcctgcgtcgctccgggagctgccgacggacggagcgcccccgcccccgcccggccgcccgcccgccgccgccatgcccttctccaacagccacaacgcactgaagctgcgcttcccggccgaggacgagttccccgacctgagcgcccacaacaaccacatggccaaggtgctgacccccgagctgtacgcggagctgcgcgccaagagcacgccgagcggcttcacgctggacgacgtcatccagacaggcgtggacaacccgggccacccgtacatcatgaccgtgggctgcgtggcgggcgacgaggagtcctacgaagtgttcaaggatctcttcgaccccatcatcgaggaccggcacggcggctacaagcccagcgatgagcacaagaccgacctcaaccccgacaacctgcagggcggcgacgacctggaccccaactacgtgctgagctcgcgggtgcgcacgggccgcagcatccgtggcttctgcctccccccgcactgcagccgcggggagcgccgcgccatcgagaagctcgcggtggaagccctgtccagcctggacggcgacctggcgggccgatactacgcgctcaagagcatgacggaggcggagcagcagcagctcatcgacgaccacttcctcttcgacaagcccgtgtcgcccctgctgctggcctcgggcatggcccgcgactggcccgacgcccgcggtatctggcacaatgacaataagaccttcctggtgtgggtcaacgaggaggaccacctgcgggtcatctccatgcagaaggggggcaacatgaaggaggtgttcacccgcttctgcaccggcctcacccagattgaaactctcttcaagtctaaggactatgagttcatgtggaaccctcacctgggctacatcctcacctgcccatccaacctgggcaccgggctgcgggcaggtgtgcatatcaagctgcccaacctgggcaagcatgagaagttctcggaggtgcttaagcggctgcgacttcagaagcgaggcacaggcggtgtggacacggctgcggtgggcggggtcttcgacgtctccaacgctgaccgcctgggcttctcagaggtggagctggtgcagatggtggtggacggagtgaagctgctcatcgagatggaacagcggctggagcagggccaggccatcgacgacctcatgcctgcccagaaatgaagcccggcccacacccgacaccagccctgctgcttcctaacttattgcctgggcagtgcccaccatgcacccctgatgttcgccgtctggcgagcccttagccttgctgtagagacttccgtcacccttggtagagtttatttttttgatggctaagatactgctgatgctgaaataaactagggttttggcctgccaaaaaaaaaaaaaaaaaaaaaaaaaaaaaaaaaacctccggggccttttttgtgcggggtgggggaaaaaggggttttgagaaggggcccgtgggccattgtgtgttcccggcccccgttttttgtgtccccgggggggaaaccggggcggggccccccaatagggggggcggaaaaaatccggaaaagccggggttcccctgttagttcttcgtggcagcgagaatccgggggaaattaacccccccataaaagagggggggtcttgggagaccacacagagggactcgtggggaaaccactttgacgggggagaaaccgccggagtgagaacaaaaaaaacaccgggatccacagggggggtggggcgcgagagaaggaacacccacttaccgagggaagggggttagagaggaggacaaccaaaaggggcctagagcccgagtagggcccaataaggttagtaacggtaaacacctagcgaaccatacaggattcgcagagaggaacgcttcgggagcaaacaagtcgagatggcagaggagggagtaagcacggagacaccagaa

SEQ ID NO: 311149 - DNA, 1776 bp, Homo sapiens
cggcagctgttcgcctgcgtcgctccgggagctgccgacggacggagcgcccccgcccccgcccggccgcccgcccgccgccgccatgcccttctccaacagccacaacgcactgaagctgcgcttcccggccgaggacgagttccccgacctgagcgcccacaacaaccacatggccaaggtgctgacccccgagctgtacgcggagctgcgcgccaagagcacgccgagcggcttcacgctggacgacgtcatccagacaggcgtggacaacccgggccacccgtacatcatgaccgtgggctgcgtggcgggcgacgaggagtcctacgaagtgttcaaggatctcttcgaccccatcatcgaggaccggcacggcggctacaagcccagcgatgagcacaagaccgacctcaaccccgacaacctgcagggcggcgacgacctggaccccaactacgtgctgagctcgcgggtgcgcacgggccgcagcatccgtggcttctgcctccccccgcactgcagccgcggggagcgccgcgccatcgagaagctcgcggtggaagccctgtccagcctggacggcgacctggcgggccgatactacgcgctcaagagcatgacggaggcggagcagcagcagctcatcgacgaccacttcctcttcgacaagcccgtgtcgcccctgctgctggcctcgggcatggcccgcgactggcccgacgcccgcggtatctggcacaatgacaataagaccttcctggtgtgggtcaacgaggaggaccacctgcgggtcatctccatgcagaaggggggcaacatgaaggaggtgttcacccgcttctgcaccggcctcacccagattgaaactctcttcaagtctaaggactatgagttcatgtggaaccctcacctgggctacatcctcacctgcccatccaacctgggcaccgggctgcgggcaggtgtgcatatcaagctgcccaacctgggcaagcatgagaagttctcggaggtgcttaagcggctgcgacttcagaagcgaggcacaggcggtgtggacacggctgcggtgggcggggtcttcgacgtctccaacgctgaccgcctgggcttctcagaggtggagctggtgcagatggtggtggacggagtgaagctgctcatcgagatggaacagcggctggagcagggccaggccatcgacgacctcatgcctgcccagaaatgaagcccggcccacacccgacaccagccctgctgcttcctaacttattgcctgggcagtgcccaccatgcacccctgatgttcgccgtctggcgagcccttagccttgctgtagagacttccgtcacccttggtagagtttatttttttgatggctaagatactgctgatgctgaaataaactagggttttggcctgccaaaaaaaaaaaaaaaaaaaaaaagggggggggccaaaaaattccccgggggggcccccatagcgaccccaggtttctggggaagcggggcccaacaggggagcgaataaaaacgaaggagcgggcggggtttacaccgtcgggcgggacacggcagcggcttgggagggcccccctgcggcggggcaaggcaccccccaaacgataaaagccagggaatacacaccggaggggcacccgacctggggaacgccgatattaagcagcacggagagtacaagggacgacatcagagaccagtagacgcacagaccagaaaaagcaaacaacacgaaacacacgaacgcca

SEQ ID NO: 311150 - DNA, 1723 bp, Homo sapiens
cggcagctgttcgcctgcgtcgctccgggagctgccgacggacggagcgcccccgcccccgcccggccgcccgcccgccgccgccatgcccttctccaacagccacaacgcactgaagctgcgcttcccggccgaggacgagttccccgacctgagcgcccacaacaaccacatggccaaggtgctgacccccgagctgtacgcggagctgcgcgccaagagcacgccgagcggcttcacgctggacgacgtcatccagacaggcgtggacaacccgggccacccgtacatcatgaccgtgggctgcgtggcgggcgacgaggagtcctacgaagtgttcaaggatctcttcgaccccatcatcgaggaccggcacggcggctacaagcccagcgatgagcacaagaccgacctcaaccccgacaacctgcagggcggcgacgacctggaccccaactacgtgctgagctcgcgggtgcgcacgggccgcagcatccgtggcttctgcctccccccgcactgcagccgcggggagcgccgcgccatcgagaagctcgcggtggaagccctgtccagcctggacggcgacctggcgggccgatactacgcgctcaagagcatgacggaggcggagcagcagcagctcatcgacgaccacttcctcttcgacaagcccgtgtcgcccctgctgctggcctcgggcatggcccgcgactggcccgacgcccgcggtatctggcacaatgacaataagaccttcctggtgtgggtcaacgaggaggaccacctgcgggtcatctccatgcagaaggggggcaacatgaaggaggtgttcacccgcttctgcaccggcctcacccagattgaaactctcttcaagtctaaggactatgagttcatgtggaaccctcacctgggctacatcctcacctgcccatccaacctgggcaccgggctgcgggcaggtgtgcatatcaagctgcccaacctgggcaagcatgagaagttctcggaggtgcttaagcggctgcgacttcagaagcgaggcacaggcggtgtggacacggctgcggtgggcggggtcttcgacgtctccaacgctgaccgcctgggcttctcagaggtggagctggtgcagatggtggtggacggagtgaagctgctcatcgagatggaacagcggctggagcagggccaggccatcgacgacctcatgcctgcccagaaatgaagcccggcccacacccgacaccagccctgctgcttcctaacttattgcctgggcagtgcccaccatgcacccctgatgttcgccgtctggcgagcccttagccttgctgtagagacttccgtcacccttggtagagtttatttttttgatggctaagatactgctgatgctgaaataaactagggttttggcctgccaaaaacaaacacaacaacacaccacaaaaccaacacaacaacacaaccaaaaaaggacacacacaaacggggggggcgatggctcaagaaacttcccgcggggggggccacatgagtgtgcggcctggccccgatttttgtgggcgacaggcggcgcccccagaacgggagcgcatatctaaaagcccgggcgcagggtcgcggttataaacggctcgcggaggcgacaacaccgcgcatcgcgggaatctgggagagaacctacactcgggggtgaccattggggacacacccc

SEQ ID NO: 311151 - DNA, 1610 bp, Homo sapiens
cggcagctgttcgcctgcgtcgctccgggagctgccgacggacggagcgcccccgcccccgcccggccgcccgcccgccgccgccatgcccttctccaacagccacaacgcactgaagctgcgcttcccggccgaggacgagttccccgacctgagcgcccacaacaaccacatggccaaggtgctgacccccgagctgtacgcggagctgcgcgccaagagcacgccgagcggcttcacgctggacgacgtcatccagacaggcgtggacaacccgggccacccgtacatcatgaccgtgggctgcgtggcgggcgacgaggagtcctacgaagtgttcaaggatctcttcgaccccatcatcgaggaccggcacggcggctacaagcccagcgatgagcacaagaccgacctcaaccccgacaacctgcagggcggcgacgacctggaccccaactacgtgctgagctcgcgggtgcgcacgggccgcagcatccgtggcttctgcctccccccgcactgcagccgcggggagcgccgcgccatcgagaagctcgcggtggaagccctgtccagcctggacggcgacctggcgggccgatactacgcgctcaagagcatgacggaggcggagcagcagcagctcatcgacgaccacttcctcttcgacaagcccgtgtcgcccctgctgctggcctcgggcatggcccgcgactggcccgacgcccgcggtatctggcacaatgacaataagaccttcctggtgtgggtcaacgaggaggaccacctgcgggtcatctccatgcagaaggggggcaacatgaaggaggtgttcacccgcttctgcaccggcctcacccagattgaaactctcttcaagtctaaggactatgagttcatgtggaaccctcacctgggctacatcctcacctgcccatccaacctgggcaccgggctgcgggcaggtgtgcatatcaagctgcccaacctgggcaagcatgagaagttctcggaggtgcttaagcggctgcgacttcagaagcgaggcacaggcggtgtggacacggctgcggtgggcggggtcttcgacgtctccaacgctgaccgcctgggcttctcagaggtggagctggtgcagatggtggtggacggagtgaagctgctcatcgagatggaacagcggctggagcagggccaggccatcgacgacctcatgcctgcccagaaatgaagcccggcccacacccgacaccagccctgctgcttcctaacttattgcctgggcagtgcccaccatgcacccctgatgttcgccgtctggcgagcccttagccttgctgtagagacttccgtcacccttggtagagtttatttttttgatggctaagatactgctgatgctgaaataaactagggttttggcctgccaagaaaagagaagaggacaaacacccggagagaaaccacaaggtggagaggcggaaaaccggcggtcacgagcaacggggcccatgggcaaagcgggtacagtaccccagctcgtcgacacacgcgcagaacccgcggaccgaaaagtacacgaactaacccgaaagccggtaccggcctag

SEQ ID NO: 311152 - DNA, 1472 bp, Homo sapiens
  misc_feature (59)..(59): n is a, c, g, or t
  misc_feature (67)..(67): n is a, c, g, or t
  misc_feature (88)..(88): n is a, c, g, or t
aaaaaccaaaatcgcggctatgtgtatccggaggtcctcgtgcgcgcgttttttaaaanttgctgcnacgagggggagctgcgacggnacggagcgcccccgcccccgccggcgccgcccgccgccgccatgcccttctccaacagccacaacgcactgaagctgcgcttcccggccgaggacgagttccccgacctgagcgcccacaacaaccacatggccaaggtgctgacccccgagctgtacgcggagctgcgcgccaagagcacgccgagcggcttcacgctggacgacgtcatccagacaggcgtggacaacccgggccacccgtacatcatgaccgtgggctgcgtggcgggcgacgaggagtcctacgaagtgttcaaggatctcttcgaccccatcatcgaggaccggcacggcggctacaagcccagcgatgagcacaagaccgacctcaaccccgacaacctgcagggcggcgacgacctggaccccaactacgtgctgagctcgcgggtgcgcacgggccgcagcatccgtggcttctgcctccccccgcactgcagccgcggggagcgccgcgccatcgagaagctcgcggtggaagccctgtccagcctggacggcgacctggcgggccgatactacgcgctcaagagcatgacggaggcggagcagcagcagctcatcgacgaccacttcctcttcgacaagcccgtgtcgcccctgctgctggcctcgggcatggcccgcgactggcccgacgcccgcggtatctggcacaatgacaataagaccttcctggtgtgggtcaacgaggaggaccacctgcgggtcatctccatgcagaaggggggcaacatgaaggaggtgttcacccgcttctgcaccggcctcacccagattgaaactctcttcaagtctaaggactatgagttcatgtggaaccctcacctgggctacatcctcacctgcccatccaacctgggcaccgggctgcgggcaggtgtgcatatcaagctgcccaacctgggcaagcatgagaagttctcggaggtgcttaagcggctgcgacttcagaagcgaggcacaggcggtgtggacacggctgcggtgggcggggtcttcgacgtctccaacgctgaccgcctgggcttctcagaggtggagctggtgcagatggtggtggacggagtgaagctgctcatcgagatggaacagcggctggagcagggccaggccatcgacgacctcatgcctgcccagaaatgaagcccggcccacacccgacaccagccctgctgcttcctaacttattgcctgggcagtgcccaccatgcacccctgatgttcgccgtctggcgagcccttagccttgctgtagagacttccgtcacccttggtagagtttatttttttgatggctaagatactgctgatgctgaaataaactagggttttggcctgcc

SEQ ID NO: 311153 - DNA, 1390 bp, Homo sapiens
cggcagctgttcgcctgcgtcgctccgggagctgccgacggacggagcgcccccgcccccgcccggccgcccgcccgccgccgccatgcccttctccaacagccacaacgcactgaagctgcgcttcccggccgaggacgagttccccgacctgagcgcccacaacaaccacatggccaaggtgctgacccccgagctgtacgcggagctgcgcgccaagagcacgccgagcggcttcacgctggacgacgtcatccagacaggcgtggacaacccgggccacccgtacatcatgaccgtgggctgcgtggcgggcgacgaggagtcctacgaagtgttcaaggatctcttcgaccccatcatcgaggaccggcacggcggctacaagcccagcgatgagcacaagaccgacctcaaccccgacaacctgcagggcggcgacgacctggaccccaactacgtgctgagctcgcgggtgcgcacgggccgcagcatccgtggcttctgcctccccccgcactgcagccgcggggagcgccgcgccatcgagaagctcgcggtggaagccctgtccagcctggacggcgacctggcgggccgatactacgcgctcaagagcatgacggaggcggagcagcagcagctcatcgacgaccacttcctcttcgacaagcccgtgtcgcccctgctgctggcctcgggcatggcccgcgactggcccgacgcccgcggtatctggcacaatgacaataagaccttcctggtgtgggtcaacgaggaggaccacctgcgggtcatctccatgcagaaggggggcaacatgaaggaggtgttcacccgcttctgcaccggcctcacccagattgaaactctcttcaagtctaaggactatgagttcatgtggaaccctcacctgggctacatcctcacctgcccatccaacctgggcaccgggctgcgggcaggtgtgcatatcaagctgcccaacctgggcaagcatgagaagttctcggaggtgcttaagcggctgcgacttcagaagcgaggcacaggcggtgtggacacggctgcggtgggcggggtcttcgacgtctccaacgctgaccgcctgggcttctcagaggtggagctggtgcagatggtggtggacggagtgaagctgctcatcgagatggaacagcggctggagcagggccaggccatcgacgacacaccagccctgctgcttcctaacttattgcctgggcagtgcccaccatgcacccctgatgttcgccgtctggcgagcccttagccttgctgtagagacttccgtcacccttggtagagtttatttttttgatggctaagatactgctgatgctgaaataaactagggttttggcctgcc

SEQ ID NO: 311154 - DNA, 2098 bp, Homo sapiens
cggcagctgttcgcctgcgtcgctccgggagctgccgacggacggagcgcccccgcccccgcccggccgcccgcccgccgccgccatgcccttctccaacagccacaacgcactgaagctgcgcttcccggccgaggacgagttccccgacctgagcgcccacaacaaccacatggccaaggtgctgacccccgagctgtacgcggagctgcgcgccaagagcacgccgagcggcttcacgctggacgacgtcatccagacaggcgtggacaacccgggccacccgtacatcatgaccgtgggctgcgtggcgggcgacgaggagtcctacgaagtgttcaaggatctcttcgaccccatcatcgaggaccggcacggcggctacaagcccagcgatgagcacaagaccgacctcaaccccgacaacctgcagggcggcgacgacctggaccccaactacgtgctgagctcgcgggtgcgcacgggccgcagcatccgtggcttctgcctccccccgcactgcagccgcggggagcgccgcgccatcgagaagctcgcggtggaagccctgtccagcctggacggcgacctggcgggccgatactacgcgctcaagagcatgacggaggcggagcagcagcagctcatcgacgaccacttcctcttcgacaagcccgtgtcgcccctgctgctggcctcgggcatggcccgcgactggcccgacgcccgcggtatctggtgcgtgtccctctgcgccctctcgcggcgtcctccctccccgctacctccgctttccctctcgcccccctcgcgggggtggggcccctcgcggcgaggaggaggaggaggaggagggaggggccggccgcgctccgggtctgggttccgtgccgcgcctcctcctgcgccggtgaccttggccgagcaggtgcgttaagggactgggccccggcccgtgggggctcaggactcagcaacacctccccaccccgagacgtgaggtgggggcggggctctctggcgcctctccccgacggccctgggagctggagctctttgttttcttttctcactcctccgccgctgggattctaccaggggctggtgacgccaaagcttctccaggggcagggctcctacccccactgtggggggcgggtcgggctgtcctggcggtccctggccccgccccacctcaggccacagcgcatgatggcagctggggttctcctgctgtgaggcgtcccggttcccccgcctgccccgtgttggcgggtggagtcttggcagcagcctccactcctgggcatggcagggagcagcacctcagggacttgggaagttcctttggtctgggggcggcctggggcttttttctgggtatgccctgagaccagccctcccgcaggcacaatgacaataagaccttcctggtgtgggtcaacgaggaggaccacctgcgggtcatctccatgcagaaggggggcaacatgaaggaggtgttcacccgcttctgcaccggcctcacccagattgaaactctcttcaagtctaaggactatgagttcatgtggaaccctcacctgggctacatcctcacctgcccatccaacctgggcaccgggctgcgggcaggtgtgcatatcaagctgcccaacctgggcaagcatgagaagttctcggaggtgcttaagcggctgcgacttcagaagcgaggcacaggcggtgtggacacggctgcggtgggcggggtcttcgacgtctccaacgctgaccgcctgggcttctcagaggtggagctggtgcagatggtggtggacggagtgaagctgctcatcgagatggaacagcggctggagcagggccaggccatcgacgacctcatgcctgcccagaaatgaagcccggcccacacccgacaccagccctgctgcttcctaacttattgcctgggcagtgcccaccatgcacccctgatgttcgccgtctggcgagcccttagccttgctgtagagacttccgtcacccttggtagagtttatttttttgatggctaagatactgctgatgctgaaataaactagggttttggcctgcc

SEQ ID NO: 311155 - DNA, 1507 bp, Homo sapiens
cggcagctgttcgcctgcgtcgctccgggagctgccgacggacggagcgcccccgcccccgcccggccgcccgcccgccgccgccatgcccttctccaacagccacaacgcactgaagctgcgcttcccggccgaggacgagttccccgacctgagcgcccacaacaaccacatggccaaggtgctgacccccgagctgtacgcggagctgcgcgccaagagcacgccgagcggcttcacgctggacgacgtcatccagacaggcgtggacaacccgggccacccgtacatcatgaccgtgggctgcgtggcgggcgacgaggagtcctacgaagtgttcaaggatctcttcgaccccatcatcgaggaccggcacggcggctacaagcccagcgatgagcacaagaccgacctcaaccccgacaacctgcagggcggcgacgacctggaccccaactacgtgctgagctcgcgggtgcgcacgggccgcagcatccgtggcttctgcctccccccgcactgcagccgcggggagcgccgcgccatcgagaagctcgcggtggaagccctgtccagcctggacggcgacctggcgggccgatactacgcgctcaagagcatgacggaggcggagcagcagcagctcatcgacgaccacttcctcttcgacaagcccgtgtcgcccctgctgctggcctcgggcatggcccgcgactggcccgacgcccgcggtatctggcacaatgacaataagaccttcctggtgtgggtcaacgaggaggaccacctgcgggtcatctccatgcagaaggggggcaacatgaaggaggtgttcacccgcttctgcaccggcctcacccagattgaaactctcttcaagtctaaggactatgagttcatgtggaaccctcacctgggctacatcctcacctgcccatccaacctgggcaccgggctgcgggcaggtgtgcatatcaagctgcccaacctgggcaagcatgagaagttctcggaggtgcttaagcggctgcgacttcagaagcgaggcacaggtgagcagggcaggtgctgcggcttcccgtggcctttgggcagccctgtttcctccgccctgacttgctgtctccccaggcggtgtggacacggctgcggtgggcggggtcttcgacgtctccaacgctgaccgcctgggcttctcagaggtggagctggtgcagatggtggtggacggagtgaagctgctcatcgagatggaacagcggctggagcagggccaggccatcgacgacctcatgcctgcccagaaatgaagcccggcccacacccgacaccagccctgctgcttcctaacttattgcctgggcagtgcccaccatgcacccctgatgttcgccgtctggcgagcccttagccttgctgtagagacttccgtcacccttggtagagtttatttttttgatggctaagatactgctgatgctgaaataaactagggttttggcctgcc

SEQ ID NO: 311156 - DNA, 1367 bp, Homo sapiens
cggcagctgttcgcctgcgtcgctccgggagctgccgacggacggagcgcccccgcccccgcccggccgcccgcccgccgccgccatgcccttctccaacagccacaacgcactgaagctgcgcttcccggccgaggacgagttccccgacctgagcgcccacaacaaccacatggccaaggtgctgacccccgagctgtacgcggagctgcgcgccaagagcacgccgagcggcttcacgctggacgacgtcatccagacaggcgtggacaacccgggccacccgtacatcatgaccgtgggctgcgtggcgggcgacgaggagtcctacgaagtgttcaaggatctcttcgaccccatcatcgaggaccggcacggcggctacaagcccagcgatgagcacaagaccgacctcaaccccgacaacctgcagggcggcgacgacctggaccccaactacgtgctgagctcgcgggtgcgcacgggccgcagcatccgtggcttctgcctccccccgcactgcagccgcggggagcgccgcgccatcgagaagctcgcggtggaagccctgtccagcctggacggcgacctggcgggccgatactacgcgctcaagagcatgacggaggcggagcagcagcagctcatcgacgaccacttcctcttcgacaagcccgtgtcgcccctgctgctggcctcgggcatggcccgcgactggcccgacgcccgcggtatctggcacaatgacaataagaccttcctggtgtgggtcaacgaggaggaccacctgcgggtcatctccatgcagaaggggggcaacatgaaggaggtgttcacccgcttctgcaccggcctcacccagattgaaactctcttcaagtctaaggactatgagttcatgtggaaccctcacctgggctacatcctcacctgcccatccaacctgggcaccgggctgcgggcaggtgtgcatatcaagctgcccaacctgggcaagcatgagaagttctcggaggtgcttaagcggctgcgacttcagaagcgaggcacagcttctcagaggtggagctggtgcagatggtggtggacggagtgaagctgctcatcgagatggaacagcggctggagcagggccaggccatcgacgacctcatgcctgcccagaaatgaagcccggcccacacccgacaccagccctgctgcttcctaacttattgcctgggcagtgcccaccatgcacccctgatgttcgccgtctggcgagcccttagccttgctgtagagacttccgtcacccttggtagagtttatttttttgatggctaagatactgctgatgctgaaataaactagggttttggcctgcc

SEQ ID NO: 311157 - DNA, 1239 bp, Homo sapiens
ccctccccccgcgcagccgcagggtcctcagcagcgcgctcgggcccggcagtgacgtcactgtccccgtcccgcgccccctcccccaggccacccgtacatcatgaccgtgggctgcgtggcgggcgacgaggagtcctacgaagtgttcaaggatctcttcgaccccatcatcgaggaccggcacggcggctacaagcccagcgatgagcacaagaccgacctcaaccccgacaacctgcagggcggcgacgacctggaccccaactacgtgctgagctcgcgggtgcgcacgggccgcagcatccgtggcttctgcctccccccgcactgcagccgcggggagcgccgcgccatcgagaagctcgcggtggaagccctgtccagcctggacggcgacctggcgggccgatactacgcgctcaagagcatgacggaggcggagcagcagcagctcatcgacgaccacttcctcttcgacaagcccgtgtcgcccctgctgctggcctcgggcatggcccgcgactggcccgacgcccgcggtatctggcacaatgacaataagaccttcctggtgtgggtcaacgaggaggaccacctgcgggtcatctccatgcagaaggggggcaacatgaaggaggtgttcacccgcttctgcaccggcctcacccagattgaaactctcttcaagtctaaggactatgagttcatgtggaaccctcacctgggctacatcctcacctgcccatccaacctgggcaccgggctgcgggcaggtgtgcatatcaagctgcccaacctgggcaagcatgagaagttctcggaggtgcttaagcggctgcgacttcagaagcgaggcacaggcggtgtggacacggctgcggtgggcggggtcttcgacgtctccaacgctgaccgcctgggcttctcagaggtggagctggtgcagatggtggtggacggagtgaagctgctcatcgagatggaacagcggctggagcagggccaggccatcgacgacctcatgcctgcccagaaatgaagcccggcccacacccgacaccagccctgctgcttcctaacttattgcctgggcagtgcccaccatgcacccctgatgttcgccgtctggcgagcccttagccttgctgtagagacttccgtcacccttggtagagtttatttttttgatggctaagatactgctgatgctgaaataaactagggttttggcctgcc

SEQ ID NO: 311158 - DNA, 1500 bp, Homo sapiens
cggcagctgttcgcctgcgtcgctccgggagctgccgacggacggagcgcccccgcccccgcccggccgcccgcccgccgccgccatgcccttctccaacagccacaacgcactgaagctgcgcttcccggccgaggacgagttccccgacctgagcgcccacaacaaccacatggccaaggtgctgacccccgagctgtacgcggagctgcgcgccaagagcacgccgagcggcttcacgctggacgacgtcatccagacaggcgtggacaacccgggccacccgtacatcatgaccgtgggctgcgtggcgggcgacgaggagtcctacgaagtgttcaaggatctcttcgaccccatcatcgaggaccggcacggcggctacaagcccagcgatgagcacaagaccgacctcaaccccgacaacctgcaggtgcggggctgcgggcgggccgggcgggcggggccggggtcttcgggcgctcactcccgtctcgcctcccagggcggcgacgacctggaccccaactacgtgctgagctcgcgggtgcgcacgggccgcagcatccgtggcttctgcctccccccgcactgcagccgcggggagcgccgcgccatcgagaagctcgcggtggaagccctgtccagcctggacggcgacctggcgggccgatactacgcgctcaagagcatgacggaggcggagcagcagcagctcatcgacgaccacttcctcttcgacaagcccgtgtcgcccctgctgctggcctcgggcatggcccgcgactggcccgacgcccgcggtatctggcacaatgacaataagaccttcctggtgtgggtcaacgaggaggaccacctgcgggtcatctccatgcagaaggggggcaacatgaaggaggtgttcacccgcttctgcaccggcctcacccagattgaaactctcttcaagtctaaggactatgagttcatgtggaaccctcacctgggctacatcctcacctgcccatccaacctgggcaccgggctgcgggcaggtgtgcatatcaagctgcccaacctgggcaagcatgagaagttctcggaggtgcttaagcggctgcgacttcagaagcgaggcacaggcggtgtggacacggctgcggtgggcggggtcttcgacgtctccaacgctgaccgcctgggcttctcagaggtggagctggtgcagatggtggtggacggagtgaagctgctcatcgagatggaacagcggctggagcagggccaggccatcgacgacctcatgcctgcccagaaatgaagcccggcccacacccgacaccagccctgctgcttcctaacttattgcctgggcagtgcccaccatgcacccctgatgttcgccgtctggcgagcccttagccttgctgtagagacttccgtcacccttggtagagtttatttttttgatggctaagatactgctgatgctgaaataaactagggttttggcctgcc

SEQ ID NO: 311159 - DNA, 1304 bp, Homo sapiens
cggcagctgttcgcctgcgtcgctccgggagctgccgacggacggagcgcccccgcccccgcccggccgcccgcccgccgccgccatgcccttctccaacagccacaacgcactgaagctgcgcttcccggccgaggacgagttccccgacctgagcgcccacaacaaccacatggccaaggtgctgacccccgagctgtacgcggagctgcgcgccaagagcacgccgagcggcttcacgctggacgacgtcatccagacaggcgtggacaacccgggccacccgtacatcatgaccgtgggctgcgtggcgggcgacgaggagtcctacgaagtgttcaaggatctcttcgaccccatcatcgaggaccggcacggcggctacaagcccagcgatgagcacaagaccgacctcaaccccgacaacctgcagggcggcgacgacctggaccccaactacgtgctgagctcgcgggtgcgcacgggccgcagcatccgtggcttctgcctccccccgcactgcagccgcggggagcgccgcgccatcgagaagctcgcggtggaagccctgtccagcctggacggcgacctggcgggccgatactacgcgctcaagagcatgacggaggcggagcagcagcagctcatcgacgaccacttcctcttcgacaagcccgtgtcgcccctgctgctggcctcgggcatggcccgcgactggcccgacgcccgcggtatctgattgaaactctcttcaagtctaaggactatgagttcatgtggaaccctcacctgggctacatcctcacctgcccatccaacctgggcaccgggctgcgggcaggtgtgcatatcaagctgcccaacctgggcaagcatgagaagttctcggaggtgcttaagcggctgcgacttcagaagcgaggcacaggcggtgtggacacggctgcggtgggcggggtcttcgacgtctccaacgctgaccgcctgggcttctcagaggtggagctggtgcagatggtggtggacggagtgaagctgctcatcgagatggaacagcggctggagcagggccaggccatcgacgacctcatgcctgcccagaaatgaagcccggcccacacccgacaccagccctgctgcttcctaacttattgcctgggcagtgcccaccatgcacccctgatgttcgccgtctggcgagcccttagccttgctgtagagacttccgtcacccttggtagagtttatttttttgatggctaagatactgctgatgctgaaataaactagggttttggcctgcc

SEQ ID NO: 311160 - DNA, 1883 bp, Homo sapiens
cggcagctgttcgcctgcgtcgctccgggagctgccgacggacggagcgcccccgcccccgcccggccgcccgcccgccgccgccatgcccttctccaacagccacaacgcactgaagctgcgcttcccggccgaggacgagttccccgacctgagcgcccacaacaaccacatggccaaggtgctgacccccgagctgtacgcggagctgcgcgccaagagcacgccgagcggcttcacgctggacgacgtcatccagacaggcgtggacaacccgggccacccgtacatcatgaccgtgggctgcgtggcgggcgacgaggagtcctacgaagtgttcaaggatctcttcgaccccatcatcgaggaccggcacggcggctacaagcccagcgatgagcacaagaccgacctcaaccccgacaacctgcaggtgcggggctgcgggcgggccgggcgggcggggccggggtcttcgggcgctcactcccgtctcgcctcccagggcggcgacgacctggaccccaactacgtgctgagctcgcgggtgcgcacgggccgcagcatccgtggcttctgcctccccccgcactgcagccgcggggagcgccgcgccatcgagaagctcgcggtggaaggtaggggccgggcgggccgaggggcggcggcggccgcgtccccctcccggcgcggtccccgcccgcttttgtttacgtcgcccgggagcggcagccgccgtcgcgctcttatctgcgcgcgcccgggttcagtttcccggagggaccgagggacggaggcccagccccgcgcccacagcggcctggggcccagggagggcgggtcctggcgcggggtcaccgcctgggaccgtcgcccgggccgtgaggactggacgcccgcagatccgggcgggtggggccctctgacgtcccccgaggtggggcacgggggcgggcgggtccgcgctgcgggctggaggggcgggcgcgggagccgagcgtcctgagcgcacccctcgcagccctgtccagcctggacggcgacctggcgggccgatactacgcgctcaagagcatgacggaggcggagcagcagcagctcatcgacgaccacttcctcttcgacaagcccgtgtcgcccctgctgctggcctcgggcatggcccgcgactggcccgacgcccgcggtatctggcacaatgacaataagaccttcctggtgtgggtcaacgaggaggaccacctgcgggtcatctccatgcagaaggggggcaacatgaaggaggtgttcacccgcttctgcaccggcctcacccagattgaaactctcttcaagtctaaggactatgagttcatgtggaaccctcacctgggctacatcctcacctgcccatccaacctgggcaccgggctgcgggcaggtgtgcatatcaagctgcccaacctgggcaagcatgagaagttctcggaggtgcttaagcggctgcgacttcagaagcgaggcacaggcggtgtggacacggctgcggtgggcggggtcttcgacgtctccaacgctgaccgcctgggcttctcagaggtggagctggtgcagatggtggtggacggagtgaagctgctcatcgagatggaacagcggctggagcagggccaggccatcgacgacctcatgcctgcccagaaatgaagcccggcccacacccgacaccagccctgctgcttcctaacttattgcctgggcagtgcccaccatgcacccctgatgttcgccgtctggcgagcccttagccttgctgtagagacttccgtcacccttggtagagtttatttttttgatggctaagatactgctgatgctgaaataaactagggttttggcctgcc

SEQ ID NO: 311161 - DNA, 2170 bp, Homo sapiens
cggcagctgttcgcctgcgtcgctccgggagctgccgacggacggagcgcccccgcccccgcccggccgcccgcccgccgccgccatgcccttctccaacagccacaacgcactgaagctgcgcttcccggccgaggacgagttccccgacctgagcgcccacaacaaccacatggccaaggtgctgacccccgagctgtacgcggagctgcgcgccaagagcacgccgagcggcttcacgctggacgacgtcatccagacaggcgtggacaacccgggccacccgtacatcatgaccgtgggctgcgtggcgggcgacgaggagtcctacgaagtgttcaaggatctcttcgaccccatcatcgaggaccggcacggcggctacaagcccagcgatgagcacaagaccgacctcaaccccgacaacctgcaggtgcggggctgcgggcgggccgggcgggcggggccggggtcttcgggcgctcactcccgtctcgcctcccagggcggcgacgacctggaccccaactacgtgctgagctcgcgggtgcgcacgggccgcagcatccgtggcttctgcctccccccgcactgcagccgcggggagcgccgcgccatcgagaagctcgcggtggaagccctgtccagcctggacggcgacctggcgggccgatactacgcgctcaagagcatgacggaggcggagcagcagcagctcatcgacgaccacttcctcttcgacaagcccgtgtcgcccctgctgctggcctcgggcatggcccgcgactggcccgacgcccgcggtatctggtgcgtgtccctctgcgccctctcgcggcgtcctccctccccgctacctccgctttccctctcgcccccctcgcgggggtggggcccctcgcggcgaggaggaggaggaggaggagggaggggccggccgcgctccgggtctgggttccgtgccgcgcctcctcctgcgccggtgaccttggccgagcaggtgcgttaagggactgggccccggcccgtgggggctcaggactcagcaacacctccccaccccgagacgtgaggtgggggcggggctctctggcgcctctccccgacggccctgggagctggagctctttgttttcttttctcactcctccgccgctgggattctaccaggggctggtgacgccaaagcttctccaggggcagggctcctacccccactgtggggggcgggtcgggctgtcctggcggtccctggccccgccccacctcaggccacagcgcatgatggcagctggggttctcctgctgtgaggcgtcccggttcccccgcctgccccgtgttggcgggtggagtcttggcagcagcctccactcctgggcatggcagggagcagcacctcagggacttgggaagttcctttggtctgggggcggcctggggcttttttctgggtatgccctgagaccagccctcccgcaggcacaatgacaataagaccttcctggtgtgggtcaacgaggaggaccacctgcgggtcatctccatgcagaaggggggcaacatgaaggaggtgttcacccgcttctgcaccggcctcacccagattgaaactctcttcaagtctaaggactatgagttcatgtggaaccctcacctgggctacatcctcacctgcccatccaacctgggcaccgggctgcgggcaggtgtgcatatcaagctgcccaacctgggcaagcatgagaagttctcggaggtgcttaagcggctgcgacttcagaagcgaggcacaggcggtgtggacacggctgcggtgggcggggtcttcgacgtctccaacgctgaccgcctgggcttctcagaggtggagctggtgcagatggtggtggacggagtgaagctgctcatcgagatggaacagcggctggagcagggccaggccatcgacgacctcatgcctgcccagaaatgaagcccggcccacacccgacaccagccctgctgcttcctaacttattgcctgggcagtgcccaccatgcacccctgatgttcgccgtctggcgagcccttagccttgctgtagagacttccgtcacccttggtagagtttatttttttgatggctaagatactgctgatgctgaaataaactagggttttggcctgcc

SEQ ID NO: 311162 - DNA, 618 bp, Homo sapiens
atttaaacatatataataaaaatttattatttctctgtttaacccaccttccattgaaactctcttcaagtctaaggactatgagttcatgtggaaccctcacctgggctacatcctcacctgcccatccaacctgggcaccgggctgcgggcaggtgtgcatatcaagctgcccaacctgggcaagcatgagaagttctcggaggtgcttaagcggctgcgacttcagaagcgaggcacaggcggtgtggacacggctgcggtgggcggggtcttcgacgtctccaacgctgaccgcctgggcttctcagaggtggagctggtgcagatggtggtggacggagtgaagctgctcatcgagatggaacagcggctggagcagggccaggccatcgacgacctcatgcctgcccagaaatgaagcccggcccacacccgacaccagccctgctgcttcctaacttattgcctgggcagtgcccaccatgcacccctgatgttcgccgtctggcgagcccttagccttgctgtagagacttccgtcacccttggtagagtttatttttttgatggctaagatactgctgatgctgaaataaactagggttttggcctgcc

SEQ ID NO: 311163 - DNA, 621 bp, Homo sapiens
cccaccaaccactaccacggcaagtacccgtcggcggcggagggagagagcagctattgaaactctcttcaagtctaaggactatgagttcatgtggaaccctcacctgggctacatcctcacctgcccatccaacctgggcaccgggctgcgggcaggtgtgcatatcaagctgcccaacctgggcaagcatgagaagttctcggaggtgcttaagcggctgcgacttcagaagcgaggcacaggcggtgtggacacggctgcggtgggcggggtcttcgacgtctccaacgctgaccgcctgggcttctcagaggtggagctggtgcagatggtggtggacggagtgaagctgctcatcgagatggaacagcggctggagcagggccaggccatcgacgacctcatgcctgcccagaaatgaagcccggcccacacccgacaccagccctgctgcttcctaacttattgcctgggcagtgcccaccatgcacccctgatgttcgccgtctggcgagcccttagccttgctgtagagacttccgtcacccttggtagagtttatttttttgatggctaagatactgctgatgctgaaataaactagggttttggcctgcc

SEQ ID NO: 311164 - DNA, 544 bp, Homo sapiens
gggagcagcacctcagggacttgggaagttcctttggtctgggggcggcctggggcttttttctgggtatgccctgagaccagccctcccgcaggcacaatgacaataagaccttcctggtgtgggtcaacgaggaggaccacctgcgggtcatctccatgcagaaggggggcaacatgaaggaggtgttcacccgcttctgcaccggcctcacccaggtgccagggacggggcaggcccagaccccagggccccagcagggatgtgggtgccccagcatcagtccccccgggggatttccggcactggggagtctcagggcctgtaggggtttcaggcaggccttctccctcataccctcttctccgtctgcatgattgaaactctcttcaagtctaaggactatgagttcatgtggaaccctcacctgggctacatcctcacctgcccatccaacctgggcaccgggctgcgggcaggtgtgcatatcaagctgcccaacctgggcaagcatgagaagttctcggaggtgcttaagcggctg

SEQ ID NO: 311165 - DNA, 1762 bp, Homo sapiens
cggcagctgttcgcctgcgtcgctccgggagctgccgacggacggagcgcccccgcccccgcccggccgcccgcccgccgccgccatgcccttctccaacagccacaacgcactgaagctgcgcttcccggccgaggacgagttccccgacctgagcgcccacaacaaccacatggccaaggtgctgacccccgagctgtacgcggagctgcgcgccaagagcacgccgagcggcttcacgctggacgacgtcatccagacaggcgtggacaacccgggccacccgtacatcatgaccgtgggctgcgtggcgggcgacgaggagtcctacgaagtgttcaaggatctcttcgaccccatcatcgaggaccggcacggcggctacaagcccagcgatgagcacaagaccgacctcaaccccgacaacctgcagggcggcgacgacctggaccccaactacgtgctgagctcgcgggtgcgcacgggccgcagcatccgtggcttctgcctccccccgcactgcagccgcggggagcgccgcgccatcgagaagctcgcggtggaagccctgtccagcctggacggcgacctggcgggccgatactacgcgctcaagagcatgacggaggcggagcagcagcagctcatcgacgaccacttcctcttcgacaagcccgtgtcgcccctgctgctggcctcgggcatggcccgcgactggcccgacgcccgcggtatctggcacaatgacaataagaccttcctggtgtgggtcaacgaggaggaccacctgcgggtcatctccatgcagaaggggggcaacatgaaggaggtgttcacccgcttctgcaccggcctcacccagattgaaactctcttcaagtctaaggactatgagttcatgtggaaccctcacctgggctacatcctcacctgcccatccaacctgggcaccgggctgcgggcaggtgtgcatatcaagctgcccaacctgggcaagcatgagaagttctcggaggtgcttaagcggctgcgacttcagaagcgaggcacaggcggtgtggacacggctgcggtgggcggggtcttcgacgtctccaacgctgaccgcctgggcttctcagaggtggagctggtgcagatggtggtggacggagtgaagctgctcatcgagatggaacagcggctggagcagggccaggccatcgacgacctcatgcctgcccagaaatgaagcccggcccacacccgacaccagccctgctgcttcctaacttattgcctgggcagtgcccaccatgcacccctgatgttcgccgtctggcgagcccttagccttgctgtagagacttccgtcacccttggtagagtttatttttttgatggctaagatactgctgatgctgaaataaactagggttttggcctgccaaaaaaaaaaaaaaaaaaaaaaaggggggggccaaatttcccccgggggccctttcgcccttttttgacagggcccctagggggcatataagggaggaggcgggcggggttaacagctccgacgggaaagcctctgggatcttggaagacccctctcgggctgcacttgggaccccccagattaggccgtcaataatcggttaaggtagaccggcttcctggctggattgctgtttgataccatcagagacaattgtagcgcaaacaggagttcgacgagcgtacaccaaactcctcatgcactccatgccgcctcactcgcgaagaaacaagg

SEQ ID NO: 311166 - DNA, 1891 bp, Homo sapiens
cggcagctgttcgcctgcgtcgctccgggagctgccgacggacggagcgcccccgcccccgcccggccgcccgcccgccgccgccatgcccttctccaacagccacaacgcactgaagctgcgcttcccggccgaggacgagttccccgacctgagcgcccacaacaaccacatggccaaggtgctgacccccgagctgtacgcggagctgcgcgccaagagcacgccgagcggcttcacgctggacgacgtcatccagacaggcgtggacaacccgggccacccgtacatcatgaccgtgggctgcgtggcgggcgacgaggagtcctacgaagtgttcaaggatctcttcgaccccatcatcgaggaccggcacggcggctacaagcccagcgatgagcacaagaccgacctcaaccccgacaacctgcagggcggcgacgacctggaccccaactacgtgctgagctcgcgggtgcgcacgggccgcagcatccgtggcttctgcctccccccgcactgcagccgcggggagcgccgcgccatcgagaagctcgcggtggaagccctgtccagcctggacggcgacctggcgggccgatactacgcgctcaagagcatgacggaggcggagcagcagcagctcatcgacgaccacttcctcttcgacaagcccgtgtcgcccctgctgctggcctcgggcatggcccgcgactggcccgacgcccgcggtatctggcacaatgacaataagaccttcctggtgtgggtcaacgaggaggaccacctgcgggtcatctccatgcagaaggggggcaacatgaaggaggtgttcacccgcttctgcaccggcctcacccagattgaaactctcttcaagtctaaggactatgagttcatgtggaaccctcacctgggctacatcctcacctgcccatccaacctgggcaccgggctgcgggcaggtgtgcatatcaagctgcccaacctgggcaagcatgagaagttctcggaggtgcttaagcggctgcgacttcagaagcgaggcacaggcggtgtggacacggctgcggtgggcggggtcttcgacgtctccaacgctgaccgcctgggcttctcagaggtggagctggtgcagatggtggtggacggagtgaagctgctcatcgagatggaacagcggctggagcagggccaggccatcgacgacctcatgcctgcccagaaatgaagcccggcccacacccgacaccagccctgctgcttcctaacttattgcctgggcagtgcccaccatgcacccctgatgttcgccgtctggcgagcccttagccttgctgtagagacttccgtcacccttggtagagtttatttttttgatggctaagatactgctgatgctgaaataaactagggttttggcctgccaaaaaaaaaaaaaaaaaaaaaaaaaaaaaaaaaaaaaaaaaaaaaaaaaaaaaaaaaaggggggggcccccaaaaaaatcccccccggggggccccacacaaaacaacgcgcgcacccccagatttgcgggaaaaagggggcgccccaaaaggggcgcccaatatacaaaaccaacacgcgggcgcgcgcgacggccacacaaggggggcgagggggaaaaagagcggccccccggggcaccttgggcagagaggagcccccatacaggaggggggcgcacacggggggccaacacacccccaacggcgaactatacacgccccaacgcggaaacacaacaacaccacacgcgggacaacgcggcccacacaacacccgcacactacccccccgcgcaccaaccacaccggaacgaggaaaacaaccccccacacaattccaccggccccacacaacaacccc

SEQ ID NO: 311167 - DNA, 1950 bp, Homo sapiens
cggcagctgttcgcctgcgtcgctccgggagctgccgacggacggagcgcccccgcccccgcccggccgcccgcccgccgccgccatgcccttctccaacagccacaacgcactgaagctgcgcttcccggccgaggacgagttccccgacctgagcgcccacaacaaccacatggccaaggtgctgacccccgagctgtacgcggagctgcgcgccaagagcacgccgagcggcttcacgctggacgacgtcatccagacaggcgtggacaacccgggccacccgtacatcatgaccgtgggctgcgtggcgggcgacgaggagtcctacgaagtgttcaaggatctcttcgaccccatcatcgaggaccggcacggcggctacaagcccagcgatgagcacaagaccgacctcaaccccgacaacctgcagggcggcgacgacctggaccccaactacgtgctgagctcgcgggtgcgcacgggccgcagcatccgtggcttctgcctccccccgcactgcagccgcggggagcgccgcgccatcgagaagctcgcggtggaagccctgtccagcctggacggcgacctggcgggccgatactacgcgctcaagagcatgacggaggcggagcagcagcagctcatcgacgaccacttcctcttcgacaagcccgtgtcgcccctgctgctggcctcgggcatggcccgcgactggcccgacgcccgcggtatctggcacaatgacaataagaccttcctggtgtgggtcaacgaggaggaccacctgcgggtcatctccatgcagaaggggggcaacatgaaggaggtgttcacccgcttctgcaccggcctcacccagattgaaactctcttcaagtctaaggactatgagttcatgtggaaccctcacctgggctacatcctcacctgcccatccaacctgggcaccgggctgcgggcaggtgtgcatatcaagctgcccaacctgggcaagcatgagaagttctcggaggtgcttaagcggctgcgacttcagaagcgaggcacaggcggtgtggacacggctgcggtgggcggggtcttcgacgtctccaacgctgaccgcctgggcttctcagaggtggagctggtgcagatggtggtggacggagtgaagctgctcatcgagatggaacagcggctggagcagggccaggccatcgacgacctcatgcctgcccagaaatgaagcccggcccacacccgacaccagccctgctgcttcctaacttattgcctgggcagtgcccaccatgcacccctgatgttcgccgtctggcgagcccttagccttgctgtagagacttccgtcacccttggtagagtttatttttttgatggctaagatactgctgatgctgaaataaactagggttttggcctgccaaaaaaaaaaaaaaaaaaaaaaaaaaaaaaaaaaaaaaaaaaaaaaaacaaaaaacaaaaacaccaacaacaacccaaaaccaaaaacacgacaacactccactaacaaaataacaacattgaagtactcatgcaacatcaaccaccacgtcacccactttttaccatcgcttctctgacactccccctctcaccctctcctttactttgtcacaccgctcccccgcccgcttctctccatctcactctccctcacgccctagcctccactccccccttccctcccctcactccatcaccctcacgcaaccatcaccaactctctcccagccctttcccctcactccctgcacaccccctccccacatcaccacatactacccctctccccacccacaatcaccacacacaacccacctaccactcctccaactactcccttacctcttccccatcttacccatcccactatccatccccttcccccccactctccacgccccctcaccctaccccccaccc

SEQ ID NO: 311168 - DNA, 1394 bp, Homo sapiens
cggcagctgttcgcctgcgtcgctccgggagctgccgacggacggagcgcccccgcccccgcccggccgcccgcccgccgccgccatgcccttctccaacagccacaacgcactgaagctgcgcttcccggccgaggacgagttccccgacctgagcgcccacaacaaccacatggccaaggtgctgacccccgagctgtacgcggagctgcgcgccaagagcacgccgagcggcttcacgctggacgacgtcatccagacaggcgtggacaacccgggccacccgtacatcatgaccgtgggctgcgtggcgggcgacgaggagtcctacgaagtgttcaaggatctcttcgaccccatcatcgaggaccggcacggcggctacaagcccagcgatgagcacaagaccgacctcaaccccgacaacctgcagggcggcgacgacctggaccccaactacgtgctgagctcgcgggtgcgcacgggccgcagcatccgtggcttctgcctccccccgcactgcagccgcggggagcgccgcgccatcgagaagctcgcggtggaagccctgtccagcctggacggcgacctggcgggccgatactacgcgctcaagagcatgacggaggcggagcagcagcagctcatcgacgaccacttcctcttcgacaagcccgtgtcgcccctgctgctggcctcgggcatggcccgcgactggcccgacgcccgcggtatctggcacaatgacaataagaccttcctggtgtgggtcaacgaggaggaccacctgcgggtcatctccatgcagaaggggggcaacatgaaggaggtgttcacccgcttctgcaccggcctcacccagattgaaactctcttcaagtctaaggactatgagttcatgtggaaccctcacctgggctacatcctcacctgcccatccaacctgggcaccgggctgcgggcaggtgtgcatatcaagctgcccaacctgggcaagcatgagaagttctcggaggtgcttaagcggctgcgacttcagaagcgaggcacaggcggtgtggacacggctgcggtgggcggggtcttcgacgtctccaacgctgaccgcctgggcttctcagaggtggagctggtgcagatggtggtggacggagtgaagctgctcatcgagatggaacagcggctggagcagggccaggccatcgacgacctcatgcctgcccagaaatgaagcccggcccacacccgaaccgaacagcctgtgttctaacttatgctgggaggcacatgcccctgatgtcgcgttgggagcttactgtgtagctcgcaccggtaagtattttggtaaatgggtctgatataggtgggcgcaaaaaaaaaaacccgttttgggg

SEQ ID NO: 311169 - DNA, 1294 bp, Homo sapiens
cggcagctgttcgcctgcgtcgctccgggagctgccgacggacggagcgcccccgcccccgcccggccgcccgcccgccgccgccatgcccttctccaacagccacaacgcactgaagctgcgcttcccggccgaggacgagttccccgacctgagcgcccacaacaaccacatggccaaggtgctgacccccgagctgtacgcggagctgcgcgccaagagcacgccgagcggcttcacgctggacgacgtcatccagacaggcgtggacaacccgggccacccgtacatcatgaccgtgggctgcgtggcgggcgacgaggagtcctacgaagtgttcaaggatctcttcgaccccatcatcgaggaccggcacggcggctacaagcccagcgatgagcacaagaccgacctcaaccccgacaacctgcagggcggcgacgacctggaccccaactacgtgctgagctcgcgggtgcgcacgggccgcagcatccgtggcttctgcctccccccgcactgcagccgcggggagcgccgcgccatcgagaagctcgcggtggaagccctgtccagcctggacggcgacctggcgggccgatactacgcgctcaagagcatgacggaggcggagcagcagcagctcatcgacgaccacttcctcttcgacaagcccgtgtcgcccctgctgctggcctcgggcatggcccgcgactggcccgacgcccgcggtatctggcacaatgacaataagaccttcctggtgtgggtcaacgaggaggaccacctgcgggtcatctccatgcagaaggggggcaacatgaaggaggtgttcacccgcttctgcaccggcctcacccagattgaaactctcttcaagtctaaggactatgagttcatgtggaaccctcacctgggctacatcctcacctgcccatccaacctgggcaccgggctgcgggcaggtgtgcatatcaagctgcccaacctgggcaagcatgagaagttctcggaggtgcttaagcggctgcgacttcagaagcgaggcacaggcggtgtggacacggctgcggtgggcggggtcttcgacgtctccaacgctgaccgcctgggcttctcagaggtggagctggtgcagatggtggtggacggagtgaagctgctcatcgagatggaacagcggctggagcagggccaggccatcgacgacaatgctacaataaaggacacagaaatgggggaggtgggccgggggtcctggggtctccgtggtcaggagtgccctggagcgtgg

SEQ ID NO: 311170 - DNA, 1397 bp, Homo sapiens
ctgcggtgtctaggcacccgccaacgttcggccaagtgtcagccggcagcgacggcgctagagctgggagctggggacgcgcgcgccggaccttacatagcctccgcccacagcctgaggcgccggggcctgaggagccggggggcgggggtgctgacccccgagctgtacgcggagctgcgcgccaagagcacgccgagcggcttcacgctggacgacgtcatccagacaggcgtggacaacccgggccacccgtacatcatgaccgtgggctgcgtggcgggcgacgaggagtcctacgaagtgttcaaggatctcttcgaccccatcatcgaggaccggcacggcggctacaagcccagcgatgagcacaagaccgacctcaaccccgacaacctgcagggcggcgacgacctggaccccaactacgtgctgagctcgcgggtgcgcacgggccgcagcatccgtggcttctgcctccccccgcactgcagccgcggggagcgccgcgccatcgagaagctcgcggtggaagccctgtccagcctggacggcgacctggcgggccgatactacgcgctcaagagcatgacggaggcggagcagcagcagctcatcgacgaccacttcctcttcgacaagcccgtgtcgcccctgctgctggcctcgggcatggcccgcgactggcccgacgcccgcggtatctggcacaatgacaataagaccttcctggtgtgggtcaacgaggaggaccacctgcgggtcatctccatgcagaaggggggcaacatgaaggaggtgttcacccgcttctgcaccggcctcacccagattgaaactctcttcaagtctaaggactatgagttcatgtggaaccctcacctgggctacatcctcacctgcccatccaacctgggcaccgggctgcgggcaggtgtgcatatcaagctgcccaacctgggcaagcatgagaagttctcggaggtgcttaagcggctgcgacttcagaagcgaggcacaggcggtgtggacacggctgcggtgggcggggtcttcgacgtctccaacgctgaccgcctgggcttctcagaggtggagctggtgcagatggtggtggacggagtgaagctgctcatcgagatggaacagcggctggagcagggccaggccatcgacgacctcatgcctgcccagaaatgaagcccggcccacacccgacaccagccctgctgcttcctaacttattgcctgggcagtgcccaccatgcacccctgatgttcgccgtctggcgagcccttagccttgctgtagagacttccgtcacccttggtagagtttatttttttgatggctaagatactgctgatgctgaaataaactagggttttggcctgcc

SEQ ID NO: 311171 - DNA, 1311 bp, Homo sapiens
cggcagctgttcgcctgcgtcgctccgggagctgccgacggacggagcgcccccgcccccgcccggccgcccgcccgccgccgccatgcccttctccaacagccacaacgcactgaagctgcgcttcccggccgaggacgagttccccgacctgagcgcccacaacaaccacatggccaacgtgggctgcgtggcgggcgacgaggagtcctacgaagtgttcaaggatctcttcgaccccatcatcgaggaccggcacggcggctacaagcccagcgatgagcacaagaccgacctcaaccccgacaacctgcagggcggcgacgacctggaccccaactacgtgctgagctcgcgggtgcgcacgggccgcagcatccgtggcttctgcctccccccgcactgcagccgcggggagcgccgcgccatcgagaagctcgcggtggaagccctgtccagcctggacggcgacctggcgggccgatactacgcgctcaagagcatgacggaggcggagcagcagcagctcatcgacgaccacttcctcttcgacaagcccgtgtcgcccctgctgctggcctcgggcatggcccgcgactggcccgacgcccgcggtatctggcacaatgacaataagaccttcctggtgtgggtcaacgaggaggaccacctgcgggtcatctccatgcagaaggggggcaacatgaaggaggtgttcacccgcttctgcaccggcctcacccagattgaaactctcttcaagtctaaggactatgagttcatgtggaaccctcacctgggctacatcctcacctgcccatccaacctgggcaccgggctgcgggcaggtgtgcatatcaagctgcccaacctgggcaagcatgagaagttctcggaggtgcttaagcggctgcgacttcagaagcgaggcacaggcggtgtggacacggctgcggtgggcggggtcttcgacgtctccaacgctgaccgcctgggcttctcagaggtggagctggtgcagatggtggtggacggagtgaagctgctcatcgagatggaacagcggctggagcagggccaggccatcgacgacctcatgcctgcccagaaatgaagcccggcccacacccgacaccagccctgctgcttcctaacttattgcctgggcagtgcccaccatgcacccctgatgttcgccgtctggcgagcccttagccttgctgtagagacttccgtcacccttggtagagtttatttttttgatggctaagatactgctgatgctgaaataaactagggttttggcctgcc

SEQ ID NO: 311172 - DNA, 1811 bp, Homo sapiens
cggcagctgttcgcctgcgtcgctccgggagctgccgacggacggagcgcccccgcccccgcccggccgcccgcccgccgccgccatgcccttctccaacagccacaacgcactgaagctgcgcttcccggccgaggacgagttccccgacctgagcgcccacaacaaccacatggccaaggtgctgacccccgagctgtacgcggagctgcgcgccaagagcacgccgagcggcttcacgctggacgacgtcatccagacaggcgtggacaacccgggccacccgtacatcatgaccgtgggctgcgtggcgggcgacgaggagtcctacgaagtgttcaaggatctcttcgaccccatcatcgaggaccggcacggcggctacaagcccagcgatgagcacaagaccgacctcaaccccgacaacctgcagggcggcgacgacctggaccccaactacgtgctgagctcgcgggtgcgcacgggccgcagcatccgtggcttctgcctccccccgcactgcagccgcggggagcgccgcgccatcgagaagctcgcggtggaaggtaggggccgggcgggccgaggggcggcggcggccgcgtccccctcccggcgcggtccccgcccgcttttgtttacgtcgcccgggagcggcagccgccgtcgcgctcttatctgcgcgcgcccgggttcagtttcccggagggaccgagggacggaggcccagccccgcgcccacagcggcctggggcccagggagggcgggtcctggcgcggggtcaccgcctgggaccgtcgcccgggccgtgaggactggacgcccgcagatccgggcgggtggggccctctgacgtcccccgaggtggggcacgggggcgggcgggtccgcgctgcgggctggaggggcgggcgcgggagccgagcgtcctgagcgcacccctcgcagccctgtccagcctggacggcgacctggcgggccgatactacgcgctcaagagcatgacggaggcggagcagcagcagctcatcgacgaccacttcctcttcgacaagcccgtgtcgcccctgctgctggcctcgggcatggcccgcgactggcccgacgcccgcggtatctggcacaatgacaataagaccttcctggtgtgggtcaacgaggaggaccacctgcgggtcatctccatgcagaaggggggcaacatgaaggaggtgttcacccgcttctgcaccggcctcacccagattgaaactctcttcaagtctaaggactatgagttcatgtggaaccctcacctgggctacatcctcacctgcccatccaacctgggcaccgggctgcgggcaggtgtgcatatcaagctgcccaacctgggcaagcatgagaagttctcggaggtgcttaagcggctgcgacttcagaagcgaggcacaggcggtgtggacacggctgcggtgggcggggtcttcgacgtctccaacgctgaccgcctgggcttctcagaggtggagctggtgcagatggtggtggacggagtgaagctgctcatcgagatggaacagcggctggagcagggccaggccatcgacgacctcatgcctgcccagaaatgaagcccggcccacacccgacaccagccctgctgcttcctaacttattgcctgggcagtgcccaccatgcacccctgatgttcgccgtctggcgagcccttagccttgctgtagagacttccgtcacccttggtagagtttatttttttgatggctaagatactgctgatgctgaaataaactagggttttggcctgcc

SEQ ID NO: 311173 - DNA, 1765 bp, Homo sapiens
cggcagctgttcgcctgcgtcgctccgggagctgccgacggacggagcgcccccgcccccgcccggccgcccgcccgccgccgccatgcccttctccaacagccacaacgcactgaagctgcgcttcccggccgaggacgagttccccgacctgagcgcccacaacaaccacatggccaaggtgctgacccccgagctgtacgcggagctgcgcgccaagagcacgccgagcggcttcacgctggacgacgtcatccagacaggcgtggacaacccgggccacccgtacatcatgaccgtgggctgcgtggcgggcgacgaggagtcctacgaagtgttcaaggatctcttcgaccccatcatcgaggaccggcacggcggctacaagcccagcgatgagcacaagaccgacctcaaccccgacaacctgcagggcggcgacgacctggaccccaactacgtgctgagctcgcgggtgcgcacgggccgcagcatccgtggcttctgcctccccccgcactgcagccgcggggagcgccgcgccatcgagaagctcgcggtggaagccctgtccagcctggacggcgacctggcgggccgatactacgcgctcaagagcatgacggaggcggagcagcagcagctcatcgacgaccacttcctcttcgacaagcccgtgtcgcccctgctgctggcctcgggcatggcccgcgactggcccgacgcccgcggtatctggtgcgtgtccctctgcgccctctcgcggcgtcctccctccccgctacctccgctttccctctcgcccccctcgcgggggtggggcccctcgcggcgaggaggaggaggaggaggagggaggggccggccgcgctccgggtctgggttccgtgccgcgcctcctcctgcgccggtgaccttggccgagcaggtgcgttaagggactgggccccggcccgtgggggctcaggactcagcaacacctccccaccccgagacgtgaggtgggggcggggctctctggcgcctctccccgacggccctgggagctggagctctttgttttcttttctcactccccagcagggatgtgggtgccccagcatcagtccccccgggggatttccggcactggggagtctcagggcctgtaggggtttcaggcaggccttctccctcataccctcttctccgtctgcatgattgaaactctcttcaagtctaaggactatgagttcatgtggaaccctcacctgggctacatcctcacctgcccatccaacctgggcaccgggctgcgggcaggtgtgcatatcaagctgcccaacctgggcaagcatgagaagttctcggaggtgcttaagcggctgcgacttcagaagcgaggcacaggcggtgtggacacggctgcggtgggcggggtcttcgacgtctccaacgctgaccgcctgggcttctcagaggtggagctggtgcagatggtggtggacggagtgaagctgctcatcgagatggaacagcggctggagcagggccaggccatcgacgacctcatgcctgcccagaaatgaagcccggcccacacccgacaccagccctgctgcttcctaacttattgcctgggcagtgcccaccatgcacccctgatgttcgccgtctggcgagcccttagccttgctgtagagacttccgtcacccttggtagagtttatttttttgatggctaagatactgctgatgctgaaataaactagggttttggcctgcc

SEQ ID NO: 311174 - DNA, 1049 bp, Homo sapiens
cggcagctgttcgcctgcgtcgctccgggagctgccgacggacggagcgcccccgcccccgcccggccgcccgcccgccgccgccatgcccttctccaacagccacaacgcactgaagctgcgcttcccggccgaggacgagttccccgacctgagcgcccacaacaaccacatggccaaggtgctgacccccgagctgtacgcggagctgcgcgccaagagcacgccgagcggcttcacgctggacgacgtcatccagacaggcgtggacaacccgggccacccgtacatcatgaccgtgggctgcgtggcgggcgacgaggagtcctacgaagtgttcaaggatctcttcgaccccatcatcgaggaccggcacggcggctacaagcccagcgatgagcacaagaccgacctcaaccccgacaacctgcagggcggcgacgacctggaccccaactacgtgctgagctcgcgggtgcgcacgggccgcagcatccgtggcttctgcctccccccgcactgcagccgcggggagcgccgcgccatcgagaagctcgcggtggaagccctgtccagcctggacggcgacctggcgggccgatactacgcgctcaagagcatgacggaggcggagcagcagcagctcatcgacgaccacttcctcttcgacaagcccgtgtcgcccctgctgctggcctcgggcatggcccgcgactggcccgacgcccgcggtatctggcacaatgacaataagaccttcctggtgtgggtcaacgaggaggaccacctgcgggtcatctccatgcagaaggggggcaacatgaaggaggtgttcacccgcttctgcaccggcctcacccagattgaaactctcttcaagtctaaggactatgagttcatgtggaaccctcacctgggctacatcctcacctgcccatccaacctgggcaccgggctgcgggcaggtgtgcatatcaagctgcccaacctgggcaagcatgagaagtttccgagtccgctgcattgggatcctctagatcagactcgca

SEQ ID NO: 311175 - DNA, 1091 bp, Homo sapiens
cggcagctgttcgcctgcgtcgctccgggagctgccgacggacggagcgcccccgcccccgcccggccgcccgcccgccgccgccatgcccttctccaacagccacaacgcactgaagctgcgcttcccggccgaggacgagttccccgacctgagcgcccacaacaaccacatggccaaggtgctgacccccgagctgtacgcggagctgcgcgccaagagcacgccgagcggcttcacgctggacgacgtcatccagacaggcgtggacaacccgggccacccgtacatcatgaccgtgggctgcgtggcgggcgacgaggagtcctacgaagtgttcaaggatctcttcgaccccatcatcgaggaccggcacggcggctacaagcccagcgatgagcacaagaccgacctcaaccccgacaacctgcagggcggcgacgacctggaccccaactacgtgctgagctcgcgggtgcgcacgggccgcagcatccgtggcttctgcctccccccgcactgcagccgcggggagcgccgcgccatcgagaagctcgcggtggaagccctgtccagcctggacggcgacctggcgggccgatactacgcgctcaagagcatgacggaggcggagcagcagcagctcatcgacgaccacttcctcttcgacaagcccgtgtcgcccctgctgctggcctcgggcatggcccgcgactggcccgacgcccgcggtatctggcacaatgacaataagaccttcctggtgtgggtcaacgaggaggaccacctgcgggtcatctccatgcagaaggggggcaacatgaaggaggtgttcacccgcttctgcaccggcctcacccagattgaaactctcttcaagtctaaggactatgagttcatgtggaaccctcacctgggctacatcctcacctgcccatccaacctgggcaccgggctgcgggcaggtgtgcatatcaagctgcccaacctgggcaagcatgagaagttgcgcctgggtgcagaagtgcgcctgggtgcagaagtgcgcctgggtgcagaagtgcgcctgggtgcagaagtgcgcctgggtg

SEQ ID NO: 311176 - DNA, 1118 bp, Homo sapiens
aggaggcggggcggcccgggcccggcgacgggggggggcgggcgcggggcccgggggcggacccgcccacacgggacggccggcggcacgcccgcgaggccagaccgcccaccccgcaccggcggcggcgacgacctggaccccaactacgtgctgagctcgcgggtgcgcacgggccgcagcatccgtggcttctgcctccccccgcactgcagccgcggggagcgccgcgccatcgagaagctcgcggtggaagccctgtccagcctggacggcgacctggcgggccgatactacgcgctcaagagcatgacggaggcggagcagcagcagctcatcgacgaccacttcctcttcgacaagcccgtgtcgcccctgctgctggcctcgggcatggcccgcgactggcccgacgcccgcggtatctggcacaatgacaataagaccttcctggtgtgggtcaacgaggaggaccacctgcgggtcatctccatgcagaaggggggcaacatgaaggaggtgttcacccgcttctgcaccggcctcacccagattgaaactctcttcaagtctaaggactatgagttcatgtggaaccctcacctgggctacatcctcacctgcccatccaacctgggcaccgggctgcgggcaggtgtgcatatcaagctgcccaacctgggcaagcatgagaagttctcggaggtgcttaagcggctgcgacttcagaagcgaggcacaggcggtgtggacacggctgcggtgggcggggtcttcgacgtctccaacgctgaccgcctgggcttctcagaggtggagctggtgcagatggtggtggacggagtgaagctgctcatcgagatggaacagcggctggagcagggccaggccatcgacgacctcatgcctgcccagaaatgaagcccggcccacacccgacaccagccctgctgcttcctaacttattgcctgggcagtgcccaccatgcacccctgatgttcgccgtctggcgagcccttagccttgctgtagagacttccgtcacccttggtagagtttatttttttgatggctaagatactgctgatgctgaaataaactagggttttggcctgcc

SEQ ID NO: 311177 - DNA, 1694 bp, Homo sapiens
ccctccccccgcgcagccgcagggtcctcagcagcgcgctcgggcccggcagtgacgtcactgtccccgtcccgcgccccctcccccaggccacccgtacatcatgaccgtgggctgcgtggcgggcgacgaggagtcctacgaagtgttcaaggatctcttcgaccccatcatcgaggaccggcacggcggctacaagcccagcgatgagcacaagaccgacctcaaccccgacaacctgcaggtgcggggctgcgggcgggccgggcgggcggggccggggtcttcgggcgctcactcccgtctcgcctcccagggcggcgacgacctggaccccaactacgtgctgagctcgcgggtgcgcacgggccgcagcatccgtggcttctgcctccccccgcactgcagccgcggggagcgccgcgccatcgagaagctcgcggtggaaggtaggggccgggcgggccgaggggcggcggcggccgcgtccccctcccggcgcggtccccgcccgcttttgtttacgtcgcccgggagcggcagccgccgtcgcgctcttatctgcgcgcgcccgggttcagtttcccggagggaccgagggacggaggcccagccccgcgcccacagcggcctggggcccagggagggcgggtcctggcgcggggtcaccgcctgggaccgtcgcccgggccgtgaggactggacgcccgcagatccgggcgggtggggccctctgacgtcccccgaggtggggcacgggggcgggcgggtccgcgctgcgggctggaggggcgggcgcgggagccgagcgtcctgagcgcacccctcgcagccctgtccagcctggacggcgacctggcgggccgatactacgcgctcaagagcatgacggaggcggagcagcagcagctcatcgacgaccacttcctcttcgacaagcccgtgtcgcccctgctgctggcctcgggcatggcccgcgactggcccgacgcccgcggtatctggcacaatgacaataagaccttcctggtgtgggtcaacgaggaggaccacctgcgggtcatctccatgcagaaggggggcaacatgaaggaggtgttcacccgcttctgcaccggcctcacccagattgaaactctcttcaagtctaaggactatgagttcatgtggaaccctcacctgggctacatcctcacctgcccatccaacctgggcaccgggctgcgggcaggtgtgcatatcaagctgcccaacctgggcaagcatgagaagttctcggaggtgcttaagcggctgcgacttcagaagcgaggcacaggcggtgtggacacggctgcggtgggcggggtcttcgacgtctccaacgctgaccgcctgggcttctcagaggtggagctggtgcagatggtggtggacggagtgaagctgctcatcgagatggaacagcggctggagcagggccaggccatcgacgacctcatgcctgcccagaaatgaagcccggcccacacccgacaccagccctgctgcttcctaacttattgcctgggcagtgcccaccatgcacccctgatgttcgccgtctggcgagcccttagccttgctgtagagacttccgtcacccttggtagagtttatttttttgatggctaagatactgctgatgctgaaataaactagggttttggcctgcc

SEQ ID NO: 311178 - DNA, 818 bp, Homo sapiens
gcgggcatggcccgcggccagcagcagggcgacacgggcttgtcgaagaggaagtggtcgtcgatgagctggcccctgctgctggcctcgggcatggcccgcgactggcccgacgcccgcggtatctggcacaatgacaataagaccttcctggtgtgggtcaacgaggaggaccacctgcgggtcatctccatgcagaaggggggcaacatgaaggaggtgttcacccgcttctgcaccggcctcacccagattgaaactctcttcaagtctaaggactatgagttcatgtggaaccctcacctgggctacatcctcacctgcccatccaacctgggcaccgggctgcgggcaggtgtgcatatcaagctgcccaacctgggcaagcatgagaagttctcggaggtgcttaagcggctgcgacttcagaagcgaggcacaggcggtgtggacacggctgcggtgggcggggtcttcgacgtctccaacgctgaccgcctgggcttctcagaggtggagctggtgcagatggtggtggacggagtgaagctgctcatcgagatggaacagcggctggagcagggccaggccatcgacgacctcatgcctgcccagaaatgaagcccggcccacacccgacaccagccctgctgcttcctaacttattgcctgggcagtgcccaccatgcacccctgatgttcgccgtctggcgagcccttagccttgctgtagagacttccgtcacccttggtagagtttatttttttgatggctaagatactgctgatgctgaaataaactagggttttggcctgcc

SEQ ID NO: 311179 - DNA, 685 bp, Homo sapiens
cggcagctgttcgcctgcgtcgctccgggagctgccgacggacggagcgcccccgcccccgcccggccgcccgcccgccgccgccatgcccttctccaacagccacaacgcactgaagctgcgcttcccggccgaggacgagttccccgacctgagcgcccacaacaaccacatggccaaggtgctgacccccgagctgtacgcggagctgcgcgccaagagcacgccgagcggcttcacgctggacgacgtcatccagacaggcgtggacaacccgggccacccgtacatcatgaccgtgggctgcgtggcgggcgacgaggagtcctacgaagtgttcaaggatctcttcgaccccatcatcgaggaccttctcagaggtggagctggtgcagatggtggtggacggagtgaagctgctcatcgagatggaacagcggctggagcagggccaggccatcgacgacctcatgcctgcccagaaatgaagcccggcccacacccgacaccagccctgctgcttcctaacttattgcctgggcagtgcccaccatgcacccctgatgttcgccgtctggcgagcccttagccttgctgtagagacttccgtcacccttggtagagtttatttttttgatggctaagatactgctgatgctgaaataaactagggttttggcctgcc

SEQ ID NO: 311180 - DNA, 689 bp, Homo sapiens
ttccccccccccccccccccccccgcccgagcacaggacacagctgggttctgaagcttctgagttctgcagcctcacctctgagaaaacctcttttccaccaataccatgaagctctgcgtgactgtcctgtctctcctcatgctagtagctgccttctgctctccagcgctctcagcaccaatgggctcagaccctcccaccgcctgctgcttttcttacaccgcgaggaagcttcctcgcaactttgtggtagattactatgagaccagcagcctctgctcccagccagctgtggtattccaaaccaaaagaagcaagcaagtctgtgctgatcccagtgaatcctgggtccaggagtacgtgtatgacctggaactgaactgagctgctcagagacaggaagtcttcagggaaggtcacctgagcccggatgcttctccatgagacacatctcctccatactcaggactcctctccgcagttcctgtcccttctcttaatttaatcttttttatgtgccgtgttattgtattaggtgtcatttccattatttatattagtttagccaaaggataagtgtcccctatggggatggtccactgtcactgtttctctgctgttgcaaatacatggataacacatttgattctgtgtgttttcataataaaactttaaaataaaatgca

SEQ ID NO: 311181 - DNA, 562 bp, Homo sapiens
atccagtgggtggaagttacagggagtctgcttccagtgctgctccaggaaggatccatccaccagagctgccccacatggaccatggtcaggcagaggaagatgcaaaggataaagccagatgacctcaaaggtctcatgagattctaatctgtccgctccttgttctacaattccaaaccaaaagaagcaagcaagtctgtgctgatcccagtgaatcctgggtccaggagtacgtgtatgacctggaactgaactgagctgctcagagacaggaagtcttcagggaaggtcacctgagcccggatgcttctccatgagacacatctcctccatactcaggactcctctccgcagttcctgtcccttctcttaatttaatcttttttatgtgccgtgttattgtattaggtgtcatttccattatttatattagtttagccaaaggataagtgtcccctatggggatggtccactgtcactgtttctctgctgttgcaaatacatggataacacatttgattctgtgtgttttcataataaaactttaaaataaaatgca

SEQ ID NO: 311182 - DNA, 293 bp, Homo sapiens
  misc_feature (22)..(22): n is a, c, g, or t
ccctttggaaaaggccccgcgngaaaatggtcttttctccacattagaagacaaacatctcctccatactcaggactcctctccgcagttcctgtcccttctcttaatttaatcttttttatgtgccgtgttattgtattaggtgtcatttccattatttatattagtttagccaaaggataagtgtcccctatggggatggtccactgtcactgtttctctgctgttgcaaatacatggataacacatttgattctgtgtgttttcataataaaactttaaaataaaatgca

SEQ ID NO: 311183 - DNA, 317 bp, Homo sapiens
  misc_feature (66)..(66): n is a, c, g, or t
ccttttttttccccccgcccctttttttccccccccccccaaaaaatttattaaaaaacccttttnccccaaaaggggggaaaaaaaccctctccccctttcctctccgcagttcctgtcccttctcttaatttaatcttttttatgtgccgtgttattgtattaggtgtcatttccattatttatattagtttagccaaaggataagtgtcccctatggggatggtccactgtcactgtttctctgctgttgcaaatacatggataacacatttgattctgtgtgttttcataataaaactttaaaataaaatgca

SEQ ID NO: 311184 - DNA, 309 bp, Homo sapiens
  misc_feature (58)..(59): n is a, c, g, or t
agagagagggggggggggggaaaaatttttttttttccccccccccccccccccccannaaaccccccccccgcccacaaaaaaggtgttttccccctggggtgccccctcttttcctttaaatttaatcttttttatgtgccgtgttattgtattaggtgtcatttccattatttatattagtttagccaaaggataagtgtcccctatggggatggtccactgtcactgtttctctgctgttgcaaatacatggataacacatttgattctgtgtgttttcataataaaactttaaaataaaatgca

SEQ ID NO: 311185 - DNA, 809 bp, Homo sapiens
ggaagagaagctgagaggaactcctcactcagctagcttcaggagccatgacgtcatctctaccatggaaattccactcactctcctgtgcccccacatttgtcctaggcctcagagtccctataaagagagattcccaactcagtatcagcacaggacacagctgggttctgaagcttctgagttctgcagcctcacctctgagaaaacctcttttccaccaataccatgaagctctgcgtgactgtcctgtctctcctcatgctagtagctgccttctgctctccagcgctctcagcaccaatgggctcagaccctcccaccgcctgctgcttttcttacaccgcgaggaagcttcctcgcaactttgtggtagattactatgagaccagcagcctctgctcccagccagctgtggtattccaaaccaaaagaagcaagcaagtctgtgctgatcccagtgaatcctgggtccaggagtacgtgtatgacctggaactgaactgagctgctcagagacaggaagtcttcagggaaggtcacctgagcccggatgcttctccatgagacacatctcctccatactcaggactcctctccgcagttcctgtcccttctcttaatttaatcttttttatgtgccgtgttattgtattaggtgtcatttccattatttatattagtttagccaaaggataagtgtcccctatggggatggtccactgtcactgtttctctgctgttgcaaatacatggataacacatttgattctgtgtgttttcataataaaactttaaaataaaatgca

SEQ ID NO: 311186 - DNA, 866 bp, Homo sapiens
ggaagagaagctgagaggaactcctcactcagctagcttcaggagccatgacgtcatctctaccatggaaattccactcactctcctgtgcccccacatttgtcctaggcctcagagtccctataaagagagattcccaactcagtatcagcacaggacacagctgggttctgaagcttctgagttctgcagcctcacctctgagaaaacctcttttccaccaataccatgaagctctgcgtgactgtcctgtctctcctcatgctagtagctgccttctgctctccagcgctctcagcaccaatgggctcagaccctcccaccgcctgctgcttttcttacaccgcgaggaagcttcctcgcaactttgtggtagattactatgagaccagcagcctctgctcccagccagctgtggtattccaaaccaaaagaagcaagcaagtctgtgctgatcccagtgaatcctgggtccaggagtacgtgtatgacctggaactgaactgagctgctcagagacaggaagtcttcagggaaggtcacctgagcccggatgcttctccatgagacacatctcctccatactcaggactcctctccgcagttcctgtcccttctcttaatttaatcttttttatgtgccgtgttattgtattaggtgtcatttccattatttatattagtttagccaaaggataagtgtcccctatggggatggtccactgtcactgtttctctgctgttgcaaatacatggataacacatttgattctgtgtgttttcataataaaactttaaaataaaatgcaaaaaaaaaaaaccaaataatatgcggcccgattcgggctacttgccaattccccttg

SEQ ID NO: 311187 - DNA, 1355 bp, Homo sapiens
ggaagagaagctgagaggaactcctcactcagctagcttcaggagccatgacgtcatctctaccatggaaattccactcactctcctgtgcccccacatttgtcctaggcctcagagtccctataaagagagattcccaactcagtatcagcacaggacacagctgggttctgaagcttctgagttctgcagcctcacctctgagaaaacctcttttccaccaataccatgaagctctgcgtgactgtcctgtctctcctcatgctagtagctgccttctgctctccagcgctctcagcaccaagtaagtctacttttgcagctgctatttcaagtcaaggtgtaggcagagtccttttttctagtcatggctggcaaacagtgggatctggggatgggacaaaaggcagctaggaagattgccatgtagtctgctgctaaatgtagagtctagtagatattcaataacattcaagttcctattttcttaagaattagcaaccagcagaggaaaacgatgggctggaagtcagactgttgaattggctctgcctttaattatttgttcaagcaagcccctgtccctctctgtgccttggtttccccatctgtcatatgaagggagtgcgatgtgttctgagactgaatccagttccaatcttctagatttctttctcgttcttctctgaagatccactattcaaaataagactcctgctcatgttaggtgggaatggatatttggggttctggtagctccacagggatgctcaatgaagatgcaaaattagaagtcaaaataaacagctcccacgggcagtgttgatctcaccctggcctttcctttcagtgggctcagaccctcccaccgcctgctgcttttcttacaccgcgaggaagcttcctcgcaactttgtggtagattactatgagaccagcagcctctgctcccagccagctgtggtattccaaaccaaaagaagcaagcaagtctgtgctgatcccagtgaatcctgggtccaggagtacgtgtatgacctggaactgaactgagctgctcagagacaggaagtcttcagggaaggtcacctgagcccggatgcttctccatgagacacatctcctccatactcaggactcctctccgcagttcctgtcccttctcttaatttaatcttttttatgtgccgtgttattgtattaggtgtcatttccattatttatattagtttagccaaaggataagtgtcccctatggggatggtccactgtcactgtttctctgctgttgcaaatacatggataacacatttgattctgtgtgttttcataataaaactttaaaataaaatgca

SEQ ID NO: 311188 - DNA, 845 bp, Homo sapiens
ggaagagaagctgagaggaactcctcactcagctagcttcaggagccatgacgtcatctctaccatggaaattccactcactctcctgtgcccccacatttgtcctaggcctcagagtccctataaagagagattcccaactcagtatcagcacaggacacagctgggttctgaagcttctgagttctgcagcctcacctctgagaaaacctcttttccaccaataccatgaagctctgcgtgactgtcctgtctctcctcatgctagtagctgccttctgctctccagcgctctcagcaccaatgggctcagaccctcccaccgcctgctgcttttcttacaccgcgaggaagcttcctcgcaactttgtggtagattactatgagaccagcagcctctgctcccagccagctgtggtattccaaaccaaaagaagcaagcaagtctgtgctgatcccagtgaatcctgggtccaggagtacgtgtatgacctggaactgaactgagctgctcagagacaggaagtcttcagggaaggtcacctgagcccggatgcttctccatgagacacatctcctccatactcaggactcctctccgcagttcctgtcccttctcttaatttaatcttttttatgtgccgtgttattgtattaggtgtcatttccattatttatattagtttagccaaaggataagtgtcccctatggggatggtccactgtcactgtttctctgctgttgcaaatacatggataacacatttgattctgtgtgttttcataataaaactttaaaataaaatgcatggaaatgaacaacctaatacaataacacggcacat

SEQ ID NO: 311189 - DNA, 875 bp, Homo sapiens
  misc_feature (827)..(827): n is a, c, g, or t
  misc_feature (833)..(833): n is a, c, g, or t
  misc_feature (838)..(838): n is a, c, g, or t
ggaagagaagctgagaggaactcctcactcagctagcttcaggagccatgacgtcatctctaccatggaaattccactcactctcctgtgcccccacatttgtcctaggcctcagagtccctataaagagagattcccaactcagtatcagcacaggacacagctgggttctgaagcttctgagttctgcagcctcacctctgagaaaacctcttttccaccaataccatgaagctctgcgtgactgtcctgtctctcctcatgctagtagctgccttctgctctccagcgctctcagcaccaatgggctcagaccctcccaccgcctgctgcttttcttacaccgcgaggaagcttcctcgcaactttgtggtagattactatgagaccagcagcctctgctcccagccagctgtggtattccaaaccaaaagaagcaagcaagtctgtgctgatcccagtgaatcctgggtccaggagtacgtgtatgacctggaactgaactgagctgctcagagacaggaagtcttcagggaaggtcacctgagcccggatgcttctccatgagacacatctcctccatactcaggactcctctccgcagttcctgtcccttctcttaatttaatcttttttatgtgccgtgttattgtattaggtgtcatttccattatttatattagtttagccaaaggataagtgtcccctatggggatggtccactgtcactgtttctctgctgttgcaaatacatggataacacatttgattctgtgtgttttcataataaaactttaaaataaaatgcagatgcgcgccgtccaacntatatngtgantaattcattattcccgatctatcgagccgtccaatta

SEQ ID NO: 311190 - DNA, 882 bp, Homo sapiens
  misc_feature (814)..(814): n is a, c, g, or t
ggaagagaagctgagaggaactcctcactcagctagcttcaggagccatgacgtcatctctaccatggaaattccactcactctcctgtgcccccacatttgtcctaggcctcagagtccctataaagagagattcccaactcagtatcagcacaggacacagctgggttctgaagcttctgagttctgcagcctcacctctgagaaaacctcttttccaccaataccatgaagctctgcgtgactgtcctgtctctcctcatgctagtagctgccttctgctctccagcgctctcagcaccaatgggctcagaccctcccaccgcctgctgcttttcttacaccgcgaggaagcttcctcgcaactttgtggtagattactatgagaccagcagcctctgctcccagccagctgtggtattccaaaccaaaagaagcaagcaagtctgtgctgatcccagtgaatcctgggtccaggagtacgtgtatgacctggaactgaactgagctgctcagagacaggaagtcttcagggaaggtcacctgagcccggatgcttctccatgagacacatctcctccatactcaggactcctctccgcagttcctgtcccttctcttaatttaatcttttttatgtgccgtgttattgtattaggtgtcatttccattatttatattagtttagccaaaggataagtgtcccctatggggatggtccactgtcactgtttctctgctgttgcaaatacatggataacacatttgattctgtgtgttttcataataaaactttaaaataaaatgcagaatngcgtacgcgcgccagccgctccatccttccttctctttcccttctcatctttcactcgcatccattcc

SEQ ID NO: 311191 - DNA, 868 bp, Homo sapiens
ggaagagaagctgagaggaactcctcactcagctagcttcaggagccatgacgtcatctctaccatggaaattccactcactctcctgtgcccccacatttgtcctaggcctcagagtccctataaagagagattcccaactcagtatcagcacaggacacagctgggttctgaagcttctgagttctgcagcctcacctctgagaaaacctcttttccaccaataccatgaagctctgcgtgactgtcctgtctctcctcatgctagtagctgccttctgctctccagcgctctcagcaccaatgggctcagaccctcccaccgcctgctgcttttcttacaccgcgaggaagcttcctcgcaactttgtggtagattactatgagaccagcagcctctgctcccagccagctgtggtattccaaaccaaaagaagcaagcaagtctgtgctgatcccagtgaatcctgggtccaggagtacgtgtatgacctggaactgaactgagctgctcagagacaggaagtcttcagggaaggtcacctgagcccggatgcttctccatgagacacatctcctccatactcaggactcctctccgcagttcctgtcccttctcttaatttaatcttttttatgtgccgtgttattgtattaggtgtcatttccattatttatattagtttagccaaaggataagtgtcccctatggggatggtccactgtcactgtttctctgctgttgcaaatacatggataacacatttgattctgtgtgttttcataataaaactttaaaataaaatgcagtacgcgcgcagcgcccccccctcttttgtaattttctatttttcaagctaaattaccc

SEQ ID NO: 311192 - DNA, 748 bp, Homo sapiens
ggaagagaagctgagaggaactcctcactcagctagcttcaggagccatgacgtcatctctaccatggaaattccactcactctcctgtgcccccacatttgtcctaggcctcagagtccctataaagagagattcccaactcagtatcagcacaggacacagctgggttctgaagcttctgagttctgcagcctcacctctgagaaaacctcttttccaccaataccatgaagctctgcgtgactgtcctgtctctcctcatgctagtagctgccttctgctctccagcgctctcagcaccaatgggctcagaccctcccaccgcctgctgcttttcttacaccgcgaggaagcttcctcgcaactttgtggtagattactatgagaccagcagcctctgctcccagccagctgtggttacgtgtatgacctggaactgaactgagctgctcagagacaggaagtcttcagggaaggtcacctgagcccggatgcttctccatgagacacatctcctccatactcaggactcctctccgcagttcctgtcccttctcttaatttaatcttttttatgtgccgtgttattgtattaggtgtcatttccattatttatattagtttagccaaaggataagtgtcccctatggggatggtccactgtcactgtttctctgctgttgcaaatacatggataacacatttgattctgtgtgttttcataataaaactttaaaataaaatgca

SEQ ID NO: 311193 - DNA, 1017 bp, Homo sapiens
ggaagagaagctgagaggaactcctcactcagctagcttcaggagccatgacgtcatctctaccatggaaattccactcactctcctgtgcccccacatttgtcctaggcctcagagtccctataaagagagattcccaactcagtatcagcacaggacacagctgggttctgaagcttctgagttctgcagcctcacctctgagaaaacctcttttccaccaataccatgaagctctgcgtgactgtcctgtctctcctcatgctagtagctgccttctgctctccagcgctctcagcaccaagtaagtctacttttgcagctgctatttcaagtcaaggtgtaggcagagtccttttttctagtcatggctggcaaacagtgggatctggggatgggacaaaaggcagctaggaagattgccatgtagtctgctgctaaatgtagagtctagtagatattcaataacattcaagttcctattttcttaagaattagcaaccagcagaggaaaacgatgggctggaagtcagactgttgaattggctctgcctttaattatttgttcaagcaagcccctgtccctctctgtgccttggtttccccatctgtcatatgaagggagtgcgatgtgttctgagactgaatccagttccaatcttctagatttctttctcgttcttctctgaagatccactattcaaaataagactcctgctcatgttaggtgggaatggatatttggggttctggtagctccacagggatgctcaatgaagatgcaaaattagaagtcaaaataaacagctcccacgggcagtgttgatctcaccctggcctttcctttcagtgggctcagaccctcccaccgcctgctgcttttcttacaccgcgaggaagcttcctcgcaactttgtggtagattactatgagaccagcagcctctgctcccagccagctgtggttgagtatcaacccctgggctgccctgggaggcaagggtgagggctggatttt

SEQ ID NO: 311194 - DNA, 694 bp, Homo sapiens
ggaagagaagctgagaggaactcctcactcagctagcttcaggagccatgacgtcatctctaccatggaaattccactcactctcctgtgcccccacatttgtcctaggcctcagagtccctataaagagagattcccaactcagtatcagcacaggacacagctgggttctgaagcttctgagttctgcagcctcacctctgagaaaacctcttttccaccaataccatgaagctctgcgtgactgtcctgtctctcctcatgctagtagctgccttctgctctccagcgctctcagcaccaaattccaaaccaaaagaagcaagcaagtctgtgctgatcccagtgaatcctgggtccaggagtacgtgtatgacctggaactgaactgagctgctcagagacaggaagtcttcagggaaggtcacctgagcccggatgcttctccatgagacacatctcctccatactcaggactcctctccgcagttcctgtcccttctcttaatttaatcttttttatgtgccgtgttattgtattaggtgtcatttccattatttatattagtttagccaaaggataagtgtcccctatggggatggtccactgtcactgtttctctgctgttgcaaatacatggataacacatttgattctgtgtgttttcataataaaactttaaaataaaatgca

SEQ ID NO: 311195 - DNA, 834 bp, Homo sapiens
ggaagagaagctgagaggaactcctcactcagctagcttcaggagccatgacgtcatctctaccatggaaattccactcactctcctgtgcccccacatttgtcctaggcctcagagtccctataaagagagattcccaactcagtatcagcacaggacacagctgggttctgaagcttctgagttctgcagcctcacctctgagaaaacctcttttccaccaataccatgaagctctgcgtgactgtcctgtctctcctcatgctagtagctgccttctgctctccagcgctctcagcaccaaattccaaaccaaaagaagcaagcaagtctgtgctgatcccagtgaatcctgggtccaggagtacgtgtatgacctggaactgaactgagctgctcagagacaggaagtcttcagggaaggtcacctgagcccggatgcttctccatgagacacatctcctccatactcaggactcctctccgcagttcctgtcccttctcttaatttaatcttttttatgtgccgtgttattgtattaggtgtcatttccattatttatattagtttagccaaaggataagtgtcccctatggggatggtccactgtcactgtttctctgctgttgcaaatacatggataacacatttgattctgtgtgttttcataataaaactttaaaataaaatgcaaaaattcttgactcaaccaccttatatatacgccctacttgggctcgctggccattccccctatgtaggcgaaacacaattattggccacctttttcaactgcgtcacttggtccctggagtacccattttcgcctgcct

SEQ ID NO: 311196 - DNA, 1909 bp, Homo sapiens
ggttttcttgctcgtgggctcggacgagtacggagcgcctgcagggacagcctggataaaggctcactgatggctcagttgggagcagttgtggctgtggcttccagtttcttttgtgcatctctcttctcagctgtgcacaagatagaagagggacatattggggtatattacagaggcggtgccctgctgacttcgaccagcggccctggtttccatctcatgctccctttcatcacatcatataagtctgtgcagaccacactccagacagatgaggtgaagaatgtaccttgtgggactagtggtggtgtgatgatctactttgacagaattgaagtggtgaacttcctggtcccgaacgcagtgtatgatatagtgaagaactatactgctgactatgacaaggccctcatcttcaacaagatccaccacgaactgaaccagttctgcagtgtgcacacgcttcaagaggtctacattgagctgtttgatcagattgatgaaaatctcaaactggctttgcaacaggacctgacctccatggcccctgggctggtcattcaagctgtgcgggtaacaaagcccaacataccagaggcaatccgcagaaactacgagttgatggaaagtgagaagacaaagcttctcattgccgcccagaaacagaaggtggtggaaaaggaagcagagacagagcggaagaaggcgctcattgaggcagaaaaagtggcccaggtggctgagatcacctacgggcagaaggtgatggagaaggagactgagaagaagatttcagaaattgaagatgctgcatttctggcccgggagaaggcaaaggcagatgctgagtgctacactgctatgaaaatagccgaagccaataagctgaagctaacccctgaatatctgcagctgatgaagtacaaggccattgcttccaacagcaagatttactttggcaaagacattcctaacatgttcatggactctgcgggcagtgtgagcaagcagtttgaggggctagctgacaagctaagctttggcttagaagatgaacccttggagacggccactaaggagaattgaaaaaaacttgatatgactgcaaatgatacttaagcagatctttattttttaagatgaatcagaatgttcctccctccccgactaccttctctgactgtcttccagttactgtggtgaaaaagaagaaatgaacttaaatccactccctttctagggaaaggagggtggggactgatgatggggggttttatttcaggtaagcagtttatatgacttccaataagatttgtaaatcatgggcttgacctttgacctctagacactaattttatcctttgaggctggcttaattagggatgctgtcattaaggagagggagaaatgtagagtgttacctccaactcatttgatttcccttacttgggaaaatgcagtccagtgttctcacctctgcctccaaggtaggagatgtctgtgggtgaggctcagcaactgagcaaatatgtgcctgtgagtttgccagtagagctgtgaagaaacagctgcagagaacatttgaccttcctggcattcttgtctgcatgtgtgtgagttattttagaggtgtgctttcttgagccctcataaggaagtactggtgctaggttttgcaagattttgtatacactttgctccttgccctagggctcagagtggtggtttctgactacatttctagagtcagagcttgatcaccacaactcaattatttcggcatcttttcacctatgctgtgatttgttttttttttttcttctcaaaaattctgttcattggttccactcagcatcaagaagacagggacaaacaactcaagtgtcttaacagctgctggagtggg

SEQ ID NO: 311197 - DNA, 1477 bp, Homo sapiens
ggttttcttgctcgtgggctcggacgagtacggagcgcctgcagggacagcctggataaaggctcactgatggctcagttgggagcagttgtggctgtggcttccagtttcttttgtgcatctctcttctcagctgtgcacaagatagaagagggacatattggggtatattacagaggcggtgccctgctgacttcgaccagcggccctggtttccatctcatgctccctttcatcacatcatataagtctgtgcagaccacactccagacagatgaggtgaagaatgtaccttgtgggactagtggtggtgtgatgatctactttgacagaattgaagtggtgaacttcctggtcccgaacgcagtgtatgatatagtgaagaactatactgctgactatgacaaggccctcatcttcaacaagatccaccacgaactgaaccagttctgcagtgtgcacacgcttcaagaggtctacattgagctgtttggactggaaaatgatttttcccaggaatcttcataaaagggaccctgagcaagaacatttttcatagcagacaggaggactcatccacatcgccagcaatcataattaagcaaaccgccttttgcaccatttaagatttaggaaatcatccaaattacttttaatgtttctgcagtagaaaatgaatctaaattcattttatagggtttgtagtcttttatctgttttggattcactgtgcttttaagaaaaagttggtaaatttgccgttgatttttctttttaacctcaaactaatagaattttataaaatattaattttctctagccattgtcttaggacttgtgacattacatgaacatttcaaagcactgaaaaaagacaaaggatccctaatgtccctgaagaggaaattaaaatacaaagttgtttttcattagcaaacttcttactttcttacagctaaacttggtagcttagtgaagtacagctgcttgtatggaggagctggggaaatatatttgctttgaaacttttttatttttacatctcagtcttgctagcaagcactacttggcttagaatctgtcatatccataaaggaggagctcatgtctctagtcctggcccttcaactcagaaggttcttctatactttccttctctcaggactcttatagcccagactttaaacatgaagctgcataattttcatcacttcttactctgccgcatcctctttgcccatgttattaaagtattatctaatactttgaagtttacctgaagaacctctttgtgtgtacttagtaatacaactttttttcctgtcccaacaccttttaatacagttgaatggataaaaacatggatacaaacacatggatatagttatcactgaagcagtgtgacataaaataatacctatgtatacaacactcctctgtaaatagcaaatgtaaagtaaaagatacacaacagaaa

SEQ ID NO: 311198 - DNA, 1088 bp, Homo sapiens
gggccccgccgaaggcaaaggcccactgtcagtcccccccgcgcacccccaagcgccaggcgatgagctgaagctaacccctgaatatctgcagctgatgaagtacaaggccattgcttccaacagcaagatttactttggcaaagacattcctaacatgttcatggactctgcgggcagtgtgagcaagcagtttgaggggctagctgacaagctaagctttggcttagaagatgaacccttggagacggccactaaggagaattgaaaaaaacttgatatgactgcaaatgatacttaagcagatctttattttttaagatgaatcagaatgttcctccctccccgactaccttctctgactgtcttccagttactgtggtgaaaaagaagaaatgaacttaaatccactccctttctagggaaaggagggtggggactgatgatggggggttttatttcaggtaagcagtttatatgacttccaataagatttgtaaatcatgggcttgacctttgacctctagacactaattttatcctttgaggctggcttaattagggatgctgtcattaaggagagggagaaatgtagagtgttacctccaactcatttgatttcccttacttgggaaaatgcagtccagtgttctcacctctgcctccaaggtaggagatgtctgtgggtgaggctcagcaactgagcaaatatgtgcctgtgagtttgccagtagagctgtgaagaaacagctgcagagaacatttgaccttcctggcattcttgtctgcatgtgtgtgagttattttagaggtgtgctttcttgagccctcataaggaagtactggtgctaggttttgcaagattttgtatacactttgctccttgccctagggctcagagtggtggtttctgactacatttctagagtcagagcttgatcaccacaactcaattatttcggcatcttttcacctatgctgtgatttgttttttttttttcttctcaaaaattctgttcattggttccactcagcatcaagaagacagggacaaacaactcaagtgtcttaacagctgctggagtggg

SEQ ID NO: 311199 - DNA, 984 bp, Homo sapiens
ggttttcttgctcgtgggctcggacgagtacggagcgcctgcagggacagcctgaggcggtgccctgctgacttcgaccagcggccctggtttccatctcatgctccctttcatcacatcatataagtctgtgcagaccacactccagacagatgaggtgaagaatgtaccttgtgggactagtggtggtgtgatgatctactttgacagaattgaagtggtgaacttcctggtcccgaacgcagtgtatgatatagtgaagaactatactgctgactatgacaaggccctcatcttcaacaagatccaccacgaactgaaccagttctgcagtgtgcacacgcttcaagaggtctacattgagctgtttgatcagattgatgaaaatctcaaactggctttgcaacaggacctgacctccatggcccctgggctggtcattcaagctgtgcgggtaacaaagcccaacataccagaggcaatccgcagaaactacgagttgatgtgagtataccctccgcctgggctgtgaccaccactgcctcccacctcccacctcgtcccatcccagaggtaaccaaagctgccaggcttctcggttatccccttgctggaggatttgctacagcccattgcactgtaagattgggcaggcgtgtcagggccaccactggggctccctacctgtgattgagaaccccaggataatccctgtagagcagcgatgttttgaaaagggccagggggccttgtttgtgttcagtgactcatgcccaaggtggagacaggagcaagagaccagtaagtggacaggccggagacattgctttgacctccgggaggcagaagttgcacgtgagccccagatcatgtccatcccaatctaagcttgggcattgagacaggtccgctccagaaaaagcaagtctttccccaggattgccttggggagttccccttcaaatgacttcttgttcctccctc

SEQ ID NO: 311200 - DNA, 2042 bp, Homo sapiens
cttcaaagttgcccttctctgttctgactcctgggacttctggtcctgggcacactttttgcaggcaacaaaatgtgcctgggagtgatggattttaatgtgctccagagtcctttcagaaggtggtcatttcccttggccgggcgcggtggctcacacctgtaatcccagcactttgggaggccaaggcaggcggatcacctgaggttaggagttcgagaccaccctggccaacatgcgaaaccccatctctacgaaaaatagaaatattagccgggcatggtgtcaggcacctgtaatcccagctacttgggaggctgaggcaggagaattgcttgaactcgggaggcagaggttgcagtgagccaagatcatgccatcccactctagcttgggcaatagagcaaggctccgtctcaagaaaagaaggtcatttcccaagactagcatagggagtatccatttaaaatacattcatcttcctcccatttccgtgctattaatcacttgttagagcaacatgacatgcccagcatcccacttcccgaaaatgtctactccttctactctgagctcttgttgcctagacctcagaaaacaccaattcaccacagtagaaccgggagcagggatagctcagcttctctgaatagcacactttgctcaggtcttaacttgagggcctctccggtactaacatcctgcgatagcttgtcccatgagcacagaagagcctcagtagagtcaagtcctgctgcagctgccccaccccaagtttctatcatttcctctttaaacaaaaaatatgttatcctacacattagtgtcaatccaatggttgtctcttatctgtctaaatagcaaaatcatgaaaatcagctgttttatttgcataggacaactaacctgtctgtgtaactttgtttttattttaactcttactagaaaatctaatcttaaaacatttgaattctaaacatgtaaaatgtgacagcctgcaattttgtagacagtgaagtaatggctgctatttataaatggaacatctatcaaaataagtaactgtttataaaattcagtttttgtagggttttccaaggaaaaatcaccttggttgaatgtttctcactcattaaactttgcagaagtgattcatattcagtactgtttttaatcactttttaaaatataaggaccgaatgcaaggaaaccaaagtttattaataatttttatataactaaaataaaatagatgtggagggatctgtgatcatataaaaagggagggttactgaaagaattttagcaatatattgattcaggaaaaggagctgttttataaatgatcattcactgttcctatggttctatgtatctttcaaaccgatacctttactatttaaagagcgtaaatagtgaaagtaagatggtcatacttactgactttatctatttaagtttgatggagataaactatatcttggctagtggctactgtgtctgtgaatgtaaccagtacttctttaagctctattcagtagggttccagccactgcttttttgttgtttctagccactgttttttttttcttgtttccttataaaacaggtaataaccaatcattttgtgtttgtatttccattcctttttatttctgcctttgtgtagactgatgattaagtaggcaaactacttctactttcaaagagccccaagggcttaatgaccccatttgtaactgagaaatgattcttgttttagtaatcattctataaatgatactgctggattgattgccgtgggttgatagctggaggaattgttttggacaatactaacatgtgaatttatgtcttagttttatttgcagtcttgctaagtaaaatgagtctttgtatctacttttttattaaagtgaaatttagcaatagttaatattaggtgacataaataaaacatcccagactagtgagttaagtacaagatctctctaaaaataaacagatgaaaatctatccccattatcgatacagaatttgtg

SEQ ID NO: 311201 - DNA, 1619 bp, Homo sapiens
cttcaaagttgcccttctctgttctgactcctgggacttctggtcctgggcacactttttgcaggcaacaaaatgtgcctgggagtgatggattttaatgtgctccagagtcctttcagaaggtggtcatttcccttggccgggcgcggtggctcacacctgtaatcccagcactttgggaggccaaggcaggcggatcacctgaggttaggagttcgagaccaccctggccaacatgcgaaaccccatctctacgaaaaatagaaatattagccgggcatggtgtcaggcacctgtaatcccagctacttgggaggctgaggcaggagaattgcttgaactcgggaggcagaggttgcagtgagccaagatcatgccatcccactctagcttgggcaatagagcaaggctccgtctcaagaaaagaaggtcatttcccaagactagcatagggagtatccatttaaaatacattcatcttcctcccatttccgtgctattaatcacttgttagagcaacatgacatgcccagcatcccacttcccgaaaatgtctactccttctactctgagctcttgttgcctagacctcagaaaacaccaattcaccacagtagaaccgggagcagggatagctcagcttctctgaatagcacactttgctcaggtcttaacttgagggcctctccggtactaacatcctgcgatagcttgtcccatgagcacagaagagcctcagtagagtcaagtcctgctgcagctgccccaccccaagtttctatcatttcctctttaaacaaaaaatatgttatcctacacattagtgtcaatccaatggttgtctcttatctgtctaaatagcaaaatcatgaaaatcagctgttttatttgcataggacaactaacctgtctgtgtaactttgtttttattttaactcttactagaaaatctaatcttaaaacatttgaattctaaacatgtaaaatgtgacagcctgcaattttgtagacagtgaagtaatggctgctatttataaatggaacatctatcaaaataagtaactgtttataaaattcagtttttgtagggttttccaaggaaaaatcaccttggttgaatgtttctcactcattaaactttgcagaagtgattcatattcagtactgtttttaatcactttttaaaatataaggaccgaatgcaaggaaaccaaagtttattaataatttttatataactaaaataaaatagatgtggagggatctgtgatcatataaaaagggagggttactgaaagaattttagcaatatattgattcaggaaaaggagctgttttataaatgatcattcactgttcctatggttctatgtatctttcaaaccgatacctttactatttaaagagcgtaaatagtgaaagtaagatggtcatacttactgactttatctatttaagtttgatggagataaactatatcttggctagtggctactgtgtctgtgaatgtaaccagtacttctttaagctctattcagtagggttccagccactgcttttttgttgtttctagccactgttttttttttcttgtttccttataaaacaggtaataacca

SEQ ID NO: 311202 - DNA, 1822 bp, Homo sapiens
ggttttcttgctcgtgggctcggacgagtacggagcgcctgcagggacagcctggataaaggctcactgatggctcagttgggagcagttgtggctgtggcttccagtttcttttgtgcatctctcttctcagctgtgcacaagatagaagagggacatattggggtatattacagcaatagagcaaggctccgtctcaagaaaagaaggtcatttcccaagactagcatagggagtatccatttaaaatacattcatcttcctcccatttccgtgctattaatcacttgttagagcaacatgacatgcccagcatcccacttcccgaaaatgtctactccttctactctgagctcttgttgcctagacctcagaaaacaccaattcaccacagtagaaccgggagcagggatagctcagcttctctgaatagcacactttgctcaggtcttaacttgagggcctctccggtactaacatcctgcgatagcttgtcccatgagcacagaagagcctcagtagagtcaagtcctgctgcagctgccccaccccaagtttctatcatttcctctttaaacaaaaaatatgttatcctacacattagtgtcaatccaatggttgtctcttatctgtctaaatagcaaaatcatgaaaatcagctgttttatttgcataggacaactaacctgtctgtgtaactttgtttttattttaactcttactagaaaatctaatcttaaaacatttgaattctaaacatgtaaaatgtgacagcctgcaattttgtagacagtgaagtaatggctgctatttataaatggaacatctatcaaaataagtaactgtttataaaattcagtttttgtagggttttccaaggaaaaatcaccttggttgaatgtttctcactcattaaactttgcagaagtgattcatattcagtactgtttttaatcactttttaaaatataaggaccgaatgcaaggaaaccaaagtttattaataatttttatataactaaaataaaatagatgtggagggatctgtgatcatataaaaagggagggttactgaaagaattttagcaatatattgattcaggaaaaggagctgttttataaatgatcattcactgttcctatggttctatgtatctttcaaaccgatacctttactatttaaagagcgtaaatagtgaaagtaagatggtcatacttactgactttatctatttaagtttgatggagataaactatatcttggctagtggctactgtgtctgtgaatgtaaccagtacttctttaagctctattcagtagggttccagccactgcttttttgttgtttctagccactgttttttttttcttgtttccttataaaacaggtaataaccaatcattttgtgtttgtatttccattcctttttatttctgcctttgtgtagactgatgattaagtaggcaaactacttctactttcaaagagccccaagggcttaatgaccccatttgtaactgagaaatgattcttgttttagtaatcattctataaatgatactgctggattgattgccgtgggttgatagctggaggaattgttttggacaatactaacatgtgaatttatgtcttagttttatttgcagtcttgctaagtaaaatgagtctttgtatctacttttttattaaagtgaaatttagcaatagttaatattaggtgacataaataaaacatcccagactagtgagttaagtacaagatctctctaaaaataaacagatgaaaatctatccccattatcgatacagaatttgtg

SEQ ID NO: 311203 - DNA, 1914 bp, Homo sapiens
gggatagctcagcttctctgaatagcacactttgctcaggtcttaacttggagggcctctaccggtactaacatcctgcgatagtttgtcccatggcactggcaggaaaggacgcaactgcagatcggtagccggaggccgccacggataaaggctcactgatggctcagttgggagcagttgtggctgtggcttccagtttcttttgtgcatctctcttctcagctgtgcacaagatagaagagggacatattggggtatattacagcaatagagcaaggctccgtctcaagaaaagaaggtcatttcccaagactagcatagggagtatccatttaaaatacattcatcttcctcccatttccgtgctattaatcacttgttagagcaacatgacatgcccagcatcccacttcccgaaaatgtctactccttctactctgagctcttgttgcctagacctcagaaaacaccaattcaccacagtagaaccgggagcagggatagctcagcttctctgaatagcacactttgctcaggtcttaacttgagggcctctccggtactaacatcctgcgatagcttgtcccatgagcacagaagagcctcagtagagtcaagtcctgctgcagctgccccaccccaagtttctatcatttcctctttaaacaaaaaatatgttatcctacacattagtgtcaatccaatggttgtctcttatctgtctaaatagcaaaatcatgaaaatcagctgttttatttgcataggacaactaacctgtctgtgtaactttgtttttattttaactcttactagaaaatctaatcttaaaacatttgaattctaaacatgtaaaatgtgacagcctgcaattttgtagacagtgaagtaatggctgctatttataaatggaacatctatcaaaataagtaactgtttataaaattcagtttttgtagggttttccaaggaaaaatcaccttggttgaatgtttctcactcattaaactttgcagaagtgattcatattcagtactgtttttaatcactttttaaaatataaggaccgaatgcaaggaaaccaaagtttattaataatttttatataactaaaataaaatagatgtggagggatctgtgatcatataaaaagggagggttactgaaagaattttagcaatatattgattcaggaaaaggagctgttttataaatgatcattcactgttcctatggttctatgtatctttcaaaccgatacctttactatttaaagagcgtaaatagtgaaagtaagatggtcatacttactgactttatctatttaagtttgatggagataaactatatcttggctagtggctactgtgtctgtgaatgtaaccagtacttctttaagctctattcagtagggttccagccactgcttttttgttgtttctagccactgttttttttttcttgtttccttataaaacaggtaataaccaatcattttgtgtttgtatttccattcctttttatttctgcctttgtgtagactgatgattaagtaggcaaactacttctactttcaaagagccccaagggcttaatgaccccatttgtaactgagaaatgattcttgttttagtaatcattctataaatgatactgctggattgattgccgtgggttgatagctggaggaattgttttggacaatactaacatgtgaatttatgtcttagttttatttgcagtcttgctaagtaaaatgagtctttgtatctacttttttattaaagtgaaatttagcaatagttaatattaggtgacataaataaaacatcccagactagtgagttaagtacaagatctctctaaaaataaacagatgaaaatctatccccattatcgatacagaatttgtg

SEQ ID NO: 311204 - DNA, 1151 bp, Homo sapiens
cttcaaagttgcccttctctgttctgactcctgggacttctggtcctgggcacactttttgcaggcaacaaaatgtgcctgggagtgatggattttaatgtgctccagagtcctttcagaaggtggtcatttcccttggccgggcgcggtggctcacacctgtaatcccagcactttgggaggccaaggcaggcggatcacctgaggttaggagttcgagaccaccctggccaacatgcgaaaccccatctctacgaaaaatagaaatattagccgggcatggtgtcaggcacctgtaatcccagctacttgggaggctgaggcaggagaattgcttgaactcgggaggcagaggttgcagtgagccaagatcatgccatcccactctagcttgggcaatagagcaaggctccgtctcaagaaaagaaggtcatttcccaagactagcatagggagtatccatttaaaatacattcatcttcctcccatttccgtgctattaatcacttgttagagcaacatgacatgcccagcatcccacttcccgaaaatgtctactccttctactctgagctcttgttgcctagacctcagaaaacaccaattcaccacagtagaaccgggagcagggatagctcagcttctctgaatagcacactttgctcaggtcttaacttgagggcctctccggtactaacatcctgcgatagcttgtcccatgagcacagaagagcctcagtagagtcaagtcctgctgcagctgccccaccccaagtttctatcatttcctctttaaacaaaaaatatgttatcctacacattagtgtcaatccaatggttgtctcttatctgtctaaatagcaaaatcatgaaaatcagctgttttatttgcataggacaactaacctgtctgtgtaactttgtttttattttaactcttactagaaaatctaatcttaaaacatttgaattctaaacatgtaaaatgtgacagcctgcaattttgtagacagtgaagtaatggctgctatttataaatggaacatctatcaaaataagtaactgtttataaaattcagtttttgtagggttttccaaggaaaaatcaccttggttgaatgtttctcactcattaaactttgcagaagtga

SEQ ID NO: 311205 - DNA, 1988 bp, Homo sapiens
cttcaaagttgcccttctctgttctgactcctgggacttctggtcctgggcacactttttgcaggcaacaaaatgtgcctgggagtgatggattttaatgtgctccagagtcctttcagaaggtggtcatttcccttggccgggcgcggtggctcacacctgtaatcccagcactttgggaggccaaggcaggcggatcacctgaggttaggagttcgagaccaccctggccaacatgcgaaaccccatctctacgaaaaatagaaatattagccgggcatggtgtcaggcacctgtaatcccagctacttgggaggctgaggcaggagaattgcttgaactcgggaggcagaggttgcagtgagccaagatcatgccatcccactctagcttgggcaatagagcaaggctccgtctcaagaaaagaaggtcatttcccaagactagcatagggagtatccatttaaaatacattcatcttcctcccatttccgtgctattaatcacttgttagagcaacatgacatgcccagcatcccacttcccgaaaatgtctactccttctactctgagctcttgttgcctagacctctgaatagcacactttgctcaggtcttaacttgagggcctctccggtactaacatcctgcgatagcttgtcccatgagcacagaagagcctcagtagagtcaagtcctgctgcagctgccccaccccaagtttctatcatttcctctttaaacaaaaaatatgttatcctacacattagtgtcaatccaatggttgtctcttatctgtctaaatagcaaaatcatgaaaatcagctgttttatttgcataggacaactaacctgtctgtgtaactttgtttttattttaactcttactagaaaatctaatcttaaaacatttgaattctaaacatgtaaaatgtgacagcctgcaattttgtagacagtgaagtaatggctgctatttataaatggaacatctatcaaaataagtaactgtttataaaattcagtttttgtagggttttccaaggaaaaatcaccttggttgaatgtttctcactcattaaactttgcagaagtgattcatattcagtactgtttttaatcactttttaaaatataaggaccgaatgcaaggaaaccaaagtttattaataatttttatataactaaaataaaatagatgtggagggatctgtgatcatataaaaagggagggttactgaaagaattttagcaatatattgattcaggaaaaggagctgttttataaatgatcattcactgttcctatggttctatgtatctttcaaaccgatacctttactatttaaagagcgtaaatagtgaaagtaagatggtcatacttactgactttatctatttaagtttgatggagataaactatatcttggctagtggctactgtgtctgtgaatgtaaccagtacttctttaagctctattcagtagggttccagccactgcttttttgttgtttctagccactgttttttttttcttgtttccttataaaacaggtaataaccaatcattttgtgtttgtatttccattcctttttatttctgcctttgtgtagactgatgattaagtaggcaaactacttctactttcaaagagccccaagggcttaatgaccccatttgtaactgagaaatgattcttgttttagtaatcattctataaatgatactgctggattgattgccgtgggttgatagctggaggaattgttttggacaatactaacatgtgaatttatgtcttagttttatttgcagtcttgctaagtaaaatgagtctttgtatctacttttttattaaagtgaaatttagcaatagttaatattaggtgacataaataaaacatcccagactagtgagttaagtacaagatctctctaaaaataaacagatgaaaatctatccccattatcgatacagaatttgtg

SEQ ID NO: 311206 - DNA, 2238 bp, Homo sapiens
ggttttcttgctcgtgggctcggacgagtacggagcgcctgcagggacagcctggtacgcggcccccgccccttcgtgcgcgcgctgggcctagctgccgctcagggtcggggctgacccgtcactttcgggaacctcagtcccagcagcttctctccctcagccggcccgctcctggagagagacagaaacccttttctgtcgcgtcctctccttgcgagccgcagggggaccgagcggaggctattggagccgcagccccagaccagggcgcttgaccctctctcggaacggggcggggaaggggcgcgagtgacctcggggagggaagggcactggcaggaaaggacgcaactgcagatcggtagccggaggccgccacggataaaggctcactgatggctcagttgggagcagttgtggctgtggcttccagtttcttttgtgcatctctcttctcagctgtgcacaagatagaagagggacatattggggtatattacagaggcggtgccctgctgacttcgaccagcggccctggtttccatctcatgctccctttcatcacatcatataagtctgtgcagaccacactccagacagatgaggtgaagaatgtaccttgtgggactagtggtggtgtgatgatctactttgacagaattgaagtggtgaacttcctggtcccgaacgcagtgtatgatatagtgaagaactatactgctgactatgacaaggccctcatcttcaacaagatccaccacgaactgaaccagttctgcagtgtgcacacgcttcaagaggtctacattgagctgtttgatcagattgatgaaaatctcaaactggctttgcaacaggacctgacctccatggcccctgggctggtcattcaagctgtgcgggtaacaaagcccaacataccagaggcaatccgcagaaactacgagttgatggaaagtgagaagacaaagcttctcattgccgcccagaaacagaaggtggtggaaaaggaagcagagacagagcggaagaaggcgctcattgaggcagaaaaagtggcccaggtggctgagatcacctacgggcagaaggtgatggagaaggagactgagaagaagatttcagaaattgaagatgctgcatttctggcccgggagaaggcaaaggcagatgctgagtgctacactgctatgaaaatagccgaagccaataagctgaagctaacccctgaatatctgcagctgatgaagtacaaggccattgcttccaacagcaagatttactttggcaaagacattcctaacatgttcatggactctgcgggcagtgtgagcaagcagtttgaggggctagctgacaagctaagctttggcttagaagatgaacccttggagacggccactaaggagaattgaaaaaaacttgatatgactgcaaatgatacttaagcagatctttattttttaagatgaatcagaatgttcctccctccccgactaccttctctgactgtcttccagttactgtggtgaaaaagaagaaatgaacttaaatccactccctttctagggaaaggagggtggggactgatgatggggggttttatttcaggtaagcagtttatatgacttccaataagatttgtaaatcatgggcttgacctttgacctctagacactaattttatcctttgaggctggcttaattagggatgctgtcattaaggagagggagaaatgtagagtgttacctccaactcatttgatttcccttacttgggaaaatgcagtccagtgttctcacctctgcctccaaggtaggagatgtctgtgggtgaggctcagcaactgagcaaatatgtgcctgtgagtttgccagtagagctgtgaagaaacagctgcagagaacatttgaccttcctggcattcttgtctgcatgtgtgtgagttattttagaggtgtgctttcttgagccctcataaggaagtactggtgctaggttttgcaagattttgtatacactttgctccttgccctagggctcagagtggtggtttctgactacatttctagagtcagagcttgatcaccacaactcaattatttcggcatcttttcacctatgctgtgatttgttttttttttttcttctcaaaaattctgttcattggttccactcagcatcaagaagacagggacaaacaactcaagtgtcttaacagctgctggagtggg

SEQ ID NO: 311207 - DNA, 2349 bp, Homo sapiens
ggttttcttgctcgtgggctcggacgagtacggagcgcctgcagggacagcctggataaaggctcactgatggctcagttgggagcagttgtggctgtggcttccagtttcttttgtgcatctctcttctcagctgtgcacaagatagaagagggacatattggggtatattacagaggcggtgccctgctgacttcgaccagcggccctggtttccatctcatgctccctttcatcacatcatataagtctgtgcagaccacactccagacagatgaggtgaagaatgtaccttgtgggactagtggtggtgtgatgatctactttgacagaattgaagtggtgaacttcctggtcccgaacgcagtgtatgatatagtgaagaactatactgctgactatgacaaggccctcatcttcaacaagatccaccacgaactgaaccagttctgcagtgtgcacacgcttcaagaggtctacattgagctgtttggtaagaaagtctctcctgagcatgccgtgcttaagcagggttcctggaaccccgcgtctctccactgcctaaagcctggctgcctgcagggtgtgatggtcacttatggacaggaaatgttaaagaatcttgtgctcaggagctggtcacaaaggagttcatggagaatgctgatagctatgcaacaagatccttagagggctggagctttgggcacagggaccatagtggagtagagtattcacttctggcctcaatcagaggctggagtggaaatgtgttcccactgttcctaaactatcattctataatgaagacaaggtccattctagaagaaccttagagattgtccagaccagcatcctcattttaagctgagggtactgtgacccaaagcaagaaagtcacagagccagatgccaattagtagtggggctgaaacaggagccttcctctcctggctcttcagcattcttctcaccatgcaacactgaatggagggcccccaggaatgggtgatgaaaaagacatgattcatagttaattctagaagtgagatgagaaccatagctccttccagttctcagaacctttgtgattattatttttttactctgtacctgtagcaacgaatagaaaaacactttaaacaaaaagattccacgtgcctaagtagatatgttttgtcctttttacctttttcaaagtaaaggcaacctgacttagcagcaaaggaaggacacagttgggtaactgttataacttgtttgcagtcaagtattctgtttaaactcactgccagaaattctctaatagccaatgccaaaagtaaatgaatttttaaccaatagtataactgttcttgacactaggactggaaaatgatttttcccaggaatcttcataaaagggaccctgagcaagaacatttttcatagcagacaggaggactcatccacatcgccagcaatcataattaagcaaaccgccttttgcaccatttaagatttaggaaatcatccaaattacttttaatgtttctgcagtagaaaatgaatctaaattcattttatagggtttgtagtcttttatctgttttggattcactgtgcttttaagaaaaagttggtaaatttgccgttgatttttctttttaacctcaaactaatagaattttataaaatattaattttctctagccattgtcttaggacttgtgacattacatgaacatttcaaagcactgaaaaaagacaaaggatccctaatgtccctgaagaggaaattaaaatacaaagttgtttttcattagcaaacttcttactttcttacagctaaacttggtagcttagtgaagtacagctgcttgtatggaggagctggggaaatatatttgctttgaaacttttttatttttacatctcagtcttgctagcaagcactacttggcttagaatctgtcatatccataaaggaggagctcatgtctctagtcctggcccttcaactcagaaggttcttctatactttccttctctcaggactcttatagcccagactttaaacatgaagctgcataattttcatcacttcttactctgccgcatcctctttgcccatgttattaaagtattatctaatactttgaagtttacctgaagaacctctttgtgtgtacttagtaatacaactttttttcctgtcccaacaccttttaatacagttgaatggataaaaacatggatacaaacacatggatatagttatcactgaagcagtgtgacataaaataatacctatgtatacaacactcctctgtaaatagcaaatgtaaagtaaaagatacacaacagaaa

SEQ ID NO: 311208 - DNA, 2678 bp, Homo sapiens
ggttttcttgctcgtgggctcggacgagtacggagcgcctgcagggacagcctggtacgcggcccccgccccttcgtgcgcgcgctgggcctagctgccgctcagggtcggggctgacccgtcactttcgggaacctcagtcccagcagcttctctccctcagccggcccgctcctggagagagacagaaacccttttctgtcgcgtcctctccttgcgagccgcagggggaccgagcggaggctattggagccgcagccccagaccagggcgcttgaccctctctcggaacggggcggggaaggggcgcgagtgacctcggggagggaagggcactggcaggaaaggacgcaactgcagatcggtagccggaggccgccacggataaaggctcactgatggctcagttgggagcagttgtggctgtggcttccagtttcttttgtgcatctctcttctcagctgtgcacaagatagaagagggacatattggggtatattacagaggcggtgccctgctgacttcgaccagcggccctggtttccatctcatgctccctttcatcacatcatataagtctgtgcagaccacactccagacagatgaggtgaagaatgtaccttgtgggactagtggtggtgtgatgatctactttgacagaattgaagtggtgaacttcctggtcccgaacgcagtgtatgatatagtgaagaactatactgctgactatgacaaggccctcatcttcaacaagatccaccacgaactgaaccagttctgcagtgtgcacacgcttcaagaggtctacattgagctgtttggtaagaaagtctctcctgagcatgccgtgcttaagcagggttcctggaaccccgcgtctctccactgcctaaagcctggctgcctgcagggtgtgatggtcacttatggacaggaaatgttaaagaatcttgtgctcaggagctggtcacaaaggagttcatggagaatgctgatagctatgcaacaagatccttagagggctggagctttgggcacagggaccatagtggagtagagtattcacttctggcctcaatcagaggctggagtggaaatgtgttcccactgttcctaaactatcattctataatgaagacaaggtccattctagaagaaccttagagattgtccagaccagcatcctcattttaagctgagggtactgtgacccaaagcaagaaagtcacagagccagatgccaattagtagtggggctgaaacaggagccttcctctcctggctcttcagcattcttctcaccatgcaacactgaatggagggcccccaggaatgggtgatgaaaaagacatgattcatagttaattctagaagtgagatgagaaccatagctccttccagttctcagaacctttgtgattattatttttttactctgtacctgtagcaacgaatagaaaaacactttaaacaaaaagattccacgtgcctaagtagatatgttttgtcctttttacctttttcaaagtaaaggcaacctgacttagcagcaaaggaaggacacagttgggtaactgttataacttgtttgcagtcaagtattctgtttaaactcactgccagaaattctctaatagccaatgccaaaagtaaatgaatttttaaccaatagtataactgttcttgacactaggactggaaaatgatttttcccaggaatcttcataaaagggaccctgagcaagaacatttttcatagcagacaggaggactcatccacatcgccagcaatcataattaagcaaaccgccttttgcaccatttaagatttaggaaatcatccaaattacttttaatgtttctgcagtagaaaatgaatctaaattcattttatagggtttgtagtcttttatctgttttggattcactgtgcttttaagaaaaagttggtaaatttgccgttgatttttctttttaacctcaaactaatagaattttataaaatattaattttctctagccattgtcttaggacttgtgacattacatgaacatttcaaagcactgaaaaaagacaaaggatccctaatgtccctgaagaggaaattaaaatacaaagttgtttttcattagcaaacttcttactttcttacagctaaacttggtagcttagtgaagtacagctgcttgtatggaggagctggggaaatatatttgctttgaaacttttttatttttacatctcagtcttgctagcaagcactacttggcttagaatctgtcatatccataaaggaggagctcatgtctctagtcctggcccttcaactcagaaggttcttctatactttccttctctcaggactcttatagcccagactttaaacatgaagctgcataattttcatcacttcttactctgccgcatcctctttgcccatgttattaaagtattatctaatactttgaagtttacctgaagaacctctttgtgtgtacttagtaatacaactttttttcctgtcccaacaccttttaatacagttgaatggataaaaacatggatacaaacacatggatatagttatcactgaagcagtgtgacataaaataatacctatgtatacaacactcctctgtaaatagcaaatgtaaagtaaaagatacacaacagaaa

SEQ ID NO: 311209 - DNA, 2302 bp, Homo sapiens
ggttttcttgctcgtgggctcggacgagtacggagcgcctgcagggacagcctggataaaggctcactgatggctcagttgggagcagttgtggctgtggcttccagtttcttttgtgcatctctcttctcagctgtgcacaagatagaagagggacatattggggtatattacagaggcggtgccctgctgacttcgaccagcggccctggtttccatctcatgctccctttcatcacatcatataagtctgtgcagtggtggtgtgatgatctactttgacagaattgaagtggtgaacttcctggtcccgaacgcagtgtatgatatagtgaagaactatactgctgactatgacaaggccctcatcttcaacaagatccaccacgaactgaaccagttctgcagtgtgcacacgcttcaagaggtctacattgagctgtttggtaagaaagtctctcctgagcatgccgtgcttaagcagggttcctggaaccccgcgtctctccactgcctaaagcctggctgcctgcagggtgtgatggtcacttatggacaggaaatgttaaagaatcttgtgctcaggagctggtcacaaaggagttcatggagaatgctgatagctatgcaacaagatccttagagggctggagctttgggcacagggaccatagtggagtagagtattcacttctggcctcaatcagaggctggagtggaaatgtgttcccactgttcctaaactatcattctataatgaagacaaggtccattctagaagaaccttagagattgtccagaccagcatcctcattttaagctgagggtactgtgacccaaagcaagaaagtcacagagccagatgccaattagtagtggggctgaaacaggagccttcctctcctggctcttcagcattcttctcaccatgcaacactgaatggagggcccccaggaatgggtgatgaaaaagacatgattcatagttaattctagaagtgagatgagaaccatagctccttccagttctcagaacctttgtgattattatttttttactctgtacctgtagcaacgaatagaaaaacactttaaacaaaaagattccacgtgcctaagtagatatgttttgtcctttttacctttttcaaagtaaaggcaacctgacttagcagcaaaggaaggacacagttgggtaactgttataacttgtttgcagtcaagtattctgtttaaactcactgccagaaattctctaatagccaatgccaaaagtaaatgaatttttaaccaatagtataactgttcttgacactaggactggaaaatgatttttcccaggaatcttcataaaagggaccctgagcaagaacatttttcatagcagacaggaggactcatccacatcgccagcaatcataattaagcaaaccgccttttgcaccatttaagatttaggaaatcatccaaattacttttaatgtttctgcagtagaaaatgaatctaaattcattttatagggtttgtagtcttttatctgttttggattcactgtgcttttaagaaaaagttggtaaatttgccgttgatttttctttttaacctcaaactaatagaattttataaaatattaattttctctagccattgtcttaggacttgtgacattacatgaacatttcaaagcactgaaaaaagacaaaggatccctaatgtccctgaagaggaaattaaaatacaaagttgtttttcattagcaaacttcttactttcttacagctaaacttggtagcttagtgaagtacagctgcttgtatggaggagctggggaaatatatttgctttgaaacttttttatttttacatctcagtcttgctagcaagcactacttggcttagaatctgtcatatccataaaggaggagctcatgtctctagtcctggcccttcaactcagaaggttcttctatactttccttctctcaggactcttatagcccagactttaaacatgaagctgcataattttcatcacttcttactctgccgcatcctctttgcccatgttattaaagtattatctaatactttgaagtttacctgaagaacctctttgtgtgtacttagtaatacaactttttttcctgtcccaacaccttttaatacagttgaatggataaaaacatggatacaaacacatggatatagttatcactgaagcagtgtgacataaaataatacctatgtatacaacactcctctgtaaatagcaaatgtaaagtaaaagatacacaacagaaa

SEQ ID NO: 311210 - DNA, 743 bp, Homo sapiens
ggttttcttgctcgtgggctcggacgagtacggagcgcctgcagggacagcctggtacgcggcccccgccccttcgtgcgcgcgctgggcctagctgccgctcagggtcggggctgacccgtcactttcgggaacctcagtcccagcagcttctctccctcagccggcccgctcctggagagagacagaaacccttttctgtcgcgtcctctccttgcgagccgcagggggaccgagcggaggctattggagccgcagccccagaccagggcgcttgaccctctctcggaacggggcggggaaggggcgcgagtgacctcggggagggaagggcactggcaggaaaggacgcaactgcagatcggtagccggaggccgccacggataaaggctcactgatggctcagttgggagcagttgtggctgtggcttccagtttcttttgtgcatctctcttctcagctgtgcacaagatagaagagggacatattggggtatattacagaggcggtgccctgctgacttcgaccagcggccctggtttccatctcatgctccctttcatcacatcatataagtctgtgcaggtatgtgttatagggtttggtactctccccggtttcaagcatccactgggggccttcgaacataaagcggtgcctaacataaatagaagaggtagaagcaagcacaagtcttaagatgcccaatccagtgtcatcttcactaaaccattattactc

SEQ ID NO: 311211 - DNA, 273 bp, Homo sapiens
tcacactgatggaaggggactgtgctcactggcatatcccactctgcccttgtgtgcactcacagctgccctctgggggctctccagacaagctggcccaccaggacactcagctcgggtgaaaggtgaaattagtcaaactctgaaatgccagaaccgtaatcctcactatcatttattcagaggcagaaaaagtggcccaggtggctgagatcacctacgggcagaaggtgatggagaaggagactgagaagaagatttcagaaattgaag

SEQ ID NO: 311212 - DNA, 2548 bp, Homo sapiens
gggatagctcagcttctctgaatagcacactttgctcaggtcttaacttggagggcctctaccggtactaacatcctgcgatagtttgtcccatggcactggcaggaaaggacgcaactgcagatcggtagccggaggccgccacggtaaaataagcgcctcgcagatgtccgcgccccggttacgttagacctgggaggcagaatccacgccctgcgctcacgggcccacgcacgcacagctgaactttgcagataaaggctcactgatggctcagttgggagcagttgtggctgtggcttccagtttcttttgtgcatctctcttctcagctgtgcacaagatagaagagggacatattggggtatattacagaggcggtgccctgctgacttcgaccagcggccctggtttccatctcatgctccctttcatcacatcatataagtctgtgcagaccacactccagacagatgaggtgaagaatgtaccttgtgggactagtggtggtgtgatgatctactttgacagaattgaagtggtgaacttcctggtcccgaacgcagtgtatgatatagtgaagaactatactgctgactatgacaaggccctcatcttcaacaagatccaccacgaactgaaccagttctgcagtgtgcacacgcttcaagaggtctacattgagctgtttggtaagaaagtctctcctgagcatgccgtgcttaagcagggttcctggaaccccgcgtctctccactgcctaaagcctggctgcctgcagggtgtgatggtcacttatggacaggaaatgttaaagaatcttgtgctcaggagctggtcacaaaggagttcatggagaatgctgatagctatgcaacaagatccttagagggctggagctttgggcacagggaccatagtggagtagagtattcacttctggcctcaatcagaggctggagtggaaatgtgttcccactgttcctaaactatcattctataatgaagacaaggtccattctagaagaaccttagagattgtccagaccagcatcctcattttaagctgagggtactgtgacccaaagcaagaaagtcacagagccagatgccaattagtagtggggctgaaacaggagccttcctctcctggctcttcagcattcttctcaccatgcaacactgaatggagggcccccaggaatgggtgatgaaaaagacatgattcatagttaattctagaagtgagatgagaaccatagctccttccagttctcagaacctttgtgattattatttttttactctgtacctgtagcaacgaatagaaaaacactttaaacaaaaagattccacgtgcctaagtagatatgttttgtcctttttacctttttcaaagtaaaggcaacctgacttagcagcaaaggaaggacacagttgggtaactgttataacttgtttgcagtcaagtattctgtttaaactcactgccagaaattctctaatagccaatgccaaaagtaaatgaatttttaaccaatagtataactgttcttgacactaggactggaaaatgatttttcccaggaatcttcataaaagggaccctgagcaagaacatttttcatagcagacaggaggactcatccacatcgccagcaatcataattaagcaaaccgccttttgcaccatttaagatttaggaaatcatccaaattacttttaatgtttctgcagtagaaaatgaatctaaattcattttatagggtttgtagtcttttatctgttttggattcactgtgcttttaagaaaaagttggtaaatttgccgttgatttttctttttaacctcaaactaatagaattttataaaatattaattttctctagccattgtcttaggacttgtgacattacatgaacatttcaaagcactgaaaaaagacaaaggatccctaatgtccctgaagaggaaattaaaatacaaagttgtttttcattagcaaacttcttactttcttacagctaaacttggtagcttagtgaagtacagctgcttgtatggaggagctggggaaatatatttgctttgaaacttttttatttttacatctcagtcttgctagcaagcactacttggcttagaatctgtcatatccataaaggaggagctcatgtctctagtcctggcccttcaactcagaaggttcttctatactttccttctctcaggactcttatagcccagactttaaacatgaagctgcataattttcatcacttcttactctgccgcatcctctttgcccatgttattaaagtattatctaatactttgaagtttacctgaagaacctctttgtgtgtacttagtaatacaactttttttcctgtcccaacaccttttaatacagttgaatggataaaaacatggatacaaacacatggatatagttatcactgaagcagtgtgacataaaataatacctatgtatacaacactcctctgtaaatagcaaatgtaaagtaaaagatacacaacagaaa

SEQ ID NO: 311213 - DNA, 3010 bp, Homo sapiens
attcggaagaaggcggagcctacctctcatcaggaccagtctgactgcacctgcatccttagctcagagcatccccggagcatcttaagagctgagcgcagctgacaactaggggccggaccgtcgcaggaggcgtccgctggataccttcccccttccctgacctagagctctacagctgctgcctcggtactgaccgagggttcccagagctgtctcaccattgcaaaaacgttatagcaacagcctctgattacgacatggctgagatcaccaatatccgacctagctttgatgtgtcaccggtggtggccggcctcatcggggcctctgtgctggtggtgtgtgtctcggtgaccgtctttgtctggtcatgctgccaccagcaggcagagaagaagcacaagaacccaccatacaagtttattcacatgctcaaaggcatcagcatatacccagagaccctcagcaacaagaagaaaatcatcaaagtgcggagagacaaagatggtcctgggagggaaggtggacgtaggaacctgttggtggacgcagcagaggctggcctgctaagccgagacaaagatcccagggggcctagctctggatcttgtatagaccaattacccatcaaaatggactatggggaagaactaaggagccctattacaagcctgacccctggggagagcaaaaccacctctccatcatctccagaggaggatgtcatgctaggatccctcaccttctcagtggactataacttcccgaaaaaagccctggtggtgacaatccaggaggcccacgggctgccagtgatggatgaccagacccagggatctgacccctacatcaaaatgaccatccttcctgacaaacggcatcgggtgaagaccagagtgctgcggaagaccctggaccctgtgtttgacgagaccttcaccttctatggcatcccctacagccagctgcaggacctggtgctgcacttccttgtcctcagctttgaccgcttctctcgggatgatgtcattggcgaggtcatggtgccactggcaggggtggaccccagcacaggcaaggtacaactgaccagggacatcatcaaaaggaatatccagaagtgcatcagcagaggggagctccaggtgtctctgtcatatcagcctgtggcacagagaatgacagtggtggtcctcaaagccagacacttgccgaagatggatatcaccggtctctcaggtaatccttatgtcaaggtgaacgtctactacggcagaaagcgcattgccaagaagaaaacccatgtgaagaagtgcactttgaaccccatcttcaatgaatctttcatctacgacatccccactgacctcctgcctgatatcagcatcgagttcctcgttatcgacttcgatcgcaccaccaagaatgaggtggtggggaggctgatcctgggggcacacagtgtcacagccagtggtgctgaacactggagagaggtctgcgagagcccccgcaagcctgtggccaagtggcacagtctgagcgagtactaatcctgttcttctctcctctaatccccgggggccaagctggggagggatgtggaggggaaaaagatgacagagaagtggactccaaacctcattttagttgtagaagaaaatttcttacaaaacaaattccacaaagaacaccctatatgaccacagctgcagatcagttcttagcaatgatgtttttttttctgctttgcaaggcgctagaatcttttattttactttattttttttgaggtggagtttcgctcttgttgcccgggctggagtgcaatggtgagatctcaactcactgcaacctctgccctccaggttcaagtgattctcctccctcagcctcccaagtagctgggattacaggcacccacgagcatgcccggctaattttttgtattttcagtagagatgggtttcaccatgttggccaggctggtctcgaattccagacctcaggtgatccacccgcctcggcctcccaaagtgctgggattacaggtgcgagccaccgtgcccggcctctggttttgttttgttttttttttttaatgggggacaaaagagagggaaagacccctataaatctatatataacaatgtaaccatatacttgcatgtctaatacaaactgaagaaattagcctaactgccaatatcaagttgcagattttaatccatggaaattgtgttttgtgctgaattgtatttgctgattacctgaaattggcttctttttattgggcttctctggagaatttctcccactccccacctctgcagaagaaaattttgctcttataaaacctcatgttttcatcattcccatcttttctttttattgcctcttatatctctgctctttgacctcaaggtctagaggtctgcagtaagccaagaaacaaaggtggggtggatgaggcaaggtttgcaggagaaagaggaattgagaaatggggtatttttgctatcagctcttctgctatgaagtagtaaaaggcagtctataattaactgacagacctaactgaagcacagagaatacatcagacttatgcatccaagacatcagaacttggattttatcaaacttgatgacttctctaaaaggagctttggaaacttcaaattcagctataggatagtaccaatgaacacatccagctgatcccaaaagctgttttcaggtataaggacaaggagaggagacaagtgacgacagccattcccctttgcagctatctactgtagtgacagccatttcttggttgatgggttggaagtcatcagaggtttgaagaattacactggcctttgtttttctggaaatgccgaccatggagatgctttagagtcttctcaaatagcttagatgttgtaatgaggttagctttgcttcataaaacaggggccctcagaagttctccttaaatttttcaataaaaatttagctctta

SEQ ID NO: 311214 - DNA, 5247 bp, Homo sapiens
attcggaagaaggcggagcctacctctcatcaggaccagtctgactgcacctgcatccttagctcagagcatccccggagcatcttaagagctgagcgcagctgacaactaggggccggaccgtcgcaggaggcgtccgctggataccttcccccttccctgacctagagctctacagctgctgcctcggtactgaccgagggttcccagagctgtctcaccattgcaaaaacgttatagcaacagcctctgattacgacatggctgagatcaccaatatccgacctagctttgatgtgtcaccggtggtggccggcctcatcggggcctctgtgctggtggtgtgtgtctcggtgaccgtctttgtctggtcatgctgccaccagcaggcagagaagaagcacaagaacccaccatacaagtttattcacatgctcaaaggcatcagcatatacccagagaccctcagcaacaagaagaaaatcatcaaagtgcggagagacaaagatggtcctgggagggaaggtggacgtaggaacctgttggtggacgcagcagaggctggcctgctaagccgagacaaagatcccagggggcctagctctggatcttgtatagaccaattacccatcaaaatggactatggggaagaactaaggagccctattacaagcctgacccctggggagagcaaaaccacctctccatcatctccagaggaggatgtcatgctaggatccctcaccttctcagtggactataacttcccgaaaaaagccctggtggtgacaatccaggaggcccacgggctgccagtgatggatgaccagacccagggatctgacccctacatcaaaatgaccatccttcctgacaaacggcatcgggtgaagaccagagtgctgcggaagaccctggaccctgtgtttgacgagaccttcaccttctatggcatcccctacagccagctgcaggacctggtgctgcacttccttgtcctcagctttgaccgcttctctcgggatgatgtcattggcgaggtcatggtgccactggcaggggtggaccccagcacaggcaaggtacaactgaccagggacatcatcaaaaggaatatccagaagtgcatcagcagaggggagctccaggtgtctctgtcatatcagcctgtggcacagagaatgacagtggtggtcctcaaagccagacacttgccgaagatggatatcaccggtctctcaggtaatccttatgtcaaggtgaacgtctactacggcagaaagcgcattgccaagaagaaaacccatgtgaagaagtgcactttgaaccccatcttcaatgaatctttcatctacgacatccccactgacctcctgcctgatatcagcatcgagttcctcgttatcgacttcgatcgcaccaccaagaatgaggtggtggggaggctgatcctgggggcacacagtgtcacagccagtggtgctgaacactggagagaggtctgcgagagcccccgcaagcctgtggccaagtggcacagtctgagcgagtactaatcctgttcttctctcctctaatccccgggggccaagctggggagggatgtggaggggaaaaagatgacagagaagtggactccaaacctcattttagttgtagaagaaaatttcttacaaaacaaattccacaaagaacaccctatatgaccacagctgcagatcagttcttagcaatgatgtttttttttctgctttgcaaggcgctagaatcttttattttactttattttttttgaggtggagtttcgctcttgttgcccgggctggagtgcaatggtgagatctcaactcactgcaacctctgccctccaggttcaagtgattctcctccctcagcctcccaagtagctgggattacaggcacccacgagcatgcccggctaattttttgtattttcagtagagatgggtttcaccatgttggccaggctggtctcgaattccagacctcaggtgatccacccgcctcggcctcccaaagtgctgggattacaggtgcgagccaccgtgcccggcctctggttttgttttgttttttttttttaatgggggacaaaagagagggaaagacccctataaatctatatataacaatgtaaccatatacttgcatgtctaatacaaactgaagaaattagcctaactgccaatatcaagttgcagattttaatccatggaaattgtgttttgtgctgaattgtatttgctgattacctgaaattggcttctttttattgggcttctctggagaatttctcccactccccacctctgcagaagaaaattttgctcttataaaacctcatgttttcatcattcccatcttttctttttattgcctcttatatctctgctctttgacctcaaggtctagaggtctgcagtaagccaagaaacaaaggtggggtggatgaggcaaggtttgcaggagaaagaggaattgagaaatggggtatttttgctatcagctcttctgctatgaagtagtaaaaggcagtctataattaactgacagacctaactgaagcacagagaatacatcagacttatgcatccaagacatcagaacttggattttatcaaacttgatgacttctctaaaaggagctttggaaacttcaaattcagctataggatagtaccaatgaacacatccagctgatcccaaaagctgttttcaggtataaggacaaggagaggagacaagtgacgacagccattcccctttgcagctatctactgtagtgacagccatttcttggttgatgggttggaagtcatcagaggtttgaagaattacactggcctttgtttttctggaaatgccgaccatggagatgctttagagtcttctcaaatagcttagatgttgtaatgaggttagctttgcttcataaaacaggggccctcagaagttctccttaaatttttcaataaaaatttagctcttaaaaaaataacagtgtgactgagtgaatgaagataagttggattctttcagagcattcttttcctcaaaacgagctgcataattcttggaatttatgtcttaccacatggtggagggatggaggaactacaggatgcaattcttcttctaccaatgggcaatagaggttgagagagattcagcatctttctgggattagaattcaagtctctttactcctacagcagctgtgtctccaacgttgagactttgcagatggcacagactccatggataataggtaaacttggggccgggcgcagtggctcacgcctgtaatcccagtattttgggaggccgaggtggaaagatcgcttgagcccaggagttcaagaccagcctgggctacatgacgaaactccatctctatcaaaaatacaaaaaattaactaggtgtggtgctgcacgcctgtggtcccagctattcaggaggctgaggtgggaggatcatttgagcccagaggtagaggctgcagtgagccatgatcatgccactgcactctgggctgggtaacagagtgagatcctgtctcaaaaattaattaattaattaattaaaataaactaggtaaacttggataggcagtagatatttttgcccacctgaggaggaactcagtcaagctgttgcttaacagcttgatccagggcgtgaaaggttagttgagactgaagtgttcacttccatagaagaacatcacttttaaccttgctttggcgaagggagtcggaaagctgagtctctatggacgggggggtgatcttgctttcagtgttccctcagcttttgtggatttaaaaccattctgctccccctaaaccttttgtttgatttcagcccatgttcttgacaatgcagagcaattctgagcagtcacaaagcctactctctgttcttgtccctgccaacccccaccccccataatctgactcacaacttcaccatcagttggggtcataccactagtctctgtcctataccccatgaaatgtaaatactgtatcataagtagaagaaaataatttttgttttctaaaaatgcattttgagatagtttaatgtaaatctgacaggagcattctgaagccccattaggaaaaaatttaaatggttcctcttcatcgccttaatgtctaaagatcagaaatcgctgagcaaacccgcttttgtttccttcccagaaacaatgcaaaacaacaggtggagatagtctggtctttgccctgctgtgtgtgcctctgtagctcctcctgacaaacgtctgggaaaacagcctcaccccactctcctctctcttccccatttccttgtagctttattccttgcatctttgggtctactgagcagtgggtgctgaggtgacaggggaggaaccagttgttctgtagcctaggaactgcctcagtgtctttgccagaaaaaggcaaagaggcggacagtgcagggctcctccctcctacctcaggcctgatccatcgtgcccttgactttgccgtctcaaagtttcttagctgactttggctttcacatttgttctttccagagctaactgataagagtggaggaggaatgccttctcctaagagtcagttgaaagaaagacaagagagtcacatcttagcttttgcacaaggcattcgtggtcaggaataggttagggaatggtcacttctgattttccaacagttgctccttctctgaagagatcttgattcctttgggaagacaagaatttttcttaataacaaaggtccctttatgagttattccttctttcagttcatctcactggagcacagccaagatggacatgtttatggacagtgctctagatgtgaaaacagatagaactggtttgtgggacaggggcagcttgctcaggagagggaataacgcaggtcccttttcttggaaggcttgtactatggccatgacagtgacattgccctcaccatgatccctctccaaagtggttgtctttctttaccttgtgtcttctcttgtaaaaatgaaactcaaaaataaaataaatgtgtcaaattttgaaaaaaaaagaaaactgaaaaagctaacatgaattgtgtgaaattgcataatgctgtaatgctaatctacaatatgtaatgctatcttgtatgttgaatttgttaatgcaccacacaagtgcaaaataaagactgattcacattacataggca

SEQ ID NO: 311215 - DNA, 5356 bp, Homo sapiens
attcggaagaaggcggagcctacctctcatcaggaccagtctgactgcacctgcatccttagctcagagcatccccggagcatcttaagagctgagcgcagctgacaactaggggccggaccgtcgcaggaggcgtccgctggataccttcccccttccctgacctagagctctacagctgctgcctcggtactgaccgagggttcccagagctgtctcaccattgcaaaaacgttatagcaacagcctctgattacgacatggctgagatcaccaatatccgacctagctttgatgtgtcaccggtggtggccggcctcatcggggcctctgtgctggtggtgtgtgtctcggtgaccgtctttgtctggtcatgctgccaccagcaggcagagaagaagcacaagaacccaccatacaagtttattcacatgctcaaaggcatcagcatatacccagagaccctcagcaacaagaagaaaatcatcaaagtgcggagagacaaagatggtcctgggagggaaggtggacgtaggaacctgttggtggacgcagcagaggctggcctgctaagccgagacaaagatcccagggggcctagctctggatcttgtatagaccaattacccatcaaaatggactatggggaagaactaaggagccctattacaagcctgacccctggggagagcaaaaccacctctccatcatctccagaggaggatgtcatgctaggatccctcaccttctcagtggactataacttcccgaaaaaagccctggtggtgacaatccaggaggcccacgggctgccagtgatggatgaccagacccagggatctgacccctacatcaaaatgaccatccttcctgacaaacggcatcgggtgaagaccagagtgctgcggaagaccctggaccctgtgtttgacgagaccttcaccttctatggcatcccctacagccagctgcaggacctggtgctgcacttccttgtcctcagctttgaccgcttctctcgggatgatgtcattggcgaggtcatggtgccactggcaggggtggaccccagcacaggcaaggtacaactgaccagggacatcatcaaaaggaatatccagaagtgcatcagcagaggggagctccaggtgtctctgtcatatcagcctgtggcacagagaatgacagtggtggtcctcaaagccagacacttgccgaagatggatatcaccggtctctcaggtaatccttatgtcaaggtgaacgtctactacggcagaaagcgcattgccaagaagaaaacccatgtgaagaagtgcactttgaaccccatcttcaatgaatctttcatctacgacatccccactgacctcctgcctgatatcagcatcgagttcctcgttatcgacttcgatcgcaccaccaagaatgaggtggtggggaggctgatcctgggggcacacagtgtcacagccagtggtgctgaacactggagagaggtctgcgagagcccccgcaagcctgtggccaagtggcacagtctgagcgagtactaatcctgttcttctctcctctaatccccgggggccaagctggggagggatgtggaggggaaaaagatgacagagaagtggactccaaacctcattttagttgtagaagaaaatttcttacaaaacaaattccacaaagaacaccctatatgaccacagctgcagatcagttcttagcaatgatgtttttttttctgctttgcaaggcgctagaatcttttattttactttattttttttgaggtggagtttcgctcttgttgcccgggctggagtgcaatggtgagatctcaactcactgcaacctctgccctccaggttcaagtgattctcctccctcagcctcccaagtagctgggattacaggcacccacgagcatgcccggctaattttttgtattttcagtagagatgggtttcaccatgttggccaggctggtctcgaattccagacctcaggtgatccacccgcctcggcctcccaaagtgctgggattacaggtgcgagccaccgtgcccggcctctggttttgttttgttttttttttttaatgggggacaaaagagagggaaagacccctataaatctatatataacaatgtaaccatatacttgcatgtctaatacaaactgaagaaattagcctaactgccaatatcaagttgcagattttaatccatggaaattgtgttttgtgctgaattgtatttgctgattacctgaaattggcttctttttattgggcttctctggagaatttctcccactccccacctctgcagaagaaaattttgctcttataaaacctcatgttttcatcattcccatcttttctttttattgcctcttatatctctgctctttgacctcaaggtctagaggtctgcagtaagccaagaaacaaaggtggggtggatgaggcaaggtttgcaggagaaagaggaattgagaaatggggtatttttgctatcagctcttctgctatgaagtagtaaaaggcagtctataattaactgacagacctaactgaagcacagagaatacatcagacttatgcatccaagacatcagaacttggattttatcaaacttgatgacttctctaaaaggagctttggaaacttcaaattcagctataggatagtaccaatgaacacatccagctgatcccaaaagctgttttcaggtataaggacaaggagaggagacaagtgacgacagccattcccctttgcagctatctactgtagtgacagccatttcttggttgatgggttggaagtcatcagaggtttgaagaattacactggcctttgtttttctggaaatgccgaccatggagatgctttagagtcttctcaaatagcttagatgttgtaatgaggttagctttgcttcataaaacaggggccctcagaagttctccttaaatttttcaataaaaatttagctcttaaaaaaataacagtgtgactgagtgaatgaagataagttggattctttcagagcattcttttcctcaaaacgagctgcataattcttggaatttatgtcttaccacatggtggagggatggaggaactacaggatgcaattcttcttctaccaatgggcaatagaggttgagagagattcagcatctttctgggattagaattcaagtctctttactcctacagcagctgtgtctccaacgttgagactttgcagatggcacagactccatggataataggtaaacttggggccgggcgcagtggctcacgcctgtaatcccagtattttgggaggccgaggtggaaagatcgcttgagcccaggagttcaagaccagcctgggctacatgacgaaactccatctctatcaaaaatacaaaaaattaactaggtgtggtgctgcacgcctgtggtcccagctattcaggaggctgaggtgggaggatcatttgagcccagaggtagaggctgcagtgagccatgatcatgccactgcactctgggctgggtaacagagtgagatcctgtctcaaaaattaattaattaattaattaaaataaactaggtaaacttggataggcagtagatatttttgcccacctgaggaggaactcagtcaagctgttgcttaacagcttgatccagggcgtgaaaggttagttgagactgaagtgttcacttccatagaagaacatcacttttaaccttgctttggcgaagggagtcggaaagctgagtctctatggacgggggggtgatcttgctttcagtgttccctcagcttttgtggatttaaaaccattctgctccccctaaaccttttgtttgatttcagcccatgttcttgacaatgcagagcaattctgagcagtcacaaagcctactctctgttcttgtccctgccaacccccaccccccataatctgactcacaacttcaccatcagttggggtcataccactagtctctgtcctataccccatgaaatgtaaatactgtatcataagtagaagaaaataatttttgttttctaaaaatgcattttgagatagtttaatgtaaatctgacaggagcattctgaagccccattaggaaaaaatttaaatggttcctcttcatcgccttaatgtctaaagatcagaaatcgctgagcaaacccgcttttgtttccttcccagaaacaatgcaaaacaacaggtggagatagtctggtctttgccctgctgtgtgtgcctctgtagctcctcctgacaaacgtctgggaaaacagcctcaccccactctcctctctcttccccatttccttgtagctttattccttgcatctttgggtctactgagcagtgggtgctgaggtgacaggggaggaaccagttgttctgtagcctaggaactgcctcagtgtctttgccagaaaaaggcaaagaggcggacagtgcagggctcctccctcctacctcaggcctgatccatcgtgcccttgactttgccgtctcaaagtttcttagctgactttggctttcacatttgttctttccagagctaactgataagagtggaggaggaatgccttctcctaagagtcagttgaaagaaagacaagagagtcacatcttagcttttgcacaaggcattcgtggtcaggaataggttagggaatggtcacttctgattttccaacagttgctccttctctgaagagatcttgattcctttgggaagacaagaatttttcttaataacaaaggtccctttatgagttattccttctttcagttcatctcactggagcacagccaagatggacatgtttatggacagtgctctagatgtgaaaacagatagaactggtttgtgggacaggggcagcttgctcaggagagggaataacgcaggtcccttttcttggaaggcttgtactatggccatgacagtgacattgccctcaccatgatccctctccaaagtggttgtctttctttaccttgtgtcttctcttgtaaaaatgaaactcaaaaataaaataaatgtgtcaaattttgaaaaaaaaagaaaactgaaaaagctaacatgaattgtgtgaaattgcataatgctgtaatgctaatctacaatatgtaatgctatcttgtatgttgaatttgttaatgcaccacacaagtgcaaaataaagactgattcacattacataggcaaaaaaaaaacacaacaatcaaaacaaacacaaaatcaacaacaatcacaaacccacatacaacaacatacacaaaccatcacactatcatataaccaccactctacacc
